United States Patent Application Publication US 2014/0259212 A1 - sequence listing, part 41

SEQ ID NO: 148563 - DNA, 1308 bp, Roseiflexus sp. RS-1
  CDS (1)..(1308): transl_table=11
ttgaatgcaccaggtatccatcgctggcgcgcgctagaaactggcgcgcgtcgctatctcctgcacctggcgatcctcacgctcagcctgtcggtggtggtgctgtactacaacctggcagttgtggcgctggggtattcgcgcggttttcttggcattttgcagacggtgacgcagggtgtggcagcgctgttgagcctgccgctctggttaagcgtgcagcgcctggggttgcgccgcgcgcttgcggcatcggtagtgctgtacgctgttgggctgctgctgttcgccgcgctgccgcaggcagcgtcgctgatcgtatctgccgcattcatgggaatggctgcggtgctggcgcaggtgacggcagcgcccctcatgatgcgcctcagcaatgatgcaacccgcgattatctgttcagcgccagcgctgcgatcgctatcggcttgaatggcattggcaacctcggcgccgggttccttgccgatgcagtcgcgtatctgctcaatgttccgcccgacagcggcgtgacctatcgcgcggtatttgccattgccgggatcggcgcactggcatcgctcccgccgttgttgctgcttcgtgaaccagagcatccattggcgtcaccgtcgtcggaaagcgtcgccgctccgacggaaacagatgcgcactccagcagcgcacctccctggctggctcgtgcccgaccatggttcaggcgtctacccacgccgctgcaggcactgatgcgcaaaccggcgctggtggtcaaacttttgctgccgcccttcctgatctcatggggggcagcgctgctcattccctatctcaacctctacttccgcgagcagtttggtcttgacaaccgcgcgctcggtgcgcttttcgccgggttcgatgtggcgaccggactggcggcattgaccggtccggcactggcggcgcgcctggggaagatccataccgtggtcgtgacccgcgctgttgggattccgctcctgcttctgttgggcgccgcctccgacctgtggctggcaatcatcgccgcactggcgcgcgtcgttgccttcaatatggcagcgccgctctacgatgcctatgcgatggaacaaaccgaagagcgcgcgcgaccgttcatgattggactgctgggggcggcatatagcgccgggtttctcattgcacccctgatcagcacgttcgttcaggaacggtacggtttcagaccgctgttcgttgcgacagcggcgctgtacgcactttcggttctggtgacgtggcgattcttcgaccatcgtgtttcttga

SEQ ID NO: 148564 - protein, 435 aa, Roseiflexus sp. RS-1
MNAPGIHRWRALETGARRYLLHLAILTLSLSVVVLYYNLAVVALGYSRGFLGILQTVTQGVAALLSLPLWLSVQRLGLRRALAASVVLYAVGLLLFAALPQAASLIVSAAFMGMAAVLAQVTAAPLMMRLSNDATRDYLFSASAAIAIGLNGIGNLGAGFLADAVAYLLNVPPDSGVTYRAVFAIAGIGALASLPPLLLLREPEHPLASPSSESVAAPTETDAHSSSAPPWLARARPWFRRLPTPLQALMRKPALVVKLLLPPFLISWGAALLIPYLNLYFREQFGLDNRALGALFAGFDVATGLAALTGPALAARLGKIHTVVVTRAVGIPLLLLLGAASDLWLAIIAALARVVAFNMAAPLYDAYAMEQTEERARPFMIGLLGAAYSAGFLIAPLISTFVQERYGFRPLFVATAALYALSVLVTWRFFDHRVS

SEQ ID NO: 148565 - DNA, 1305 bp, Roseiflexus castenholzii DSM 13941
  CDS (1)..(1305): transl_table=11
atgcaccacattatcgaacgctggcgcgcactgaaaaccgacgcgcgtcgctatcttctgcacctggcgatccttacgctcagcctttcggtggtggggctgtactacaatctggcggtgctggcgctcggttattcccgtggcttccttggcatcctgcaaacagtcacacaggcggttgcggcgctgttgagcttgccgctctggttgggcgtgcagcgcctgggattgcgcgctgcgatcataacgtcggtggcgttgtatgccgccggcattctgttgttcgccgcttttccgcaggcggcgctgctcatctgttctgccgctctgatgggaatggcgtccgtgctgatgcaggtgactgctgcacctctcatgatgcgcctcagcaacgacgccactcgcgatgatctgttcagcgccagcgccgcagtcgccgttgggttgagcggcatcggcaacctgggcgcagggttcatcgccgatacgctgagtcacgtgcttggcgctcccgccgacagtggcgcgacctatcgcgccgtttttgcgatcgccgggattggggtactggcatcgcttccaccgttgttcctgattcgtgaaccggaacgagcgccagagtcacccttgcctgaaagcggcgcctcaccttcgggtacaggatcgttcttcggtggtcttccctcctggctgttggttgcccaaccatggttctggcgtcttccgacgccactacgcgctttgttgcgcaagccagcgtttgtggcgaaactgctgctgccgccgttcctgatctcgtggggcgcggcgttgctcatcccttacctcaacctctacttccgcgaacggtttggcctcgacaatcgcgcgctcggcgtactcttcgccggattcgatgtggcgaccggtctggcgtcattgaccggtccggcgctggcggcgcggctggggaagatgcgcaccgtggcggtgacccgcgctatcggcgtgccgttgctgctgatcctgggagcggcgtcggatctgtggctcgcaattgcggcggcgctggcgcgggtgatggcatccaatatggcatcgccgctctacgacgcctatgcgatggaacagactgaggaaagtgcgcgtccgttcatgatcggtctgctgggagcagcgtacagcatcgggtttctcattgctcccttgatcagcacttttgttcaggaacggtatggctttggtccgctgttcgtcgcaacagcgatcctgtatgcactctcggttgctgtcacatggtggttttttgggaaagagcgcccttaa

SEQ ID NO: 148566 - protein, 434 aa, Roseiflexus castenholzii DSM 13941
MHHIIERWRALKTDARRYLLHLAILTLSLSVVGLYYNLAVLALGYSRGFLGILQTVTQAVAALLSLPLWLGVQRLGLRAAIITSVALYAAGILLFAAFPQAALLICSAALMGMASVLMQVTAAPLMMRLSNDATRDDLFSASAAVAVGLSGIGNLGAGFIADTLSHVLGAPADSGATYRAVFAIAGIGVLASLPPLFLIREPERAPESPLPESGASPSGTGSFFGGLPSWLLVAQPWFWRLPTPLRALLRKPAFVAKLLLPPFLISWGAALLIPYLNLYFRERFGLDNRALGVLFAGFDVATGLASLTGPALAARLGKMRTVAVTRAIGVPLLLILGAASDLWLAIAAALARVMASNMASPLYDAYAMEQTEESARPFMIGLLGAAYSIGFLIAPLISTFVQERYGFGPLFVATAILYALSVAVTWWFFGKERP

SEQ ID NO: 148567 - DNA, 1224 bp, Ralstonia eutropha JMP134
  CDS (1)..(1224): transl_table=11
atgcgggcctcgctcgccagtatggtgctgccgccgggtatcgatccggtggccctgacgctgctgctgggccgcgcgctgcgcggcatctgcgatggctttgtcgccgtgctgctgcccgcgtacctgctggcgctcggcttcgatccgctcgcggtcgggctgatcggcagcgccacgctggcggggtctgcgctggcgaccatcctggtcggcgtgctcgggcaccgctatccgttgcggcgcatgctgacgctggctgccgcgctgatggtggcgaccggcatcggctttgcgggactaacctcgctgtggccgctggtgatcgttgcctttgtcggcacgatcaatcccggctcgggtgatgtcagcctgttcctgccgctggagcatgcgcgcctggcggatgcggccacgccgcaggcgcgcaccgcgctgtttgcgcgctacagcctgagcggttcgctggcatcggccttcggcgcgctcgcggcagcgctgccgggctgggccgcggggcacggcatgctggcgccgctgcccgccatgcgcgcgatgttcgtgctgtacgcgctcgtgggaggcgcgttgtggtacctctatgcccgcttgccggcacacgatccgcatgcggacacgccgcgcgtgccactcggtgcatcgcgcggcatcgtcatgcgcctggcgctgctgttcagcgtggacgccttcgcgggcgggctggtggtcaacgcgctgctgtcgctctggctgatgcagcgctttgggctgtcgccgggcgacgcgggccggttcttcttctgggccgggctgttgtcggcggcatcgcagctggtggccgtgccgctggcgcgccgcgtcggcctcctgaacaccatggtgttcacgcatatcccgtccagcctgtgcctgattgccgcggccatggcgccctcgctcgtgccggcgctggtcctgctgctggcccgcagcgcactgtcccagatggatgtaccgactcgcaccgcgtacgtgatggccgtggtgacaccgccagaacgccccgcggctgccagcctgacagcagtacccagaagtctggccgccgcgcttggcccgacgctggccggcgccatgctggccacaggctgggccgccgcgccgctggtggcttgcggcctgctcaagatcggctatgaccttgccctgctgcgggcattccggcgcgtcgagcccgagcggtaa

SEQ ID NO: 148568 - protein, 407 aa, Ralstonia eutropha JMP134
MRASLASMVLPPGIDPVALTLLLGRALRGICDGFVAVLLPAYLLALGFDPLAVGLIGSATLAGSALATILVGVLGHRYPLRRMLTLAAALMVATGIGFAGLTSLWPLVIVAFVGTINPGSGDVSLFLPLEHARLADAATPQARTALFARYSLSGSLASAFGALAAALPGWAAGHGMLAPLPAMRAMFVLYALVGGALWYLYARLPAHDPHADTPRVPLGASRGIVMRLALLFSVDAFAGGLVVNALLSLWLMQRFGLSPGDAGRFFFWAGLLSAASQLVAVPLARRVGLLNTMVFTHIPSSLCLIAAAMAPSLVPALVLLLARSALSQMDVPTRTAYVMAVVTPPERPAAASLTAVPRSLAAALGPTLAGAMLATGWAAAPLVACGLLKIGYDLALLRAFRRVEPER

SEQ ID NO: 148569 - DNA, 1287 bp, Deinococcus geothermalis DSM 11300
  CDS (1)..(1287): transl_table=11
atggccttaccgtcacactcacagagctgccaagcggaggtgcccatgacctggcggttttcccggcaagtgtggctctacctcacctcggcgttcaccttcgggctgtcgcaggcgttcgcggcgctgtttctgaatttctacctgcgggcgctcggactgggggcggaatggcagggcctggtcaacgcccttcctgcgctgacgctggcctgcctgagccttccggcggtggcgcttgcgcggcgaatcagcaacgcccgtacccttcagctgggcagtgtcctgagcctgatcggcgccgtgctgttgagcctgtccgctggtccgcttgccgccatcgtgggggcgctggtgcagggggcgggcgccgcgctgctgtcggtcgctggggcaccctttatggcgaacaacagcgacgagcgcagccgcgtcaccctcttcagtgtccagagtgccttgatgacgggcgcgggctttctgggcaacctgctgggcgggcgagtgccggaactgtatgcggcagccaccggagccgcgcccgatggtctggccgcgctgcgagccgcgcttctggtgtcggcggcctttcaactcgtcggcctgctgccggtgctgttcctgcgccccagcggcaggcctcgcccccagggccgctccttcgcggtgcgcgacaagggaacgatgacgcggctggtggcccccaacgtgttggtgggtctgggggcaggggcgaccattcccttcctgaacgtctttatagagggtaagtttcacgtggactacgccagcctgggcaccctatttgcctggaccagtctggcgaccgccgcgacggtgctcgttcagccgctgctggtgcgccgcctgggccagcttcctgctgtcttggtggtgcaggcggccagcctgccctttttggcggtgctgggctttgcgccgcagctctggatggtcagcgcggccttatttactcgcggggcgctgatgaacgcggcgggtccggtctacagtgcctacgcgatgtctgccctccccgacgaggaccgcgcgatgtactcggcggtcaatacgatcgcctgggatctgtgctgggcgatcagcagcctgctgagcggtgtggtgcgcggcctgctgccctttgacgccgcctttcgcgtgctgttcgcctggacgatcctgatgtatgcggccagcgtgctggtgatctttctggggctgtaccgccgggtgtaccgccgggagcggcgtttggcccccaccgtcgccgctggcccgccatcatga

SEQ ID NO: 148570 - protein, 428 aa, Deinococcus geothermalis DSM 11300
MALPSHSQSCQAEVPMTWRFSRQVWLYLTSAFTFGLSQAFAALFLNFYLRALGLGAEWQGLVNALPALTLACLSLPAVALARRISNARTLQLGSVLSLIGAVLLSLSAGPLAAIVGALVQGAGAALLSVAGAPFMANNSDERSRVTLFSVQSALMTGAGFLGNLLGGRVPELYAAATGAAPDGLAALRAALLVSAAFQLVGLLPVLFLRPSGRPRPQGRSFAVRDKGTMTRLVAPNVLVGLGAGATIPFLNVFIEGKFHVDYASLGTLFAWTSLATAATVLVQPLLVRRLGQLPAVLVVQAASLPFLAVLGFAPQLWMVSAALFTRGALMNAAGPVYSAYAMSALPDEDRAMYSAVNTIAWDLCWAISSLLSGVVRGLLPFDAAFRVLFAWTILMYAASVLVIFLGLYRRVYRRERRLAPTVAAGPPS

SEQ ID NO: 148571 - DNA, 1134 bp, Thermus aquaticus Y51MC23
  CDS (1)..(1134): transl_table=11
atgcacaaactctctcccgcctaccgctttctcttggcaggcttcctctggtccttcggggggaacctggtctacttcttcctcaacttccacctcgaggccctgggcttctcccgccaggccatcggcctggcccaggcggtggtcctcctctccggggtggccttcgccctgcccttggcctacctgatccccaggctgggcttcctgcgaagcctccacctggccttcttcctcaccctccccgccgttttgcttttgggccttggccttctggtcttccccagcctggccctctacggcctggcgggggcccttctgcagggggcggcggcgccccttctcgcccggctcgtccccgaggggaggcgggtggccttcttcagcctgcaggcggccctcaccacgatgagtggcttcttctccaccctcctcgcgggctacctctccgagctcttcggggcgcggtgggtcctcctcttcgccctgcccttcttcctcctggggcttccttttgtgtgggggcttccggtggtggaaggggagaggaggcctttgaggctttcccgtcgcctcttcctctggctcaggctcctcttgccccaggtggtcatcggcttcggggcggggctcgtcatcccctttttgaacctttacctgaaggagaagttcggcctcacctacgggaccacggggctcatcttcgccctctcctccttggccacgggggcggccatgctcctccagcccctcctggtccaaaggctcgggcggcttggggccatcgtcttcgtccaggccctctccctgccctttctggcggccttggcctgggccccctggcttcccttggtcaccctggccctcctcatccgcggggccctgatgaacgccgccgggcccgtgtacgccgccttggtcatggactacctggacgaggaggaaaggccgggcttcttcctggtggaaagcgccctctggagccttctcttcgccatggcgagcgccctttccgggatggtccagggggccatggggctaaaggcctttgactacctcttcggggtgaccctcgccctttacgccctgggcatcgccctctggccctgggccttccgcaagcgggtagactaa

SEQ ID NO: 148572 - protein, 377 aa, Thermus aquaticus Y51MC23
MHKLSPAYRFLLAGFLWSFGGNLVYFFLNFHLEALGFSRQAIGLAQAVVLLSGVAFALPLAYLIPRLGFLRSLHLAFFLTLPAVLLLGLGLLVFPSLALYGLAGALLQGAAAPLLARLVPEGRRVAFFSLQAALTTMSGFFSTLLAGYLSELFGARWVLLFALPFFLLGLPFVWGLPVVEGERRPLRLSRRLFLWLRLLLPQVVIGFGAGLVIPFLNLYLKEKFGLTYGTTGLIFALSSLATGAAMLLQPLLVQRLGRLGAIVFVQALSLPFLAALAWAPWLPLVTLALLIRGALMNAAGPVYAALVMDYLDEEERPGFFLVESALWSLLFAMASALSGMVQGAMGLKAFDYLFGVTLALYALGIALWPWAFRKRVD

SEQ ID NO: 148573 - DNA, 20 bp, Artificial sequence
  primer
atgcgcgcgcccgtctaccg

SEQ ID NO: 148574 - DNA, 23 bp, Artificial sequence
  primer
ttagtctacccgctcaagccccc

SEQ ID NO: 148575 - protein, 431 aa, Artificial sequence
  consensus sequence
  Variant (3)..(18): Xaa in position 3 to 18 is any amino acid
  Variant (20)..(23): Xaa in position 20 to 23 is any amino acid
  Variant (27)..(32): Xaa in position 27 to 32 is any amino acid
  Variant (34)..(48): Xaa in position 34 to 48 is any amino acid
  Variant (50)..(55): Xaa in position 50 to 55 is any amino acid
  Variant (57)..(62): Xaa in position 57 to 62 is any amino acid
  Variant (64)..(68): Xaa in position 64 to 68 is any amino acid
  Variant (70)..(75): Xaa in position 70 to 75 is any amino acid
  Variant (76)..(79): Xaa in position 76 to 79 is any or no amino acid
  Variant (81)..(94): Xaa in position 81 to 94 is any amino acid
  Variant (95)..(97): Xaa in position 95 to 97 is any or no amino acid
  Variant (99)..(102): Xaa in position 99 to 102 is any amino acid
  Variant (103)..(103): Xaa in position 103 is any or no amino acid
  Variant (105)..(109): Xaa in position 105 to 109 is any amino acid
  Variant (112)..(121): Xaa in position 112 to 121 is any amino acid
  Variant (123)..(125): Xaa in position 123 to 125 is any amino acid
  Variant (128)..(130): Xaa in position 128 to 130 is any amino acid
  Variant (132)..(141): Xaa in position 132 to 141 is any amino acid
  Variant (143)..(144): Xaa in position 143 to 144 is any amino acid
  Variant (146)..(153): Xaa in position 146 to 153 is any amino acid
  Variant (154)..(165): Xaa in position 154 to 165 is any or no amino acid
  Variant (167)..(185): Xaa in position 167 to 185 is any amino acid
  Variant (187)..(207): Xaa in position 187 to 207 is any amino acid
  Variant (208)..(244): Xaa in position 208 to 244 is any or no amino acid
  Variant (246)..(247): Xaa in position 246 to 247 is any amino acid
  Variant (249)..(254): Xaa in position 249 to 254 is any amino acid
  Variant (257)..(259): Xaa in position 257 to 259 is any amino acid
  Variant (261)..(261): Xaa in position 261 is any amino acid
  Variant (263)..(263): Xaa in position 263 is any amino acid
  Variant (266)..(271): Xaa in position 266 to 271 is any amino acid
  Variant (273)..(279): Xaa in position 273 to 279 is any amino acid
  Variant (281)..(282): Xaa in position 281 to 282 is any amino acid
  Variant (285)..(288): Xaa in position 285 to 288 is any amino acid
  Variant (291)..(294): Xaa in position 291 to 294 is any amino acid
  Variant (296)..(297): Xaa in position 296 to 297 is any amino acid
  Variant (299)..(299): Xaa in position 299 is any amino acid
  Variant (301)..(302): Xaa in position 301 to 302 is any amino acid
  Variant (306)..(318): Xaa in position 306 to 318 is any amino acid
  Variant (320)..(320): Xaa in position 320 is any amino acid
  Variant (322)..(323): Xaa in position 322 to 323 is any amino acid
  Variant (325)..(326): Xaa in position 325 to 326 is any amino acid
  Variant (328)..(329): Xaa in position 328 to 329 is any amino acid
  Variant (331)..(335): Xaa in position 331 to 335 is any amino acid
  Variant (337)..(339): Xaa in position 337 to 339 is any amino acid
  Variant (341)..(344): Xaa in position 341 to 344 is any amino acid
  Variant (346)..(346): Xaa in position 346 is any amino acid
  Variant (348)..(348): Xaa in position 348 is any amino acid
  Variant (350)..(350): Xaa in position 350 is any amino acid
  Variant (352)..(352): Xaa in position 352 is any amino acid
  Variant (354)..(355): Xaa in position 354 to 355 is any amino acid
  Variant (357)..(363): Xaa in position 357 to 363 is any amino acid
  Variant (366)..(385): Xaa in position 366 to 385 is any amino acid
  Variant (387)..(388): Xaa in position 387 to 388 is any amino acid
  Variant (390)..(397): Xaa in position 390 to 397 is any amino acid
  Variant (398)..(401): Xaa in position 398 to 401 is any or no amino acid
  Variant (404)..(405): Xaa in position 404 to 405 is any amino acid
  Variant (407)..(409): Xaa in position 407 to 409 is any amino acid
  Variant (412)..(423): Xaa in position 412 to 423 is any amino acid
  Variant (424)..(430): Xaa in position 424 to 430 is any or no amino acid
LLXXXXXXXXXXXXXXXXNXXXXALGXXXXXXGXXXXXXXXXXXXXXXPXXXXXXRXXXXXXLXXXXXLXXXXXXXXXXLXXXXXXXXXXXXXXXXXGXXXXXLXXXXXAPXXXXXXXXXXRXXXFSXXXAXXXXXXXXXXLXXGXXXXXXXXXXXXXXXXXXXXRXXXXXXXXXXXXXXXXXXXLXXXXXXXXXXXXXXXXXXXXXXXXXXXXXXXXXXXXXXXXXXXXXXXXXXXXXXXXXXLXXPXXXXXXGAXXXIXPXLNXXXXXXFXXXXXXXGXXFAXXXXATXXXXLXXPXLXXRLGXXXXXXXXXXXXXPXLXXLXXAXXLXXXXXAXXXRXXXXNXAXPXYXAXXMXXXXXXXRPXXXXXXXXXXXXXXXXXXXXSXXVXXXXXXXXXXXXLFXXTXXXYAXXXXXXXXXXXXXXXXXXXR

SEQ ID NO: 148576 - protein, 62 aa, Artificial sequence
  protein pattern
  Variant (3)..(3): Xaa in position 3 is Phe or Tyr
  Variant (6)..(6): Xaa in position 6 is Leu or Val
  Variant (7)..(7): Xaa in position 7 is Phe or Tyr
  Variant (8)..(8): Xaa in position 8 is Phe, Ile or Leu
  Variant (9)..(9): Xaa in position 9 is Glu, Lys or Arg
  Variant (10)..(10): Xaa in position 10 is Glu or Gly
  Variant (11)..(11): Xaa in position 11 is any amino acid
  Variant (13)..(13): Xaa in position 13 is any amino acid
  Variant (14)..(14): Xaa in position 14 is Leu or Val
  Variant (15)..(15): Xaa in position 15 is Asp, Ser or Thr
  Variant (16)..(17): Xaa in position 16 to 17 is any amino acid
  Variant (18)..(18): Xaa in position 18 is Ala, Ser or Thr
  Variant (19)..(19): Xaa in position 19 is any amino acid
  Variant (21)..(21): Xaa in position 21 is any amino acid
  Variant (22)..(22): Xaa in position 22 is Ile or Leu
  Variant (25)..(26): Xaa in position 25 to 26 is any amino acid
  Variant (27)..(27): Xaa in position 27 is Asp or Ser
  Variant (28)..(28): Xaa in position 28 is Leu or Val
  Variant (31)..(32): Xaa in position 31 to 32 is any or no amino acid
  Variant (34)..(34): Xaa in position 34 is any amino acid
  Variant (35)..(36): Xaa in position 35 to 36 is any or no amino acid
  Variant (38)..(38): Xaa in position 38 is any amino acid
  Variant (39)..(39): Xaa in position 39 is Gly or Gln
  Variant (41)..(41): Xaa in position 41 is any amino acid
  Variant (43)..(43): Xaa in position 43 is Ala or Val
  Variant (44)..(44): Xaa in position 44 is any amino acid
  Variant (48)..(48): Xaa in position 48 is any amino acid
  Variant (49)..(49): Xaa in position 49 is Ile, Leu or Met
  Variant (50)..(50): Xaa in position 50 is any amino acid
  Variant (51)..(51): Xaa in position 51 is Ala or Thr
  Variant (52)..(52): Xaa in position 52 is Ile or Val
  Variant (53)..(53): Xaa in position 53 is Ala, Leu or Val
  Variant (54)..(54): Xaa in position 54 is any amino acid
  Variant (55)..(55): Xaa in position 55 is Thr or Val
  Variant (56)..(56): Xaa in position 56 is Gln or Arg
  Variant (57)..(57): Xaa in position 57 is Ala or Val
  Variant (58)..(58): Xaa in position 58 is any amino acid
  Variant (59)..(59): Xaa in position 59 is Gly or Ser
  Variant (60)..(60): Xaa in position 60 is Ile, Leu or Val
  Variant (62)..(62): Xaa in position 62 is Phe or Leu
IPXLNXXXXXXFXXXXXXXGXXFAXXXXATXXAXXXLXXPXLXXRLGXXXXXXXXXXXXXPX

SEQ ID NO: 148577 - protein, 28 aa, Artificial sequence
  protein pattern
  Variant (2)..(2): Xaa in position 2 is any amino acid
  Variant (3)..(7): Xaa in position 3 to 7 is any or no amino acid
  Variant (9)..(9): Xaa in position 9 is any amino acid
  Variant (11)..(11): Xaa in position 11 is Ala, Gly or Ser
  Variant (13)..(13): Xaa in position 13 is Leu or Val
  Variant (15)..(15): Xaa in position 15 is Ala, Asp or Ser
  Variant (17)..(17): Xaa in position 17 is any amino acid
  Variant (18)..(18): Xaa in position 18 is Ala or Val
  Variant (20)..(20): Xaa in position 20 is Asp, Glu, Ser or Thr
  Variant (21)..(22): Xaa in position 21 to 22 is any amino acid
  Variant (23)..(23): Xaa in position 23 is Asp, Glu, Pro or Thr
  Variant (24)..(24): Xaa in position 24 is Asp or Glu
  Variant (25)..(25): Xaa in position 25 is Glu, Arg or Ser
  Variant (26)..(26): Xaa in position 26 is Ala, Asp or Glu
  Variant (28)..(28): Xaa in position 28 is Ala or Pro
LXXXXXXNXAXPXYXAXXMXXXXXXXRX

SEQ ID NO: 148578 - protein, 36 aa, Artificial sequence
  protein pattern
  Variant (2)..(3): Xaa in position 2 to 3 is any or no amino acid
  Variant (5)..(5): Xaa in position 5 is any amino acid
  Variant (7)..(8): Xaa in position 7 to 8 is any or no amino acid
  Variant (10)..(11): Xaa in position 10 to 11 is any amino acid
  Variant (12)..(12): Xaa in position 12 is Gly or Val
  Variant (13)..(13): Xaa in position 13 is Ala or Thr
  Variant (14)..(14): Xaa in position 14 is Ala or Gly
  Variant (17)..(17): Xaa in position 17 is Phe or Leu
  Variant (18)..(18): Xaa in position 18 is Leu or Met
  Variant (19)..(19): Xaa in position 19 is any amino acid
  Variant (20)..(20): Xaa in position 20 is Asn or Arg
  Variant (21)..(21): Xaa in position 21 is any amino acid
  Variant (22)..(22): Xaa in position 22 is Ser or Val
  Variant (23)..(23): Xaa in position 23 is Asp, Asn or Pro
  Variant (24)..(24): Xaa in position 24 is Asp or Glu
  Variant (25)..(26): Xaa in position 25 to 26 is any amino acid
  Variant (28)..(28): Xaa in position 28 is Asp or Val
  Variant (29)..(29): Xaa in position 29 is any amino acid
  Variant (30)..(30): Xaa in position 30 is Phe or Leu
  Variant (33)..(33): Xaa in position 33 is Ala, Leu or Val
  Variant (34)..(34): Xaa in position 34 is Gln or Ser
  Variant (35)..(35): Xaa in position 35 is Ala or Ser
AXXGXAXXLXXXXXAPXXXXXXXXXXRXXXFSXXXA

SEQ ID NO: 148579 - DNA, 207 bp, Saccharomyces cerevisiae
  CDS (1)..(207)
atgctgggcgatatatccaaaccacaccacacatggtctccctcctgcgtcaaaatctccccagacagtccggacccgcacccgatatccagaatgaaactgcacggctgcagattcaaaagctccaacgccctcagcgtcatcttcgcctggatatgctgcactctggtcgaacccgtgtacttgtgtgcttcgctatcattatag

SEQ ID NO: 148580 - protein, 68 aa, Saccharomyces cerevisiae
MLGDISKPHHTWSPSCVKISPDSPDPHPISRMKLHGCRFKSSNALSVIFAWICCTLVEPVYLCASLSL

SEQ ID NO: 148581 - DNA, 22 bp, Artificial sequence
  primer
atgctgggcgatatatccaaac

SEQ ID NO: 148582 - DNA, 20 bp, Artificial sequence
  primer
ctataatgatagcgaagcac

SEQ ID NO: 148583 - DNA, 930 bp, SACCHAROMYCES CEREVISIAE
  CDS (1)..(930)
atgattttcaaaaggttcgttaatttgcttgtgtttttattcctactcggtgctggcttattgacgttttttcttattctgtcaggaggcagagaatctggaacgctgaaaaatttttattggttacaggctgatacaaacggctttaacagcgctccatcgaccacgagatggtacaattacaattggtgcggctacgaagacggccagctagctaattgctctagcagggcgcccgccaagcctttctctcccagagacaattttggtaactctgtcaatttaccatcgtcgttcagaaacaaccgggatacctactattatctatccagggttggatgggccatgctgctgatttccctatttttcatcgtactggcgctggtacccggctttctggctaccttccttcctttcaaggcagtgccagtcctgtactgtgtgttgtcctggttggcctttttcttcattatattggctgcatgcttgtacacaggttgctatgtgaaggccagaaagaccttccgcaacagcgggaggtctgcaaggctgggacccaaaaactttgcgttcatctggacttcggtcttcttgatgctcgtgaacgccatttggtccactatattcagtgctacccacaaggcccactctacctactcggaccacgacatgtatgcccaatatgaaagcccttctgttgacaccggtgctcaaatggagaaatccacttacaatagtggggcgacggacggcgcgggccctatcacagccgcacctgtggttggacagcctcaacctacaaccaccactactccggctggcaatggcaagttctttcaaaaactgaaaacaagaaagcaggtgccatcagctgagttagaaccagctggggatggtggtcttgccgggccagtgacggtacgcgactag

SEQ ID NO: 148584 - protein, 309 aa, SACCHAROMYCES CEREVISIAE
MIFKRFVNLLVFLFLLGAGLLTFFLILSGGRESGTLKNFYWLQADTNGFNSAPSTTRWYNYNWCGYEDGQLANCSSRAPAKPFSPRDNFGNSVNLPSSFRNNRDTYYYLSRVGWAMLLISLFFIVLALVPGFLATFLPFKAVPVLYCVLSWLAFFFIILAACLYTGCYVKARKTFRNSGRSARLGPKNFAFIWTSVFLMLVNAIWSTIFSATHKAHSTYSDHDMYAQYESPSVDTGAQMEKSTYNSGATDGAGPITAAPVVGQPQPTTTTTPAGNGKFFQKLKTRKQVPSAELEPAGDGGLAGPVTVRD

SEQ ID NO: 148585 - DNA, 906 bp, Saccharomyces cerevisiae
  CDS (1)..(906)
atgtcctacaaaaagtttgtgtactttattaaccttttctttctactaggggctacattgttgactttttttctgatactagcaggtggcaggaccacaggagtgttgaagaatttttattggtttcaggcatccacttcgggctttaactcggcgccctccgtaaccagatggtacaattataactggtgcggctgggaaagccgcggaatagcagtcaactgctcttctaagatggcagctcagccgttttcaccaagggacaactttggcagttcccccctcatgccctcaacttttttaaacaacagaaatgcctactattatctttcaagagtgggctgggcaatgcttctaatcgggcttttctttttgttaatcacgttagtttcggttattgccagtttaatcagatacaatagacgtaccgccgctctggcaactgcaatgagctggatcacgcttttcttcataaccctatccgcttgtctgtacacaggatgttacgctaaggcagtaaaggcgtttcaccatgagaatcgtgatgctagactaggtcccaagaattttgggcttatttggaccacagtatttttgttaattgtaaacgccatttgctgtactatcatggtggctactcataaaagaaacgagtacatctatgaccgcagtttcgcttctaccaagacagtggactcacaaactccaactccagttccaacaaatggaggaataccttcctcggtgcctgtaactgaggtccaacaatctcaatcccaccagaatcataggttctttaagaaattgagaacgaaaaagagaactgtgactagcgcaggcgatgaaccagaccgggttcaagaggaacgcgtctatactgaacagaatgttcctgttgtatcatag

SEQ ID NO: 148586 - protein, 301 aa, Saccharomyces cerevisiae
MSYKKFVYFINLFFLLGATLLTFFLILAGGRTTGVLKNFYWFQASTSGFNSAPSVTRWYNYNWCGWESRGIAVNCSSKMAAQPFSPRDNFGSSPLMPSTFLNNRNAYYYLSRVGWAMLLIGLFFLLITLVSVIASLIRYNRRTAALATAMSWITLFFITLSACLYTGCYAKAVKAFHHENRDARLGPKNFGLIWTTVFLLIVNAICCTIMVATHKRNEYIYDRSFASTKTVDSQTPTPVPTNGGIPSSVPVTEVQQSQSHQNHRFFKKLRTKKRTVTSAGDEPDRVQEERVYTEQNVPVVS

SEQ ID NO: 148587 - DNA, 1290 bp, Ashbya gossypii ATCC 10895
  CDS (1)..(1290)
atgatgtttaaaggagtgattacatcgctgtcgtttctactattattaggctcatgcctgttgggctttttcacgattttgtccggtgcgaagcacacgggcgtcttgaagaacttctactggctagaagctaacaccatcaacttcaaccaggccccaccgaacacgagatggtacaactacaactggtgtgagtacggtgatgaccacaccggtgtgtgttccaacaacaaggtcatgggcttcgcgccacgggaccactggggtgactcttcggagatgcctgaaaactttatcagcaagcgggctacctatttctacttgtcgagagttggttgggctatgttggtgattggtttgttcttcatggttttggcgatcctcccatacatcgtttccatctttaccgagaaggcagcttatgtgtcgacccctgcattgtggttggcattgttcttcgtgactctagccgcgtgcttatacactgcttgctacgttaaggctcgcaacgctttccacagcaggaaccgttacgccaagttgggtcctcgcaacttcgcctttatctggacggctgtcttcctactattcctcaactgtgtgtggtcgaccttcttggccgctagcagagctgtgatgtccttcagaaaccgcaacaagaatgacaactactacgacccggcttctgacaagtcctttgacaacagcactgcgatccacagtggcgcgaccgtggtcccatcccgcaagaactactttagagaagatggcagaccagccaggggcgccgcctacgacggcgaggtcatgaccggccatggacatcagtacaacaacgcgactaactacggcgtcggttcgaagaccgctgccgctggtgccgccgtggcaggcgctgcgggtgcctacggagcttccaactacggtcactccgagcctcacgcgccagtctccaagcaggccgcctacgacacataccaggccccaagcgctcctcagaccacctcgtacacgacatccgagccatacaaggtctacaaggacccaagcgccaaggcaccaaaggtatacgtctactcggagtccgccacgcgcgacgccttcccagaggccgtcgagagacagaataaaccctccaaacagggtgtcagcagaaactcaggcagaattgtcgaccccaccgagtaccagacggccaaggacgccgcctccggcaccacagcccatgacgacctagcccacccaaggggcctaggcatggccgcgcaggccgctgcccaggctgtctaa

SEQ ID NO: 148588 - protein, 429 aa, Ashbya gossypii ATCC 10895
MMFKGVITSLSFLLLLGSCLLGFFTILSGAKHTGVLKNFYWLEANTINFNQAPPNTRWYNYNWCEYGDDHTGVCSNNKVMGFAPRDHWGDSSEMPENFISKRATYFYLSRVGWAMLVIGLFFMVLAILPYIVSIFTEKAAYVSTPALWLALFFVTLAACLYTACYVKARNAFHSRNRYAKLGPRNFAFIWTAVFLLFLNCVWSTFLAASRAVMSFRNRNKNDNYYDPASDKSFDNSTAIHSGATVVPSRKNYFREDGRPARGAAYDGEVMTGHGHQYNNATNYGVGSKTAAAGAAVAGAAGAYGASNYGHSEPHAPVSKQAAYDTYQAPSAPQTTSYTTSEPYKVYKDPSAKAPKVYVYSESATRDAFPEAVERQNKPSKQGVSRNSGRIVDPTEYQTAKDAASGTTAHDDLAHPRGLGMAAQAAAQAV

SEQ ID NO: 148589 - DNA, 897 bp, Ashbya gossypii ATCC 10895
  CDS (1)..(897)
atgggagtgttcagcgtttcgggcaaactgttgacggcgatactgctcgcgggcaacacgctgctgttgctgtttatcgtgttttcggggtcgatcgagtcctcgccgatcgaccggctgtactggctgcgggcgcagaccgacgggttcaacggggcgttcgggtggtcgaagtggacgttctggggcttgtgcaacggggagggcgcgcacaaccgcgagtgcgggcggatgtcgcccgcgtacccactgtcgcccgcggacaactttggaggggtcctgccggcgcggttcgtggaggatcaggacacgttcttctacctgtcgcgctttgcgttctgcttcttctggatcgcgctgtcgttcattgcgattgcgtttttgttctgtgtgttcacgtggtgctcgtactcgttcaccaaggtggtgttcaccatggtgctgatcgggtgcgtgttcaacgtagcggcagtggcgtgccagacggcggttgttgtgatggcgcgcaacgtgttccgcgacgacgggcgcgaggcgaagatcgggccggagctgatggggattgcgtgggccagtgtggcgtgctcgctgctggtcttcttcttcagcgggatctccttcatccgccgcgcgtggaccgcacacaaggagtacgttgagatgcagcactacaaggagcaggcgctcaagtaccagggcaccaagcacgggagcgatggccagatggaccactcgattgtgtacgacacgaaccccgagcttgagggcggcgctgtgcccgtcaatgacgtgcgcccggtgcaggcccctgtcgcagagcctcagcggcaccagagcggtgtgaagtttttcaagattaggaaaactaagaacactgtggatgacgaatccctctaa

SEQ ID NO: 148590 - protein, 298 aa, Ashbya gossypii ATCC 10895
MGVFSVSGKLLTAILLAGNTLLLLFIVFSGSIESSPIDRLYWLRAQTDGFNGAFGWSKWTFWGLCNGEGAHNRECGRMSPAYPLSPADNFGGVLPARFVEDQDTFFYLSRFAFCFFWIALSFIAIAFLFCVFTWCSYSFTKVVFTMVLIGCVFNVAAVACQTAVVVMARNVFRDDGREAKIGPELMGIAWASVACSLLVFFFSGISFIRRAWTAHKEYVEMQHYKEQALKYQGTKHGSDGQMDHSIVYDTNPELEGGAVPVNDVRPVQAPVAEPQRHQSGVKFFKIRKTKNTVDDESL

SEQ ID NO: 148591 - DNA, 795 bp, Pichia guilliermondii ATCC 6260
  CDS (1)..(795): transl_table=12
atgctcagacgaatcttcaccatcgtgcccttgatcctcctcttgggctcgacattgcttcttgttttcatgaacattgtgggtgccaacaactcatctattcttggtgacttctactggtctgaagccgaaaccagctccatctccaaggccaactttccaaagacaagatggacttcttacaatatgtgtggagtcaaagacggtcgcaattccaactgtttgtcggctgctccagcttaccctttctcgcctcaagacaacttttccaccaaacagggcattccaaagtcgtttgtttctcatagagacacctactactacttgactcggttctcatatgtgttcttccttattggtattttcttcaccgtggtggcattgattcccgttgcgctttcgatttgtctttctggcttcgtttccggaattctttcgtcattggccgttggtcttgccttattgttcgtggcagccggtgcatcagtgatgactgctgctcacgttaagggaagaaatgcgttcagagacgcaggaatgtctgcaaacctcggcgtcaagatgtttgccattacttgggcagcagtagcttgcttgcttttgagttttattttcatgtgtgtggtgagtggaacagctggtgctcgcaaagtgcaaaagagaacagaaccttatgaagacaagccagcacgctctacttcgtcttcgtcttttgaccgtacggcagtagagccctacggctcacagcaggctcagccaaagcactttttcaagtttcgccgtaacgaagtttag

SEQ ID NO: 148592 - protein, 264 aa, Pichia guilliermondii ATCC 6260
MLRRIFTIVPLILLLGSTLLLVFMNIVGANNSSILGDFYWSEAETSSISKANFPKTRWTSYNMCGVKDGRNSNCLSAAPAYPFSPQDNFSTKQGIPKSFVSHRDTYYYLTRFSYVFFLIGIFFTVVALIPVALSICLSGFVSGILSSLAVGLALLFVAAGASVMTAAHVKGRNAFRDAGMSANLGVKMFAITWAAVACLLLSFIFMCVVSGTAGARKVQKRTEPYEDKPARSTSSSSFDRTAVEPYGSQQAQPKHFFKFRRNEV

SEQ ID NO: 148593 - DNA, 882 bp, Vanderwaltozyma polyspora DSM 70294
  CDS (1)..(882)
atgggaaaaaaaatgatttttaagaagttcgttcatttgctaacctttttttttttactaggtgctgggttgttaacgttcattgtcgtcttgtctggcgcacgtagtactggcactttaactaggttttattggttggaagcagatacttctggttttaattcagctccaaacacgactagatggtataactatgagttctgtggttgggacggtcatcgcactagcaactgctcttctaaaggtgcagccaaacccttttcaccaaaagataactttggcccaagtgataacatgcctagaacctttttggataataggaatgcttattactatttatcgagaatcgggtggtcattcctattggtaagtttattttttattgttacagctataattcctcaaattattaatatcttcaaagttatcccaggaattgctatttggtccactgttagttgttggtttgctatgttcttcatgacattgacatcatgtttgtataccggttgttatgttaaagcaagacaggcattcaaccgtagagaccgcagagctaaattaggagctaaaaattttgccttcatttggacatcgacatttttgttgatggtgaattctgtttgggaaacagcaactgttgtcctaagtaagaaaagcaaatacgatcgttatcctgaaactccgacatttaactctgtctccggtgatgttagtcaccttgaaacttcaggtgggtatgttaataatccagaagtagccaagtcattgccaacacaaaagaagaaactatttaacaaattgagaacaaataatggtcgtccaccagaaaatgctccaaaagcagaagagattcctcaaaatgtgcaaaatgacaggtga

SEQ ID NO: 148594 - protein, 293 aa, Vanderwaltozyma polyspora DSM 70294
MGKKMIFKKFVHLLTFFFLLGAGLLTFIVVLSGARSTGTLTRFYWLEADTSGFNSAPNTTRWYNYEFCGWDGHRTSNCSSKGAAKPFSPKDNFGPSDNMPRTFLDNRNAYYYLSRIGWSFLLVSLFFIVTAIIPQIINIFKVIPGIAIWSTVSCWFAMFFMTLTSCLYTGCYVKARQAFNRRDRRAKLGAKNFAFIWTSTFLLMVNSVWETATVVLSKKSKYDRYPETPTFNSVSGDVSHLETSGGYVNNPEVAKSLPTQKKKLFNKLRTNNGRPPENAPKAEEIPQNVQNDR

SEQ ID NO: 148595 - DNA, 843 bp, Candida glabrata CBS 138
  CDS (1)..(843)
atgcaatacaaaagatttgtaaacgctattgtgtgtttgtttatagtaggtgcaggtctactatctttcttcctaatcctgtcaggtgcccgtgattctggtactttgaagaatttttactggttcgaagctgacaccagtggttttaatgatgccccagatgtcacaagatggtacaactacatgtactgtggttatgcagaccatgagacttacgactgttccgacaaaggtgccgacaaaccattttctccaaaggataacttcggtgaatcccccaacatgccaagaactttcattgaccacagaaagacatactactacttgtctaaggtcggctgggctatgttgttgatatcccttttcttcaccgtgttggctattgtcccaatattcctaagtatcttcaagttggctagaccattgagcatcacaacttgtgtgttgtgctggctgtcatggttcttcattacattggctgcttgtttgtacactggttgttatgccaaagctaagaatgcattccaccacgacgacagacatgcaaagatgggtgctaagaactttgctttcctatggactactgttttcctaatgggtgtatcttctatttggactatgatcgatgctattactagaagaaaggagaagtataacaagtacagaactactgacgtctattctgacaccgaagtggtcggtgctgtaccacctgttgaaagccaaccatcttctggccgtacctttttcagaaagctaagaactaagaaacacgaaactccagctggtgtgatggcggaagaggaatcccatgaaaaggtggttgaaggtgtccaaacttag

SEQ ID NO: 148596 - protein, 280 aa, Candida glabrata CBS 138
MQYKRFVNAIVCLFIVGAGLLSFFLILSGARDSGTLKNFYWFEADTSGFNDAPDVTRWYNYMYCGYADHETYDCSDKGADKPFSPKDNFGESPNMPRTFIDHRKTYYYLSKVGWAMLLISLFFTVLAIVPIFLSIFKLARPLSITTCVLCWLSWFFITLAACLYTGCYAKAKNAFHHDDRHAKMGAKNFAFLWTTVFLMGVSSIWTMIDAITRRKEKYNKYRTTDVYSDTEVVGAVPPVESQPSSGRTFFRKLRTKKHETPAGVMAEEESHEKVVEGVQT

SEQ ID NO: 148597 - DNA, 873 bp, Kluyveromyces lactis NRRL Y-1140
  CDS (1)..(873)
atgagcgcagtagggtctatattgacgaaattcgtttcgcttttatttttaatgggttcaaccatgttgttgatattcatcgttttatccggtagtatcgaacatagtccagttaatgagttttactggttacaagcagacacttcgaacattaccggtgctccagcgctgtccagatggactttctggggtctctgtggtgtctcaggtaacaagaacgtcaactgttcttctttggaaccagcttatccgttatcaccagttgatgatttcggtactacagagggattcccctccgatttcgttaacaacagagacacctactattatttgaccaggttctcattctgtttctttttgattgctttagttttcatcggtgtcggattaatcttttacgtcttgtcctggtgttcttacagtttcaccaagacggtgtttgtgaccattgttatcggtactctattgaacatggctgccagtgcgtgtcaaacggctgctacggtgttggccaaaaacgctttcaaagacgccgatgtctctgtggatatcggtgtgaaattgatggcgttctcttggactacggtagcgttgaacattatgcttttcttcattaccggtgcctctttcatcagaaaggcttacaaggctcataaggaatttgtcgaattgcaaaattacaaggaacaagcgttgagttacgagcaacaacaacagcagttgcaattccaacagcagcagcaacaacaagatttggaagctaccggtgctggtactgccatcgatgagccccagccacaagaatctcaccagaccggtatcaagttcttcaagattagaagaactcaaaaatctgatgaagaatcgatttga

SEQ ID NO: 148598 - protein, 290 aa, Kluyveromyces lactis NRRL Y-1140
MSAVGSILTKFVSLLFLMGSTMLLIFIVLSGSIEHSPVNEFYWLQADTSNITGAPALSRWTFWGLCGVSGNKNVNCSSLEPAYPLSPVDDFGTTEGFPSDFVNNRDTYYYLTRFSFCFFLIALVFIGVGLIFYVLSWCSYSFTKTVFVTIVIGTLLNMAASACQTAATVLAKNAFKDADVSVDIGVKLMAFSWTTVALNIMLFFITGASFIRKAYKAHKEFVELQNYKEQALSYEQQQQQLQFQQQQQQQDLEATGAGTAIDEPQPQESHQTGIKFFKIRRTQKSDEESI

SEQ ID NO: 148599 - DNA, 813 bp, Kluyveromyces lactis NRRL Y-1140
  CDS (1)..(813)
atgaagttcaaagggttcgtttcttcgttatcgttgcttttcttattgggttctggtttgttgacgttttttgttatattgtctggtgctaggactactggtgtattggacaaattctattggtttgaggctgacaccagtgggttacctggtgctccagatactacaagatggttcaattaccattggtgtgcttatgagaatggtgaaatcggaagttgttcaggcaaacaagcggacttaccattttcccctagagacaattttggaaacagtcctgatcttccagcatcatttagagataatcgtaatacctactattatttaagtcgtgttggttgggcaatgttgttgattggtttattcttcgtggtactcgcattgattcctgtgttgctatcctttttcaaggttggtgtcggtgcggtattgtctactgtttctatttggctggctttatttttcatcacattggcagcctgtttgtacacagcttgttacgtgaaaggtcgtaacactttccgtgatgccggtcgttcagcatcgatgaacaccaagatgttcgcatttttatggacctcagtgttcttattattattaagttcgttctggtcaataattttgagtgtcacaattggtgttcagaaagtcaaaggagcaaacacttatcaaccgtatgagggtactagctctcatgatgatagttacaacgtcgacaagcacacatatgaaagcggtgtcaatgacaacaaccgtcaaaatatcaaatggtggaaacttcgctacaagaagaaagacaccgttgctgtttaa

SEQ ID NO: 148600 - protein, 270 aa, Kluyveromyces lactis NRRL Y-1140
MKFKGFVSSLSLLFLLGSGLLTFFVILSGARTTGVLDKFYWFEADTSGLPGAPDTTRWFNYHWCAYENGEIGSCSGKQADLPFSPRDNFGNSPDLPASFRDNRNTYYYLSRVGWAMLLIGLFFVVLALIPVLLSFFKVGVGAVLSTVSIWLALFFITLAACLYTACYVKGRNTFRDAGRSASMNTKMFAFLWTSVFLLLLSSFWSIILSVTIGVQKVKGANTYQPYEGTSSHDDSYNVDKHTYESGVNDNNRQNIKWWKLRYKKKDTVAV

SEQ ID NO: 148601 - DNA, 813 bp, Candida albicans SC5314
  CDS (1)..(813): transl_table=12
atgaaggttgtgtttacatttttcaatcttttctttttggcagggaccgttcttttattgatattcacagtattatccggttcatctaaacatttcccattaaacaaattctattggctcgaagctgatacttcaggtattaaaaatgctccagctaacagaagtgcttggacattctggggggtttgtgataaagccgattattccaattgtttattaggaccagcttatccaatttctccagaagataattttggtaccaccgccgatattccaaaagatttcgttgataatgaaaacacttattattatttgagtagatttgcctttgccttttgtctcattgcccttgcattcagtggattggctttcattattgacattttaggtttctgttttgaaatcattgataaagttgttatctttttgataaccattggattattgtttttggctgggtttgcttccttacaaactgctgttgttgttttggccaagaatgctttcaagaatgatggcagatatgctcacattggtgccaaatcaatgggtattatgtgggctgcatttgcttgtttactcatttgttggttattgattttcgctggtactatttctaattcttataagaaacacattgccagagtcaaagctgaacaaggacaatattctcaaccaactcatggaccagctggtgatgaatcttcatttactagagctgccccaccaactaaagatgaagaaaacacaggcggtattagattcttcaaaatcaaaagaaaccaaaaagtttccgatgatgaatcagtataa

SEQ ID NO: 148602 - protein, 270 aa, Candida albicans SC5314
MKVVFTFFNLFFLAGTVLLLIFTVLSGSSKHFPLNKFYWLEADTSGIKNAPANRSAWTFWGVCDKADYSNCLLGPAYPISPEDNFGTTADIPKDFVDNENTYYYLSRFAFAFCLIALAFSGLAFIIDILGFCFEIIDKVVIFLITIGLLFLAGFASLQTAVVVLAKNAFKNDGRYAHIGAKSMGIMWAAFACLLICWLLIFAGTISNSYKKHIARVKAEQGQYSQPTHGPAGDESSFTRAAPPTKDEENTGGIRFFKIKRNQKVSDDESV

SEQ ID NO: 148603 - DNA, 930 bp, Saccharomyces cerevisiae (strain YJM789)
  CDS (1)..(930)
atgattttcaaaaggttcgttaatttgcttgtgtttttattcctactcggtgctggcttattgacgttttttcttattctgtcaggaggcagagaatctggaacgctgaaaaatttttattggttacaggctgatacaaacggctttaacagcgctccatcgaccacgagatggtacaattacaattggtgcggctacgaagacggccagctagctaattgctctagcagggcgcccgccaagcctttctctcccagagacaattttggtaactctgtcaatttaccatcgtcgttcagaaacaaccgggatacctactattatctatccagggttggatgggccatgctgctgatttccctatttttcatcgtactggcgctagtacccggctttctggctaccttccttcctttcaaggcagtgccagtcctgtactgtgtgttgtcctggttggcctttttcttcattatattggctgcatgcttgtacacaggttgctatgtgaaggccagaaagaccttccacaacagcgggaggtctgcaaggctgggacccaaaaactttgctttcatctggacttcggtcttcttgatgctcgtgaacgccatctggtccactatattcagtgctacccacaaggcccactctacctactcggaccacgacatgtacgcccaatatgaaagcccttctgttgacaccggtgctcaaatggagaaatccacttacaatagtggggcgacggacggcgcgggccctgtcacagccgcgcctgtggttggacagcctcaacctacaaccaccactactccggctggcaatggcaagttctttcaaaaactgaaaacaagaaagcaggtgccatcagctgagttagaaccagctggggatggtggtcttgccgggccagtgacggtacgcgactag

SEQ ID NO: 148604 - protein, 309 aa, Saccharomyces cerevisiae (strain YJM789)
MIFKRFVNLLVFLFLLGAGLLTFFLILSGGRESGTLKNFYWLQADTNGFNSAPSTTRWYNYNWCGYEDGQLANCSSRAPAKPFSPRDNFGNSVNLPSSFRNNRDTYYYLSRVGWAMLLISLFFIVLALVPGFLATFLPFKAVPVLYCVLSWLAFFFIILAACLYTGCYVKARKTFHNSGRSARLGPKNFAFIWTSVFLMLVNAIWSTIFSATHKAHSTYSDHDMYAQYESPSVDTGAQMEKSTYNSGATDGAGPVTAAPVVGQPQPTTTTTPAGNGKFFQKLKTRKQVPSAELEPAGDGGLAGPVTVRD

SEQ ID NO: 148605 - DNA, 906 bp, Saccharomyces cerevisiae (strain RM11-1a)
  CDS (1)..(906)
atgtcctacaaaaagtttgtgtactttattaaccttttctttctactaggggctacattgttgactttttttctgatactagcaggtggcaggaccacaggagtgttgaagaatttttattggtttcaggcatccacttcgggctttaactcggcgccctccgtaaccagatggtacaattataactggtgcggctgggaaagccgcggaatagcagtcaactgctcttctaagatggcagctcagccgttttcaccaagggacaactttggcagttcccccctcatgccctcaacttttttaaacaacagaaatgcctactattatctttcaagagtgggctgggcaatgcttctaatcgggcttttctttttgttaatcacgttagtttcggttattgccagtttaatcagatacaatagacgtaccgccgctctggcaactgcaatgagctggatcacgcttttcttcataaccctatccgcttgtctgtacacaggatgttacgctaaggcagtaaaggcgtttcaccatgagaatcgtgatgctagactaggtcccaagaattttgggcttatttggaccacagtatttttgttaattgtaaacgccatttgctgtactatcatggtggctactcataaaagaaacgagtacatctatgaccgcagtttcgcttctaccaagacagtggactcacaaactccaactccagttccaacaaatggaggaataccttcctcggtgcctgtaactgaggtccaacaatctcaatcccaccagaatcataggttctttaagaaattgagaacgaaaaagagaactgtgactagcgcaggcgatgaaccagaccgggttcaagaggaacgcgcctatactgaacagaatgttcctgttgtatcatag

SEQ ID NO: 148606 - protein, 301 aa, Saccharomyces cerevisiae (strain RM11-1a)
MSYKKFVYFINLFFLLGATLLTFFLILAGGRTTGVLKNFYWFQASTSGFNSAPSVTRWYNYNWCGWESRGIAVNCSSKMAAQPFSPRDNFGSSPLMPSTFLNNRNAYYYLSRVGWAMLLIGLFFLLITLVSVIASLIRYNRRTAALATAMSWITLFFITLSACLYTGCYAKAVKAFHHENRDARLGPKNFGLIWTTVFLLIVNAICCTIMVATHKRNEYIYDRSFASTKTVDSQTPTPVPTNGGIPSSVPVTEVQQSQSHQNHRFFKKLRTKKRTVTSAGDEPDRVQEERAYTEQNVPVVS

SEQ ID NO: 148607 - DNA, 27 bp, Artificial sequence
  primer
atgattttcaaaaggttcgttaatttg

SEQ ID NO: 148608 - DNA, 21 bp, Artificial sequence
  primer
ctagtcgcgtaccgtcactgg

SEQ ID NO: 148609 - protein, 372 aa, Artificial sequence
  consensus sequence
  Variant (2)..(2): Xaa in position 2 is any amino acid
  Variant (4)..(5): Xaa in position 4 to 5 is any amino acid
  Variant (8)..(9): Xaa in position 8 to 9 is any amino acid
  Variant (11)..(12): Xaa in position 11 to 12 is any amino acid
  Variant (14)..(14): Xaa in position 14 is any amino acid
  Variant (16)..(21): Xaa in position 16 to 21 is any amino acid
  Variant (23)..(24): Xaa in position 23 to 24 is any amino acid
  Variant (28)..(29): Xaa in position 28 to 29 is any amino acid
  Variant (31)..(31): Xaa in position 31 is any amino acid
  Variant (33)..(37): Xaa in position 33 to 37 is any amino acid
  Variant (40)..(42): Xaa in position 40 to 42 is any amino acid
  Variant (43)..(43): Xaa in position 43 is any or no amino acid
  Variant (46)..(50): Xaa in position 46 to 50 is any amino acid
  Variant (52)..(58): Xaa in position 52 to 58 is any amino acid
  Variant (59)..(61): Xaa in position 59 to 61 is any or no amino acid
  Variant (63)..(69): Xaa in position 63 to 69 is any amino acid
  Variant (71)..(71): Xaa in position 71 is any amino acid
  Variant (74)..(74): Xaa in position 74 is any amino acid
  Variant (79)..(81): Xaa in position 79 to 81 is any amino acid
  Variant (82)..(83): Xaa in position 82 to 83 is any or no amino acid
  Variant (85)..(86): Xaa in position 85 to 86 is any amino acid
  Variant (88)..(90): Xaa in position 88 to 90 is any amino acid
  Variant (92)..(93): Xaa in position 92 to 93 is any amino acid
  Variant (100)..(105): Xaa in position 100 to 105 is any amino acid
  Variant (108)..(108): Xaa in position 108 is any amino acid
  Variant (110)..(110): Xaa in position 110 is any amino acid
  Variant (112)..(141): Xaa in position 112 to 141 is any amino acid
  Variant (142)..(143): Xaa in position 142 to 143 is any or no amino acid
  Variant (145)..(152): Xaa in position 145 to 152 is any amino acid
  Variant (154)..(158): Xaa in position 154 to 158 is any amino acid
  Variant (160)..(162): Xaa in position 160 to 162 is any amino acid
  Variant (164)..(167): Xaa in position 164 to 167 is any amino acid
  Variant (169)..(169): Xaa in position 169 is any amino acid
  Variant (171)..(172): Xaa in position 171 to 172 is any amino acid
  Variant (174)..(174): Xaa in position 174 is any amino acid
  Variant (176)..(180): Xaa in position 176 to 180 is any amino acid
  Variant (182)..(183): Xaa in position 182 to 183 is any amino acid
  Variant (185)..(244): Xaa in position 185 to 244 is any amino acid
  Variant (245)..(371): Xaa in position 245 to 371 is any or no amino acid
LXGXXLLXXFXXLXGXXXXXXLXXFYWXXAXTXXXXXAPXXXXRWXXXXXCXXXXXXXXXXCXXXXXXXPXSPXDNFGXXXXXPXXFXXXRXXYYYLSRXXXXXXLIXLXFXXXXXXXXXXXXXXXXXXXXXXXXXXXXXXXXFXXXXXXXXTXXXXXAXXXFXXXXRXAXXGXKXXXXXWXXVXXXXXXXXXXXXXXXXXXXXXXXXXXXXXXXXXXXXXXXXXXXXXXXXXXXXXXXXXXXXXXXXXXXXXXXXXXXXXXXXXXXXXXXXXXXXXXXXXXXXXXXXXXXXXXXXXXXXXXXXXXXXXXXXXXXXXXXXXXXXXXXXXXXXXXXXXXXXXXXXXXXXXXXXXXXXXXXXXXXXXXXXXXXK

SEQ ID NO: 148610 - protein, 34 aa, Artificial sequence
  protein pattern
  Variant (2)..(2): Xaa in position 2 is any amino acid
  Variant (3)..(3): Xaa in position 3 is Asp, Asn, Ser or Thr
  Variant (5)..(7): Xaa in position 5 to 7 is any or no amino acid
  Variant (9)..(12): Xaa in position 9 to 12 is any amino acid
  Variant (15)..(15): Xaa in position 15 is Ser or Thr
  Variant (16)..(16): Xaa in position 16 is Lys or Arg
  Variant (17)..(17): Xaa in position 17 is Phe, Ile or Val
  Variant (18)..(18): Xaa in position 18 is Gly or Ser
  Variant (19)..(19): Xaa in position 19 is Phe, Trp or Tyr
  Variant (20)..(20): Xaa in position 20 is Ala, Cys, Ser or Val
  Variant (21)..(21): Xaa in position 21 is Phe or Met
  Variant (22)..(22): Xaa in position 22 is Phe or Leu
  Variant (23)..(23): Xaa in position 23 is Leu or Val
  Variant (24)..(24): Xaa in position 24 is Ile or Val
  Variant (25)..(25): Xaa in position 25 is Ala, Gly or Ser
  Variant (26)..(26): Xaa in position 26 is Ile or Leu
  Variant (27)..(27): Xaa in position 27 is Phe or Val
  Variant (29)..(29): Xaa in position 29 is any amino acid
  Variant (30)..(30): Xaa in position 30 is Gly, Leu or Val
  Variant (31)..(31): Xaa in position 31 is any amino acid
  Variant (32)..(32): Xaa in position 32 is Ala, Gly or Thr
  Variant (33)..(33): Xaa in position 33 is Ile or Leu
  Variant (34)..(34): Xaa in position 34 is Ile, Leu or Val
PXXFXXXRXXXXYLXXXXXXXXXXXXXFXXXXXX

SEQ ID NO: 148611 - protein, 42 aa, Artificial sequence
  protein pattern
  Variant (2)..(6): Xaa in position 2 to 6 is any amino acid
  Variant (7)..(8): Xaa in position 7 to 8 is any or no amino acid
  Variant (11)..(11): Xaa in position 11 is any amino acid
  Variant (13)..(14): Xaa in position 13 to 14 is any amino acid
  Variant (15)..(15): Xaa in position 15 is any or no amino acid
  Variant (17)..(17): Xaa in position 17 is Ala or Ser
  Variant (19)..(19): Xaa in position 19 is Ala, Gly or Ser
  Variant (20)..(23): Xaa in position 20 to 23 is any amino acid
  Variant (24)..(24): Xaa in position 24 is Pro, Thr or Val
  Variant (25)..(25): Xaa in position 25 is Leu or Val
  Variant (26)..(27): Xaa in position 26 to 27 is any amino acid
  Variant (31)..(31): Xaa in position 31 is Phe or Leu
  Variant (32)..(32): Xaa in position 32 is Glu or Gln
  Variant (34)..(34): Xaa in position 34 is Asp, Asn or Ser
  Variant (36)..(36): Xaa in position 36 is any amino acid
  Variant (37)..(37): Xaa in position 37 is Gly or Asn
  Variant (38)..(38): Xaa in position 38 is Phe, Ile or Leu
  Variant (39)..(39): Xaa in position 39 is any amino acid
  Variant (40)..(40): Xaa in position 40 is Asp, Gly, Asn, Gln or Ser
FXXXXXXXLLXFXXXLXGXXXXXXXXXFYWXXAXTXXXXXAP

SEQ ID NO: 148612 - protein, 36 aa, Artificial sequence
  protein pattern
  Variant (2)..(2): Xaa in position 2 is Ala or Gly
  Variant (3)..(3): Xaa in position 3 is Ala, Cys or Val
  Variant (4)..(4): Xaa in position 4 is any amino acid
  Variant (5)..(5): Xaa in position 5 is Ala or Val
  Variant (6)..(6): Xaa in position 6 is any amino acid
  Variant (7)..(7): Xaa in position 7 is Ala or Gly
  Variant (8)..(9): Xaa in position 8 to 9 is any amino acid
  Variant (10)..(10): Xaa in position 10 is Ala, Thr or Val
  Variant (12)..(12): Xaa in position 12 is His, Lys or Arg
  Variant (13)..(14): Xaa in position 13 to 14 is any amino acid
  Variant (15)..(15): Xaa in position 15 is Asp, Gly or Asn
  Variant (16)..(17): Xaa in position 16 to 17 is any amino acid
  Variant (18)..(18): Xaa in position 18 is Ala or Val
  Variant (19)..(19): Xaa in position 19 is any amino acid
  Variant (20)..(20): Xaa in position 20 is Ile, Leu or Met
  Variant (21)..(21): Xaa in position 21 is Gly or Asn
  Variant (22)..(22): Xaa in position 22 is Ala, Pro, Thr or Val
  Variant (23)..(23): Xaa in position 23 is Glu, Lys or Arg
  Variant (24)..(24): Xaa in position 24 is any amino acid
  Variant (25)..(25): Xaa in position 25 is Phe or Met
  Variant (26)..(26): Xaa in position 26 is Ala or Gly
  Variant (27)..(27): Xaa in position 27 is Phe, Ile or Leu
  Variant (28)..(28): Xaa in position 28 is any amino acid
  Variant (30)..(30): Xaa in position 30 is Ala or Thr
  Variant (31)..(31): Xaa in position 31 is Ala, Ser or Thr
  Variant (33)..(33): Xaa in position 33 is any amino acid
  Variant (34)..(35): Xaa in position 34 to 35 is any or no amino acid
TXXXXXXXXXFXXXXXXXXXXXXXXXXXWXXVXXXL

SEQ ID NO: 148613 - protein, 18 aa, Artificial sequence
  protein pattern
  Variant (2)..(5): Xaa in position 2 to 5 is any amino acid
  Variant (6)..(6): Xaa in position 6 is any or no amino acid
  Variant (8)..(8): Xaa in position 8 is any amino acid
  Variant (9)..(9): Xaa in position 9 is any or no amino acid
  Variant (11)..(11): Xaa in position 11 is Phe, Ile or Leu
  Variant (14)..(14): Xaa in position 14 is any amino acid
  Variant (18)..(18): Xaa in position 18 is Gly or Ser
CXXXXXAXXPXSPXDNFX

SEQ ID NO: 148614 - DNA, 2115 bp, Saccharomyces cerevisiae
  CDS (1)..(2115)
atgtacaacattccagataatgtcaaaggggctgtagaatttgatccatggttgaaaccgtttgccgatgtactttctgaaagaagatacctagctgacaagtggttgtacgacataactcatgctacgcctgatggttcgtatcagtcactcagtaagtttgctagagattcatacaagtcatatgggttgcatgccaatccggaaaccaaagaaatcacttacaaagagtgggcacccaatgcggaacgtgcatttctagtgggagatttcaataactgggataccacatctcatgagctcaagaacaaggacgaatttggaaattttacaatcacacttcatcctttacctaacggcgatttcgccatccctcatgattcgaagattaaagtcatgtttattttgccagatggttccaagatctttcgtttacctgcgtggatcacaagggctacacagccttctaaggaaacttctaaacagttcgggcccgcatatgaaggtaggttttggaatccagagaacccctacaaatttgtacatccaaggccaaagtttagtgaatctgtagattccttaaggatttatgaagcccacgtcggtatttcgagtccagaaccaaagataaccacatataaagaatttactgagaaggtcttacccagaatcaaatatcttggctacgatgcaattcaattaatggctattatggaacatgcttattatgcatcatttggctaccaagtgaccaatttttttgcggcgagctcccgtttcggcacccctgaggaattaaaggagctgattgatactgcacattctatgggcatcctagttttattggatgtagttcatagccatgcttctaaaaacgtcgaggatgggttgaacatgtttgacggttctgatcatcagtatttccattctataagctccggtaggggtgagcatccgctgtgggattcccgtctttttaattacggaaaatttgaagtgcagcgattcttattagcaaacctggcattttatgttgacgtttatcagtttgatgggtttagattcgatggtgtcacatcaatgttatacgttcatcatggtgttggtgccggtgggtcttttagcggtgactataacgaatatctttctcgtgacaggtccttcgtcgatcatgaagccttagcttatttaatgttagccaatgatttggttcacgaaatgttgccaaatctggctgtaactgttgcagaagatgtctctggttatccaactttatgtttaccccgctccataggtggtactggtttcgactacagattagcaatggctttgcctgatatgtggatcaaactaatcaaggagaagaaagatgatgaatgggagatgggaagtattgtatacactttaactaatagacgatatggtgaaaaagtggttgcttattgtgagtcgcacgaccaagctttagttggtgataagacattagcgttttggttgatggatgccgctatgtacaccgatatgactgtattgaaggaaccatccatcgttattgaccgtggtattgctctacacaagatgattaggctgatcactcactcgctgggaggcgaggcttatttgaacttcgaaggtaatgagttcggtcatccagaatggttggatttccctaatgttaacaatggcgatagctacaagtatgctcgtaggcagtttaatttggctgatgatcccttactgcgttaccagaatttaaatgagtttgatagatcaatgcaattatgtgagaaaaggcataagtggctgaacacgaaacaggcttatgtttcattaaaacatgaaggtgacaaaatgattgtgtttgaaagaaataatctgttgtttattttcaacttccatcctacaaacagctacagcgattatagagttggtgtcgaaaaagctggtacttatcacatcgtgttgaactcagatcgtgctgaatttggtggacataacagaatcaacgaaagttccgaattctttaccaccgatttggaatggaacaacaggaagaacttcctccaagtttatattcctagtagagtcgctttggtgcttgccttaaaagaatga

SEQ ID NO: 148615 - protein, 704 aa, Saccharomyces cerevisiae
MYNIPDNVKGAVEFDPWLKPFADVLSERRYLADKWLYDITHATPDGSYQSLSKFARDSYKSYGLHANPETKEITYKEWAPNAERAFLVGDFNNWDTTSHELKNKDEFGNFTITLHPLPNGDFAIPHDSKIKVMFILPDGSKIFRLPAWITRATQPSKETSKQFGPAYEGRFWNPENPYKFVHPRPKFSESVDSLRIYEAHVGISSPEPKITTYKEFTEKVLPRIKYLGYDAIQLMAIMEHAYYASFGYQVTNFFAASSRFGTPEELKELIDTAHSMGILVLLDVVHSHASKNVEDGLNMFDGSDHQYFHSISSGRGEHPLWDSRLFNYGKFEVQRFLLANLAFYVDVYQFDGFRFDGVTSMLYVHHGVGAGGSFSGDYNEYLSRDRSFVDHEALAYLMLANDLVHEMLPNLAVTVAEDVSGYPTLCLPRSIGGTGFDYRLAMALPDMWIKLIKEKKDDEWEMGSIVYTLTNRRYGEKVVAYCESHDQALVGDKTLAFWLMDAAMYTDMTVLKEPSIVIDRGIALHKMIRLITHSLGGEAYLNFEGNEFGHPEWLDFPNVNNGDSYKYARRQFNLADDPLLRYQNLNEFDRSMQLCEKRHKWLNTKQAYVSLKHEGDKMIVFERNNLLFIFNFHPTNSYSDYRVGVEKAGTYHIVLNSDRAEFGGHNRINESSEFFTTDLEWNNRKNFLQVYIPSRVALVLALKE

SEQ ID NO: 148616 - DNA, 3553 bp, Oryza sativa
  CDS (1404)..(3494)
tcgttcgtctgacttgggtataggggcgaaagactaatcgaaccatctagtagctggttccctccgaagtttccctcaggatagctggagcccattacgagttctatcgggtaaagccaatgattagaggcatcgggggcgcaacgccctcgacctattctcaaactttaaataggtaggacggcgcggctgctccggtgagccgcgccacggaatcgggagctccaagtgggccatttttggtaagcagaactggcgatgcgggatgaaccggaagcctggttacggtgccgaactgcgcgctaacctagaacccacaaagggtgttggtcgattaagacagcaggacggtggtcatggaagtcgaaatccgctaaggagtgtgtaacaactcacctgccgaatcaactagccccgaaaatggatggcgctgaagcgcgcgacccacaccaggccatctgggcgagcgccatgccccgatgagtaggagggcgcggcggccgccgcaaaacccggggcgcgagcccgggcggagcggccgtcggtgcagatcttggtggtagtagcaaatattcaaatgagaactttgaaggccgaagaggagaaaggttccatgtgaacggcacttgcacatgggtaagccgatcctaagggacggggtaaccccggcagagagcgcgaccacgcgcgtgccccgaaagggaatcgggttaagatttcccgagccgggacgtggcggttgacggcgacgttaggaagtccggagacgccggcgggggcctcgggaagagttatcttttctgcttaacggcccgccaaccctggaaacggttcagccggaggtagggtccagcggccggaagagcaccgcacgtcgcgcggtgtccggtgcgcccccggcggcccttgaaaatccggaggaccgagtaccgtccacgcccggtcgtactcataaccgcatcaggtctccaaggtgaacagcctctggccaatggaacaatgtaggcaagggaagtcggcaaaacggatccgtaacttcgggaaaaggattggctctgagggctgggctcgggggtcccggccccgaacccgtcggctgccggcggactgctcgagctgctcgcgcggcgagagcgggccgccgcgtgccggccgggggacggaccgggaacggccccctcgggggccttccccgggcgtcgaacagccgactcagaactggtacggacaaggggaatccgactgtttaattaaaacaaagcattgcgatggtcctcgcagatgctgacgcaatgtgatttctgcccagtgctctgaatgtcaaagtgaagaaattcaaccaagcgcgggtaaacggcgggagtaaccacaaccagaacctgtcaggtctcacgattcacagcatgtcggccgcttcatcctcgtccgtcgcggcgccgcccgactacaccaaggctactgatggcaccggcgtcatcggcggtgatccgtggctcgagccctttgcgcccgcgctgcgagagcgatacgcgctctaccaagactggaagaacaagatcagtgtctccgaaggcggcctcgaggccttctcgggctcctaccgcaacatggggttccaggtggatcccaagacacaagccgtcacctacaccgaatgggcgcccaacgccgtcgaggcggcgctcatcagcgacttcaacaactggtcgcgcgattcgcacaagatgaccaaggacgactacggcaagtggcacatcaccatccctccgctcgccaacgccacctgcgccatcccgcacgactccaagctcaagatctccatgctgctgccctcgggcgagcgcatcgagcgtctgcccgcatggattctccgcgtcacgcaggatttgaacgtttcgcccgtgtacgacgcgcgcttctggaacccgcccaaggaagagcgctataccatcaagaaccccaagccgccgaagcccgacaacatcaaggtgtacgaagcacacgtcggcatcgccacccccgaggcgcgcgtcggccagttcaaggaattcacaaagaacgtcctgccgcgcatcaaggagctcggctacaacaccatccagctcatggccatccaggagcacgcctactacgcctcgtttggctaccaggtcaccaacttcttcgccgccagcagcaggtacggcaaccccgaggacctcaaggagctcatcgacgttgcgcattccatgggcatcaccgtactcctcgacatcgtccactcgcacgcgtgcaagaacgtgctcgacggcctcaacatgtttgatggcaccgatcacctctacttccacgagggtgccaagggcaggcacgagctctgggactcgcgcctcttcaactacggccaccacgaggtgctgcgcttcctgcttagcaactgcctcttctggatggaggagtacggattcgatggattccgcttcgacggcgtcacctccatgctctacacgcaccacggcatcggcaccggattcagcggcggctaccacgagtactttggcccttccgtcgacgtcgaggccgtcgtctacctcatgctcgccaacgacatgattcacaagtacaacccaaacgccatcaccatcgccgaggacgtctcgggcatgcctgcgctgtgccgacccgtctcggagggcggtgttggcttcgactaccgcctctcgatggccgtaccggacatgtggatcaagctactcaaggaaaagtcggacgaggactgggactttggcaacatctgcttcacgctcaccaaccgtcgtcatctggaaaagtcgatcgcctatgccgagtcgcacgaccaggcgctcgtcggtgacaggacgcttgccttctggctcatggacaaggagatgtacaccaacatgtcggacctcaccgagcgcaccgccatcatcgaccgcggcctggcgtaccacaagatgatccgtctcatcacacatgcgcttggcggcgagggctacctcaactttatcggcaacgagtttggtcatcccgagtggctcgacttcccgcgcgagggcaacggcaactcgttccactatgcgcgtcgccagttcaacctcgtcgacgaccacctgctgaggtaccagtatctgtacgcattcgacgccgccatgaacaatgccgagggcaagtacaagtggctcgcgagctcgcaggcgtatatctcgctcaagcacgagtcggaccgcgtcgtggcattcgagcgtgccggcctgctgttcgtgttcaactggcacgccaacaactcctacaccgactacaggatcggcgtggatgtaccaggaaagtacaaggtgctgctcgacaccgatgcaaaggagctcggtggccatgcaaggatcgaccacaacacagagtggttcactaccgacatggagtggaacggtcgccgaaactttgtgcagctctaccttcccagccgatccgccatcgtgctctaccgcgccgattagatggtgcttctgtcgtgacatatgtatatagcaagacacaatccacagtcgtttcgtcc

SEQ ID NO: 148617 - protein, 696 aa, Oryza sativa
MSAASSSSVAAPPDYTKATDGTGVIGGDPWLEPFAPALRERYALYQDWKNKISVSEGGLEAFSGSYRNMGFQVDPKTQAVTYTEWAPNAVEAALISDFNNWSRDSHKMTKDDYGKWHITIPPLANATCAIPHDSKLKISMLLPSGERIERLPAWILRVTQDLNVSPVYDARFWNPPKEERYTIKNPKPPKPDNIKVYEAHVGIATPEARVGQFKEFTKNVLPRIKELGYNTIQLMAIQEHAYYASFGYQVTNFFAASSRYGNPEDLKELIDVAHSMGITVLLDIVHSHACKNVLDGLNMFDGTDHLYFHEGAKGRHELWDSRLFNYGHHEVLRFLLSNCLFWMEEYGFDGFRFDGVTSMLYTHHGIGTGFSGGYHEYFGPSVDVEAVVYLMLANDMIHKYNPNAITIAEDVSGMPALCRPVSEGGVGFDYRLSMAVPDMWIKLLKEKSDEDWDFGNICFTLTNRRHLEKSIAYAESHDQALVGDRTLAFWLMDKEMYTNMSDLTERTAIIDRGLAYHKMIRLITHALGGEGYLNFIGNEFGHPEWLDFPREGNGNSFHYARRQFNLVDDHLLRYQYLYAFDAAMNNAEGKYKWLASSQAYISLKHESDRVVAFERAGLLFVFNWHANNSYTDYRIGVDVPGKYKVLLDTDAKELGGHARIDHNTEWFTTDMEWNGRRNFVQLYLPSRSAIVLYRAD

SEQ ID NO: 148618 - DNA, 2578 bp, Solanum tuberosum
  CDS (24)..(2567)
tcattaaagaggagaaattaactatgagaggatctcaccatcaccatcaccatgggatcttggctgaaaagtcttcttacaattccgaattccgaccttctacagttgcagcatcggggaaagtccttgtgcctggaacccagagtgatagctcctcatcctcaacaaaccaatttgagttcactgagacatctccagaaaattccccagcatcaactgatgtagatagttcaacaatggaacacgctagccagattaaaactgagaacgatgacgttgagccgtcaagtgatcttacaggaagtgttgaagagctggattttgcttcatcactacaactacaagaaggtggtaaactggaggagtctaaaacattaaatacttctgaagagacaattattgatgaatctgataggatcagagagaggggcatccctccacctggacttggtcagaagatttatgaaatagacccccttttgacaaactatcgtcaacaccttgattacaggtattcacagtacaagaaactgagggaggcaattgacaagtatgagggtggtttggaagctttttctcgtggttatgaaaaaatgggtttcactcgtagtgctacaggtatcacttaccgtgagtgggctcctggtgcccagtcagctgccctcattggagatttcaacaattgggacgcaaatgctgacattatgactcggaatgaatttggtgtctgggagatttttctgccaaataatgtggatggttctcctgcaattcctcatgggtccagagtgaagatacgtatggacactccatcaggtgttaaggattccattcctgcttggatcaactactcttcacagcttcctgatgaaattccatataatggaatatattatgatccacccgaagaggagaggtatatcttccaacacccacggccaaagaaaccaaagtcgctgagaatatatgaatctcatattggaatgagtagtccggagcctaaaattaactcatacgtgaattttagagatgaagttcttcctcgcataaaaaagcttgggtacaatgcggtgcaaattatggctattcaagagcattcttattatgctagttttggttatcatgtcacaaatttttttgcaccaagcagccgttttggaacgcccgacgaccttaagtctttgattgataaagctcatgagctaggaattgttgttctcatggacattgttcacagccatgcatcaaataatactttagatggactgaacatgtttgacggcaccgatagttgttactttcactctggagctcgtggttatcattggatgtgggattcccgcctttttaactatggaaactgggaggtacttaggtatcttctctcaaatgcgagatggtggttggatgagttcaaatttgatggatttagatttgatggtgtgacatcaatgatgtatactcaccacggattatcggtgggattcactgggaactacgaggaatactttggactcgcaactgatgtggatgctgttgtgtatctgatgctggtcaacgatcttattcatgggcttttcccagatgcaattaccattggtgaagatgttagcggaatgccgacattttgtattcccgttcaagatgggggtgttggctttgactatcggctgcatatggcaattgctgataaatggattgagttgctcaagaaacgggatgaggattggagagtgggtgatattgttcatacactgacaaatagaagatggtcggaaaagtgtgtttcatacgctgaaagtcatgatcaagctctagtcggtgataaaactatagcattctggctgatggacaaggatatgtatgattttatggctctggatagaccgccaacatcattaatagatcgtgggatagcattgcacaagatgattaggcttgtaactatgggattaggaggagaagggtacctaaatttcatgggaaatgaattcggccaccctgagtggattgatttccctagggctgaacaacacctctctgatgactcagtaattcccggaaaccaattcagttatgataaatgcagacggagatttgacctgggagatgcagaatatttaagataccgtgggttgcaagaatttgaccgggctatgcagtatcttgaagataaatatgagtttatgacttcagaacaccagttcatatcacgaaaggatgaaggagataggatgattgtatttgaaaaaggaaacctagtttttgtctttaattttcactggacaaaaagctattcagactatcgcataggctgcctgaagcctggaaaatacaaggttgccttggactcagatgatccactttttggtggcttcgggagaattgatcataatgccgaatatttcacctttgaaggatggtatgatgatcgtcctcgttcaattatggtgtatgcaccttgtagaacagcagtggtctatgcactagtagacaaagaagaagaagaagaagaagaagaagaagaagtagcagtagtagaagaagtagtagtagaagaagaatgaacgaacttgtg

SEQ ID NO: 148619 - protein, 847 aa, Solanum tuberosum
MRGSHHHHHHGILAEKSSYNSEFRPSTVAASGKVLVPGTQSDSSSSSTNQFEFTETSPENSPASTDVDSSTMEHASQIKTENDDVEPSSDLTGSVEELDFASSLQLQEGGKLEESKTLNTSEETIIDESDRIRERGIPPPGLGQKIYEIDPLLTNYRQHLDYRYSQYKKLREAIDKYEGGLEAFSRGYEKMGFTRSATGITYREWAPGAQSAALIGDFNNWDANADIMTRNEFGVWEIFLPNNVDGSPAIPHGSRVKIRMDTPSGVKDSIPAWINYSSQLPDEIPYNGIYYDPPEEERYIFQHPRPKKPKSLRIYESHIGMSSPEPKINSYVNFRDEVLPRIKKLGYNAVQIMAIQEHSYYASFGYHVTNFFAPSSRFGTPDDLKSLIDKAHELGIVVLMDIVHSHASNNTLDGLNMFDGTDSCYFHSGARGYHWMWDSRLFNYGNWEVLRYLLSNARWWLDEFKFDGFRFDGVTSMMYTHHGLSVGFTGNYEEYFGLATDVDAVVYLMLVNDLIHGLFPDAITIGEDVSGMPTFCIPVQDGGVGFDYRLHMAIADKWIELLKKRDEDWRVGDIVHTLTNRRWSEKCVSYAESHDQALVGDKTIAFWLMDKDMYDFMALDRPPTSLIDRGIALHKMIRLVTMGLGGEGYLNFMGNEFGHPEWIDFPRAEQHLSDDSVIPGNQFSYDKCRRRFDLGDAEYLRYRGLQEFDRAMQYLEDKYEFMTSEHQFISRKDEGDRMIVFEKGNLVFVFNFHWTKSYSDYRIGCLKPGKYKVALDSDDPLFGGFGRIDHNAEYFTFEGWYDDRPRSIMVYAPCRTAVVYALVDKEEEEEEEEEEVAVVEEVVVEEE

SEQ ID NO: 148620 - DNA, 3074 bp, Solanum tuberosum
  CDS (189)..(2825)
  misc_feature (92)..(92): n is a, g, c or t
  misc_feature (285)..(285): n is a, g, c or t
  misc_feature (1406)..(1406): n is a, g, c or t
  misc_feature (1430)..(1430): n is a, g, c or t
  misc_feature (1897)..(1897): n is a, g, c or t
  misc_feature (2156)..(2156): n is a, g, c or t
aaacctcctccactcagtctttgtttctctctctcttcacgcttctcttggcgccttgaactcagcaatttgacactcagttagttacactnccatcacttatcagatctctattttttctcttaattccaaccaaggaatgaataaaaagatagatttgtaaaaaccctaaggagagaagaagaaagatggtgtatacactctctggagttcgttttcctactgttccatcagtgtacaaatctaatggattcagcagtaatggtgatcggaggaatgctaatntttctgtattcttgaaaaagcactctctttcacggaagatcttggctgaaaagtcttcttacaattccgaatcccgaccttctacagttgcagcatcggggaaagtccttgtgcctggaacccagagtgatagctcctcatcctcaacagaccaatttgagttcactgagacatctccagaaaattccccagcatcaactgatgtagatagttcaacaatggaacacgctagccagattaaaactgagaacgatgacgttgagccgtcaagtgatcttacaggaagtgttgaagagctggattttgcttcatcactacaactacaagaaggtggtaaactggaggagtctaaaacattaaatacttctgaagagacaattattgatgaatctgataggatcagagagaggggcatccctccacctggacttggtcagaagatttatgaaatagacccccttttgacaaactatcgtcaacaccttgattacaggtattcacagtacaagaaactgagggaggcaattgacaagtatgagggtggtttggaagctttttctcgtggttatgaaaaaatgggtttcactcgtagtgctacaggtatcacttaccgtgagtgggctcctggtgcccagtcagctgccctcattggagatttcaacaattgggacgcaaatgctgacattatgactcggaatgaatttggtgtctgggagatttttctgccaaataatgtggatggttctcctgcaattcctcatgggtccagagtgaagatacgtatggacactccatcaggtgttaaggattccattcctgcttggatcaactactctttacagcttcctgatgaaattccatataatggaatatattatgatccacccgaagaggagaggtatatcttccaacacccacggccaaagaaaccaaagtcgctgagaatatatgaatctcatattggaatgagtagtccggagcctaaaattaactcatacgtgaattttagagatgaagttcttcctcgcataaaaaagcttgggtacaatgcggtgcaaattatggctattcaagagcattcttattatgctagttttggttatcatgtcacaaattttttngcaccaagcagccgttttggaacncccgacgaccttaagtctttgattgataaagctcatgagctaggaattgttgttctcatggacattgttcacagccatgcatcaaataatactttagatggactgaacatgtttgacggcacagatagttgttactttcactctggagctcgtggttatcattggatgtgggattcccgcctctttaactatggaaactgggaggtacttaggtatcttctctcaaatgcgagatggtggttggatgagttcaaatttgatggatttagatttgatggtgtgacatcaatgatgtatactcaccacggattatcggtgggattcactgggaactacgaggaatactttggactcgcaactgatgtggatgctgttgtgtatctgatgctggtcaacgatcttattcatgggcttttcccagatgcaattaccattggtgaagatgttagcggaatgccgacattttntattcccgttcaagatgggggtgttggctttgactatcggctgcatatggcaattgctgataaatggattgagttgctcaagaaacgggatgaggattggagagtgggtgatattgttcatacactgacaaatagaagatggtcggaaaagtgtgtttcatacgctgaaagtcatgatcaagctctagtcggtgataaaactatagcattctggctgatggacaaggatatgtatgattttatggctctggatagaccntcaacatcattaatagatcgtgggatagcattgcacaagatgattaggcttgtaactatgggattaggaggagaagggtacctaaatttcatgggaaatgaattcggccaccctgagtggattgatttccctagggctgaacaacacctctctgatggctcagtaattcccggaaaccaattcagttatgataaatgcagacggagatttgacctgggagatgcagaatatttaagataccgtgggttgcaagaatttgaccgggctatgcagtatcttgaagataaatatgagtttatgacttcagaacaccagttcatatcacgaaaggatgaaggagataggatgattgtatttgaaaaaggaaacctagtttttgtctttaattttcactggacaaaaagctattcagactatcgcataggctgcctgaagcctggaaaatacaaggttgccttggactcagatgatccactttttggtggcttcgggagaattgatcataatgccgaatatttcacctttgaaggatggtatgatgatcgtcctcgttcaattatggtgtatgcacctagtagaacagcagtggtctatgcactagtagacaaagaagaagaagaagaagaagaagtagcagtagtagaagaagtagtagtagaagaagaatgaacgaacttgtgatcgcgttgaaagatttgaaggctacatagagcttcttgacgtatctggcaatattgcatcagtcttggcggaatttcatgtgacaaaaggtttgcaattctttccactattagtagtgcaacgatatacgcagagatgaagtgctgcacaaacatatgtaaaatcgatgaatttatgtcgaatgctgggacgggcttcagcaggttttgcttagtgagttctgtaaattgtcatctc

SEQ ID NO: 148621 - protein, 878 aa, Solanum tuberosum
  misc_feature (33)..(33): The Xaa at location 33 stands for Ile, Leu, Phe, or Val.
  misc_feature (406)..(406): The Xaa at location 406 stands for Leu, or Phe.
  misc_feature (570)..(570): The Xaa at location 570 stands for Cys, Phe, Ser, or Tyr.
MVYTLSGVRFPTVPSVYKSNGFSSNGDRRNANXSVFLKKHSLSRKILAEKSSYNSESRPSTVAASGKVLVPGTQSDSSSSSTDQFEFTETSPENSPASTDVDSSTMEHASQIKTENDDVEPSSDLTGSVEELDFASSLQLQEGGKLEESKTLNTSEETIIDESDRIRERGIPPPGLGQKIYEIDPLLTNYRQHLDYRYSQYKKLREAIDKYEGGLEAFSRGYEKMGFTRSATGITYREWAPGAQSAALIGDFNNWDANADIMTRNEFGVWEIFLPNNVDGSPAIPHGSRVKIRMDTPSGVKDSIPAWINYSLQLPDEIPYNGIYYDPPEEERYIFQHPRPKKPKSLRIYESHIGMSSPEPKINSYVNFRDEVLPRIKKLGYNAVQIMAIQEHSYYASFGYHVTNFXAPSSRFGTPDDLKSLIDKAHELGIVVLMDIVHSHASNNTLDGLNMFDGTDSCYFHSGARGYHWMWDSRLFNYGNWEVLRYLLSNARWWLDEFKFDGFRFDGVTSMMYTHHGLSVGFTGNYEEYFGLATDVDAVVYLMLVNDLIHGLFPDAITIGEDVSGMPTFXIPVQDGGVGFDYRLHMAIADKWIELLKKRDEDWRVGDIVHTLTNRRWSEKCVSYAESHDQALVGDKTIAFWLMDKDMYDFMALDRPSTSLIDRGIALHKMIRLVTMGLGGEGYLNFMGNEFGHPEWIDFPRAEQHLSDGSVIPGNQFSYDKCRRRFDLGDAEYLRYRGLQEFDRAMQYLEDKYEFMTSEHQFISRKDEGDRMIVFEKGNLVFVFNFHWTKSYSDYRIGCLKPGKYKVALDSDDPLFGGFGRIDHNAEYFTFEGWYDDRPRSIMVYAPSRTAVVYALVDKEEEEEEEVAVVEEVVVEEE

SEQ ID NO: 148622 - DNA, 2665 bp, Zea mays
  CDS (79)..(2478)
acccggatttcgctcttgcggtcgctggggttttagcattggctgatcagttcgatccgatccggctgcgaaggcgagatggcgttccgggtttctggggcggtgctcggtggggccgtaagggctccccgactcaccggcggcggggagggtagtctagtcttccggcacaccggcctcttcttaactcggggtgctcgagttggatgttcggggacgcacggggccatgcgcgcggcggccgcggccaggaaggcggtcatggttcctgagggcgagaatgatggcctcgcatcaagggctgactcggctcaattccagtcggatgaactggaggtaccagacatttctgaagagacaacgtgcggtgctggtgtggctgatgctcaagccttgaacagagttcgagtggtccccccaccaagcgatggacaaaaaatattccagattgaccccatgttgcaaggctataagtaccatcttgagtatcggtacagcctctatagaagaatccgttcagacattgatgaacatgaaggaggcttggaagccttctcccgtagttatgagaagtttggatttaatgccagcgcggaaggtatcacatatcgagaatgggctcctggagcattttctgcagcattggtgggtgacttcaacaactgggatccaaatgcagatcgtatgagcaaaaatgagtttggtgtttgggaaatttttctgcctaacaatgcagatggtacatcacctattcctcatggatctcgtgtaaaggtgagaatggatactccatcagggataaaggattcaattccagcctggatcaagtactcagtgcaggccccaggagaaataccatatgatgggatttattatgatcctcctgaagaggtaaagtatgtgttcaggcatgcgcaacctaaacgaccaaaatcattgcggatatatgaaacacatgtcggaatgagtagcccggaaccgaagataaacacatatgtaaactttagggatgaagtcctcccaagaataaaaaaacttggatacaatgcagtgcaaataatggcaatccaagagcactcatattatggaagctttggataccatgtaactaatttttttgcgccaagtagtcgttttggtaccccagaagatttgaagtctttgattgatagagcacatgagcttggtttgctagttctcatggatgtggttcatagtcatgcgtcaagtaatactctggatgggttgaatggttttgatggtacagatacacattactttcacagtggtccacgtggccatcactggatgtgggattctcgcctatttaactatgggaactgggaagttttaagatttcttctctccaatgctagatggtggctcgaggaatataagtttgatggtttccgttttgatggtgtgacctccatgatgtacactcaccacggattacaagtaacatttacggggaacttcaatgagtattttggctttgccaccgatgtagatgcagtggtttacttgatgctggtaaatgatctaattcatggactttatcctgaggctgtaaccattggtgaagatgttagtggaatgcctacatttgcccttcctgttcacgatggtggggtaggttttgactatcggatgcatatggctgtggctgacaaatggattgaccttctcaagcaaagtgatgaaacttggaagatgggtgatattgtgcacacactgacaaataggaggtggttagagaagtgtgtaacttatgctgaaagtcatgatcaagcattagtcggcgacaagactattgcgttttggttgatggacaaggatatgtatgatttcatggccctcgatagaccttcaactcctaccattgatcgtgggatagcattacataagatgattagacttatcacaatgggtttaggaggagagggctatcttaatttcatgggaaatgagtttggacatcctgaatggatagattttccaagaggtccgcaaagacttccaagtggtaagtttattccagggaataacaacagttatgacaaatgtcgtcgaagatttgacctgggtgatgcagactatcttaggtatcatggtatgcaagagtttgatcaggcaatgcaacatcttgagcaaaaatatgaattcatgacatctgatcaccagtatatttcccggaaacatgaggaggataaggtgattgtgttcgaaaagggagatttggtatttgtgttcaacttccactgcaacaacagctattttgactaccgtattggttgtcgaaagcctggggtgtataaggtggtcttggactccgacgctggactatttggtggatttagcaggatccatcacgcagccgagcacttcaccgccgactgttcgcatgataataggccatattcatcctcggtttatacaccaagcagaacatgtgtcgtctatgctccagtggagtgatagcggggtactcgttgctgcgcggcatgtgtggggctgtcgatgtgaggaaaaaccttcttccaaaaccggcagatgcatgcatgcatgctacaataaggttctgatactttaatcgatgctggaaagcccatgcatctcgctgcgttgtcctctctatatatataagaccttcaaggtgtcaatt

SEQ ID NO: 148623 - protein, 799 aa, Zea mays
MAFRVSGAVLGGAVRAPRLTGGGEGSLVFRHTGLFLTRGARVGCSGTHGAMRAAAAARKAVMVPEGENDGLASRADSAQFQSDELEVPDISEETTCGAGVADAQALNRVRVVPPPSDGQKIFQIDPMLQGYKYHLEYRYSLYRRIRSDIDEHEGGLEAFSRSYEKFGFNASAEGITYREWAPGAFSAALVGDFNNWDPNADRMSKNEFGVWEIFLPNNADGTSPIPHGSRVKVRMDTPSGIKDSIPAWIKYSVQAPGEIPYDGIYYDPPEEVKYVFRHAQPKRPKSLRIYETHVGMSSPEPKINTYVNFRDEVLPRIKKLGYNAVQIMAIQEHSYYGSFGYHVTNFFAPSSRFGTPEDLKSLIDRAHELGLLVLMDVVHSHASSNTLDGLNGFDGTDTHYFHSGPRGHHWMWDSRLFNYGNWEVLRFLLSNARWWLEEYKFDGFRFDGVTSMMYTHHGLQVTFTGNFNEYFGFATDVDAVVYLMLVNDLIHGLYPEAVTIGEDVSGMPTFALPVHDGGVGFDYRMHMAVADKWIDLLKQSDETWKMGDIVHTLTNRRWLEKCVTYAESHDQALVGDKTIAFWLMDKDMYDFMALDRPSTPTIDRGIALHKMIRLITMGLGGEGYLNFMGNEFGHPEWIDFPRGPQRLPSGKFIPGNNNSYDKCRRRFDLGDADYLRYHGMQEFDQAMQHLEQKYEFMTSDHQYISRKHEEDKVIVFEKGDLVFVFNFHCNNSYFDYRIGCRKPGVYKVVLDSDAGLFGGFSRIHHAAEHFTADCSHDNRPYSSSVYTPSRTCVVYAPVE

SEQ ID NO: 148624 - DNA, 2649 bp, Solanum tuberosum
  CDS (1)..(2649)
atggtgtatacactctctggagttcgttttcctactgttccatcagtgtacaaatctaatggattcagcagtaatggtgatcggaggaatgctaatgtttctgtattcttgaaaaagcactctctttcacggaagatcttggctgaaaagtcttcttacaattccgaattccgaccttctacagttgcagcatcggggaaagtccttgtgcctggaacccagagtgatagctcctcatcctcaacagaccaatttgagttcactgagacatctccagaaaattccccagcatcaactgatgtagatagttcaacaatggaacacgctagccagattaaaactgagaacgatgacgttgagccgtcaagtgatcttacaggaagtgttgaagagctggattttgcttcatcactacaactacaagaaggtggtaaactggaggagtctaaaacattaaatacttctgaagagacaattattgatgaatctgataggatcagagagaggggcatccctccacctggacttggtcagaagatttatgaaatagacccccttttgacaaactatcgtcaacaccttgattacaggtattcacagtacaagaaactgagggaggcaattgacaagtatgagggtggtttggaagccttttctcgtggttatgaaaaaatgggtttcactcgtagtgctacaggtatcacttaccgtgagtgggctcttggtgcccagtcagctgccctcattggagatttcaacaattgggacgcaaatgctgacattatgactcggaatgaatttggtgtctgggagatttttctgccaaataatgtggatggttctcctgcaattcctcatgggtccagagtgaagatacgtatggacactccatcaggtgttaaggattccattcctgcttggatcaactactctttacagcttcctgatgaaattccatataatggaatacattatgatccacccgaagaggagaggtatatcttccaacacccacggccaaagaaaccaaagtcgctgagaatatatgaatctcatattggaatgagtagtccggagcctaaaattaactcatacgtgaattttagagatgaagttcttcctcgcataaaaaagcttgggtacaatgcgctgcaaattatggctattcaagagcattcttattacgctagttttggttatcatgtcacaaatttttttgcaccaagcagccgttttggaacgcccgacgaccttaagtctttgattgataaagctcatgagctaggaattgttgttctcatggacattgttcacagccatgcatcaaataatactttagatggactgaacatgtttgactgcaccgatagttgttactttcactctggagctcgtggttatcattggatgtgggattcccgcctctttaactatggaaactgggaggtacttaggtatcttctctcaaatgcgagatggtggttggatgcgttcaaatttgatggatttagatttgatggtgtgacatcaatgatgtatattcaccacggattatcggtgggattcactgggaactacgaggaatactttggactcgcaactgatgtggatgctgttgtgtatctgatgctggtcaacgatcttattcatgggcttttcccagatgcaattaccattggtgaagatgttagcggaatgccgacattttgtattcccgtccaagaggggggtgttggctttgactatcggctgcatatggcaattgctgataaacggattgagttgctcaagaaacgggatgaggattggagagtgggtgatattgttcatacactgacaaatagaagatggtcggaaaagtgtgtttcatacgctgaaagtcatgatcaagctctagtcggtgataaaactatagcattctggctgatggacaaggatatgtatgattttatggctctggatagaccgtcaacatcattaatagatcgtgggatagcattgcacaagatgattaggcttgtaactatgggattaggaggagaagggtacctaaatttcatgggaaatgaattcggccaccctgagtggattgatttccctagggctgaacaacacctctctgatggctcagtaatccccggaaaccaattccgttatgataaatgcagacggagatttgacctgggagatgcagaatatttaagataccgtgggttgcaagaatttgaccggcctatgcagtatcttgaagataaatatgagtttatgacttcagaacaccagttcatatcacgaaaggatgaaggagataggatgattgtatttgaaaaaggaaacctagtttttgtctttaattttcactggacaaaaagctattcagactatcgcatagcctgcctgaagcctggaaaatacccggttgccttggactcagatgatccactttttggtggcttcgggagaattgatcataatgccgaatatttcacctttgaaggatggtatgatgatcgtcctcgttcaattatggtgtatgcaccttgtaaaacagcagtggtctatgcactagtagacaaagaagaagaagaagaagaagaagaagaagaagaagtagcagcagtagaagaagtagtagtagaagaagaatga

SEQ ID NO: 148625 - protein, 882 aa, Solanum tuberosum
MVYTLSGVRFPTVPSVYKSNGFSSNGDRRNANVSVFLKKHSLSRKILAEKSSYNSEFRPSTVAASGKVLVPGTQSDSSSSSTDQFEFTETSPENSPASTDVDSSTMEHASQIKTENDDVEPSSDLTGSVEELDFASSLQLQEGGKLEESKTLNTSEETIIDESDRIRERGIPPPGLGQKIYEIDPLLTNYRQHLDYRYSQYKKLREAIDKYEGGLEAFSRGYEKMGFTRSATGITYREWALGAQSAALIGDFNNWDANADIMTRNEFGVWEIFLPNNVDGSPAIPHGSRVKIRMDTPSGVKDSIPAWINYSLQLPDEIPYNGIHYDPPEEERYIFQHPRPKKPKSLRIYESHIGMSSPEPKINSYVNFRDEVLPRIKKLGYNALQIMAIQEHSYYASFGYHVTNFFAPSSRFGTPDDLKSLIDKAHELGIVVLMDIVHSHASNNTLDGLNMFDCTDSCYFHSGARGYHWMWDSRLFNYGNWEVLRYLLSNARWWLDAFKFDGFRFDGVTSMMYIHHGLSVGFTGNYEEYFGLATDVDAVVYLMLVNDLIHGLFPDAITIGEDVSGMPTFCIPVQEGGVGFDYRLHMAIADKRIELLKKRDEDWRVGDIVHTLTNRRWSEKCVSYAESHDQALVGDKTIAFWLMDKDMYDFMALDRPSTSLIDRGIALHKMIRLVTMGLGGEGYLNFMGNEFGHPEWIDFPRAEQHLSDGSVIPGNQFRYDKCRRRFDLGDAEYLRYRGLQEFDRPMQYLEDKYEFMTSEHQFISRKDEGDRMIVFEKGNLVFVFNFHWTKSYSDYRIACLKPGKYPVALDSDDPLFGGFGRIDHNAEYFTFEGWYDDRPRSIMVYAPCKTAVVYALVDKEEEEEEEEEEEVAAVEEVVVEEE

SEQ ID NO: 148626 - DNA, 2004 bp, Clostridium difficile 630
  CDS (1)..(2004): transl_table=11
atgaaaagtgaaaaaagatttaaaattttagatattgatgtatacctacaaccatttgaatctgatataaaaaagcgaatgaaacattatgaggatatgaaatcaaaaacattgaaaaactataaagattttagttcttttgcaaatgctcatctttactatggatttcatcagacaaatgatggattcttctatagggaatgggctccaaatgcagatagtttgtcactaattggtgactttaataattggaatagaaaatctcatcctctaagaaaaattgggtctggtaattgggaaatatttattcctggtcaaaatagcttacctcacaaatcagagataaaggtacaagttactgcaaatggaaaaacatttgaccgtataccattatatataaaaagagtaattcaaaaagattttggtggatttaatggacaaatatggcaaccaaaaactccatttatctggactgacaataattttgacttaaaaaacataacttctccactaatctatgaatgtcatataggtatgtctactgaaagcgaatctattggaacttataatgaatttactgaaaaaatacttcctaagataaaaaaagctggatacaataccattcagcttatggctattatggaacatccatattatgcatcttttggataccaagtttcaaacttttatgcaatctcatctaggtttggtactcctgaagacttaaaaaacctcataaacactgctcattcaatggggattgctgttttattagacttagttcattctcatgctgtaaagaatactttagaaggaataaatgagtttgatggaagtgaacatcaatttttccactcaggttcaaagggaaatcatcctgcttggggtacaaaactttttaactatggtaaacctgaagtaatacattttttgctttcaaatataaaattttggttaaatgagtaccattttgatggctttaggtttgatggtgtaacttcaatgttatatcataaccatggtcttggagtttcatttgatagttatgaaaaatattttagtatgaatacagatattgaagctataacatatctccaatttgcaaatgaattaataaaagaaattaaacctaattcgataagtattgcagaagatatgagtggaatgcctggtatgtgtatccctataaaagacggcggaattggatttgactatagactcgcaatgggagtacctgatttttggataaaaactatctctaacttatctgatgaagactgggatttgggaaaaatgtggtatgaacttactactagacgacctggagaaaaaaatataggatattgtgaatcccatgaccaagcattagttggcgataaaacaattattttttggctagctgacaaggaaatgtactggaatatggaaataaactcaaataaccatgttatcaatagagcaatatctcttattaaattaattaaattaataactttttctctagcaggtgaaggatatctaaattttatgggaaatgaatttggacatcctgagtggattgattttccacgagaaggcaacaattggagctataagtatgccagaagacaatggagcctttcagaagataacaacttaaagtataaacaattattaaattttgataaatctatgctcgaacttacaaaatacagtgatatttttatccaaaatagtcatgaacttatacatatggataatgataaaaagattttggtgtacagtaagggcaaatatttatttatatttaatttccaccctaatctaatacaatcagttgatatttcaaagtttcaaaatacaaactacaaaacgatattaaatactgatatggtagagtttggaggaaacacaaaaaaagaaaacttaagagattatgatgtatactttagctcaactcctccttcttctaaaatgcctattgcctctcgtacagcaatagtgcttttagataatggtatttaa

SEQ ID NO: 148627 - protein, 667 aa, Clostridium difficile 630
MKSEKRFKILDIDVYLQPFESDIKKRMKHYEDMKSKTLKNYKDFSSFANAHLYYGFHQTNDGFFYREWAPNADSLSLIGDFNNWNRKSHPLRKIGSGNWEIFIPGQNSLPHKSEIKVQVTANGKTFDRIPLYIKRVIQKDFGGFNGQIWQPKTPFIWTDNNFDLKNITSPLIYECHIGMSTESESIGTYNEFTEKILPKIKKAGYNTIQLMAIMEHPYYASFGYQVSNFYAISSRFGTPEDLKNLINTAHSMGIAVLLDLVHSHAVKNTLEGINEFDGSEHQFFHSGSKGNHPAWGTKLFNYGKPEVIHFLLSNIKFWLNEYHFDGFRFDGVTSMLYHNHGLGVSFDSYEKYFSMNTDIEAITYLQFANELIKEIKPNSISIAEDMSGMPGMCIPIKDGGIGFDYRLAMGVPDFWIKTISNLSDEDWDLGKMWYELTTRRPGEKNIGYCESHDQALVGDKTIIFWLADKEMYWNMEINSNNHVINRAISLIKLIKLITFSLAGEGYLNFMGNEFGHPEWIDFPREGNNWSYKYARRQWSLSEDNNLKYKQLLNFDKSMLELTKYSDIFIQNSHELIHMDNDKKILVYSKGKYLFIFNFHPNLIQSVDISKFQNTNYKTILNTDMVEFGGNTKKENLRDYDVYFSSTPPSSKMPIASRTAIVLLDNGI

SEQ ID NO: 148628 - DNA, 2478 bp, Oryza sativa (japonica cultivar-group)
  CDS (1)..(2478)
atggcggcgccggcgtctgcggttcccgggagcgcggcggggctacgggcgggggccgtgcggttccccgtgccagccggggcccggagctggcgtgcggcggcggagctcccgacgtcgcggtcgctgctctccggccggagattccccggtgccgttcgcgtggggggttccggggggcgcgtggccgtgcgcgcggcgggcgcgtcaggggaggtgatgatccccgagggcgagagcgacgggatgccggtttcagcaggttcagacgatctgcagttgccagccttagatgatgaattaagcacggaggttggagctgaagttgagattgagtcatctggagcaagtgacgttgaaggcgtgaagagagtggttgaagaattagctgctgagcagaaaccacgagttgtcccaccaacaggagatgggcaaaaaatattccagatggactctatgcttaatggctataagtaccatcttgaatatcgatatagcctatataggagactgcgttcagacattgatcagtatgaaggaggactggaaacattttctcgcggttatgagaagtttggatttaatcacagtgctgaaggtgtcacttatcgagaatgggctcccggggcacattctgcagcattagtaggtgacttcaacaattggaatccaaatgcagaccgcatgagcaaaaatgagtttggtgtttgggagatttttctgcctaacaatgctgatggctcatctcctattccacatggctcacgtgtaaaggtgcgaatggaaactccatctggtataaaggattctattcctgcctggatcaagtactctgtgcaggccgcaggagaaatcccatacaatggaatatattatgatcctcctgaagaggagaagtacatattcaagcatcctcaacctaaaagaccaaagtcattgcggatatacgaaactcatgttggaatgagtagcacggagccaaagatcaacacgtatgcaaactttagggatgaggtgcttccaagaatcaaaaagcttggatacaatgcagtgcaaataatggcaattcaagagcatgcatattatggaagctttgggtaccatgtcaccaatttctttgcaccaagtagtcgtttcgggaccccagaagatttaaagtcattgattgataaagctcatgagcttggtttagttgtgctcatggatgttgttcacagccatgcgtcaaataataccctagatgggttgaacggttttgatggtacagatacgcattactttcatagtggttcacgcggccatcattggatgtgggattctcgccttttcaactatgggaattgggaagttctaagatttctactatccaatgcaagatggtggctcgaggagtataagtttgatggtttcagatttgacggtgtaacctcaatgatgtacactcatcatggattacaagtagcatttacggggaactacagtgaatactttggatttgccactgatgctgatgcagtagtttacttgatgctggtaaatgatttaattcatggactttatcctgaggccataaccatcggtgaagatgtcagtggaatgcctacatttgcccttcctgttcaagatggtggggttggttttgattatcgccttcatatggctgttcctgacaaatggattgaactcctcaagcaaagtgatgaatcttggaagatgggtgatattgtgcacacactgactaacagaaggtggtcagagaagtgtgttacttatgctgaaagtcatgatcaagcactagttggtgacaaaactattgcattctggttgatggacaaggatatgtatgattttatggctctggacagaccggcaacacctagcattgatcgtggaatagcattgcataaaatgattagacttatcacaatggggttaggaggagaaggctatcttaactttatgggaaatgagttcggacatcctgaatggattgattttccaagagctccacaagtacttccaaatggtaaattcatcccagggaataacaacagttatgataaatgccgtcgaagatttgacctgggtgatgcggactatcttaggtatcgtggcatgctagagtttgaccgcgcgatgcagtctctcgaggaaaaatatgggttcatgacatcagaccaccagtacatatctcgaaagcatgaagaggataagatgattatatttgagaagggagatctggtatttgtgttcaacttccattggagtaacagctattttgactaccgtgttggttgtttaaagccagggaaatataaggtggtcttggactcagatgctggactctttggtggatttggcaggatccatcacactgcagagcacttcactgccgattgttcacatgacaacaggccctactcgttctcagtttattctcctagcagaacctgcgttgtctatgctccagcggaatga

SEQ ID NO: 148629 - protein, 825 aa, Oryza sativa (japonica cultivar-group)
MAAPASAVPGSAAGLRAGAVRFPVPAGARSWRAAAELPTSRSLLSGRRFPGAVRVGGSGGRVAVRAAGASGEVMIPEGESDGMPVSAGSDDLQLPALDDELSTEVGAEVEIESSGASDVEGVKRVVEELAAEQKPRVVPPTGDGQKIFQMDSMLNGYKYHLEYRYSLYRRLRSDIDQYEGGLETFSRGYEKFGFNHSAEGVTYREWAPGAHSAALVGDFNNWNPNADRMSKNEFGVWEIFLPNNADGSSPIPHGSRVKVRMETPSGIKDSIPAWIKYSVQAAGEIPYNGIYYDPPEEEKYIFKHPQPKRPKSLRIYETHVGMSSTEPKINTYANFRDEVLPRIKKLGYNAVQIMAIQEHAYYGSFGYHVTNFFAPSSRFGTPEDLKSLIDKAHELGLVVLMDVVHSHASNNTLDGLNGFDGTDTHYFHSGSRGHHWMWDSRLFNYGNWEVLRFLLSNARWWLEEYKFDGFRFDGVTSMMYTHHGLQVAFTGNYSEYFGFATDADAVVYLMLVNDLIHGLYPEAITIGEDVSGMPTFALPVQDGGVGFDYRLHMAVPDKWIELLKQSDESWKMGDIVHTLTNRRWSEKCVTYAESHDQALVGDKTIAFWLMDKDMYDFMALDRPATPSIDRGIALHKMIRLITMGLGGEGYLNFMGNEFGHPEWIDFPRAPQVLPNGKFIPGNNNSYDKCRRRFDLGDADYLRYRGMLEFDRAMQSLEEKYGFMTSDHQYISRKHEEDKMIIFEKGDLVFVFNFHWSNSYFDYRVGCLKPGKYKVVLDSDAGLFGGFGRIHHTAEHFTADCSHDNRPYSFSVYSPSRTCVVYAPAE

SEQ ID NO: 148630 - DNA, 2577 bp, Arabidopsis thaliana
  CDS (1)..(2577)
atggtttacacgatttcaggcgtacgttttcctcatcttccatcgattaagaagaagaattcgtctcttcacagtttcaatgaagatctcaggagaagcaacgctgtctcattctctctgaggaaggactctcgttcttctgggaaggtttttgctcggaagccatcgtatgattctgattcgtcttccttagctaccactgcatctgagaagctccgtggccatcagagtgatagctcttcatctgcctctgatcaagtacaatctcgggatactgtctctgacgatactcaggtgctcggcaatgtagacgttcagaaaactgaagaagcccaggaaacagagacactagatcaaacttctgcactctcaacatctggaagcataagttataaagaagattttgcaaagatgtcacactctgtcgaccaagaagttgggcagaggaagattccacctcctggagatgggaagagaatatatgacattgatcctatgttgaacagtcatcgtaatcatcttgattaccgatatgggcagtacagaaaactgcgtgaagaaattgacaagaatgaaggtggtttggaggcattttctcgtggttatgaaatatttggcttcactcgaagcgccactggtatcacttaccgggaatgggcaccgggagctaaggcagcatcactgatcggagattttaataactggaatgcgaaatctgatgttatggctcggaacgactttggtgtgtgggaaatatttctgccaaataatgctgatggctcaccagcaattccccatggctcccgtgtgaagatccgcatggataccccatctggtattaaagactccattccagcttggatcaagtattctgtccagccacctggcgagatcccatataatggagtatattatgaccctcctgaggaggataaatatgcgttcaaacatcctcgtccaaagaaacccacatcgctgcgtatatatgaatcacatgttggaatgagtagtacggaaccaaagataaatacatatgccaactttagagatgatgtacttccccgtataaaaaagctaggctataatgctgtgcagataatggccattcaagagcatgcctactatgccagctttgggtatcatgtgacaaattttttcgcacctagcagccgctttggaacacctgatgaccttaaatctttgatagacaaagctcatgagctaggtctggttgttctgatggatattgtgcacagccatgcatcaaaaaacacactggatggcctggacatgtttgatggtactgatggtcaatatttccactctggatcgcgtggttatcattggatgtgggattctcgtcttttcaattacggaagctgggaagtgcttaggtatcttctttccaacgcgagatggtggctggaagaatacaagtttgatgggttcagatttgatggtgtgacttccatgatgtacactcatcatggactgcaggtcgaatttactgggaattacaatgagtactttggatattctactgatgttgacgctgtggtctatctaatgctggtgaacgatttgattcatgggctataccctgaggctattgttgtcggcgaagatgttagcgggatgccagctttttgcgttcctgtcgaagacggtggtgtgggttttgactaccgtctacacatggcagtggcagataaatggattgagcttcttaagaagagagacgaggactggcaggttggtgatataactttcacgcttaccaacaggaggtggggagaaaaatgtgtcgtctatgcagagagtcatgatcaagcccttgttggagacaaaacgatagctttctggctaatggataaggacatgtatgatttcatggccgttgatagacaggccactccgcgtgtagaccgtgggattgctttacacaaaatgatccgtctcattacgatgggattgggtggagaaggatacctcaatttcatgggaaacgaatttggacacccagaatggatcgacttcccaaggaccgaccagcaccttcctgatggcagagtcatcgctgggaataatggtagttatgataaatgccgacgtaggtttgatctgggagatgcagaatatcttagataccatggactacaagagtttgatcgagcaatgcaaaatctagaggagacgtatggtttcatgacttcagagcaccagtacatatcccgcaaggatgaaggagacagagtcattgtattcgagagaggtaacttgctcttcgtcttcaacttccactggaccaacagttactctgactaccgtatcggttgctctgttcccggaaagtacaaaatcgttttggactctgataactctttatttggaggcttcaaccggctagatgactccgcggagtttttcacctctgatggaaggcacgacgataggccttgctccttcatggtgtatgcaccgtgcagaaccgctgtagtttacgctgcagtagatgatgatgatgatgatgaacgttcttctcttgtccccataggcctgttacccgaagatgtttag

SEQ ID NO: 148631 - protein, 858 aa, Arabidopsis thaliana
MVYTISGVRFPHLPSIKKKNSSLHSFNEDLRRSNAVSFSLRKDSRSSGKVFARKPSYDSDSSSLATTASEKLRGHQSDSSSSASDQVQSRDTVSDDTQVLGNVDVQKTEEAQETETLDQTSALSTSGSISYKEDFAKMSHSVDQEVGQRKIPPPGDGKRIYDIDPMLNSHRNHLDYRYGQYRKLREEIDKNEGGLEAFSRGYEIFGFTRSATGITYREWAPGAKAASLIGDFNNWNAKSDVMARNDFGVWEIFLPNNADGSPAIPHGSRVKIRMDTPSGIKDSIPAWIKYSVQPPGEIPYNGVYYDPPEEDKYAFKHPRPKKPTSLRIYESHVGMSSTEPKINTYANFRDDVLPRIKKLGYNAVQIMAIQEHAYYASFGYHVTNFFAPSSRFGTPDDLKSLIDKAHELGLVVLMDIVHSHASKNTLDGLDMFDGTDGQYFHSGSRGYHWMWDSRLFNYGSWEVLRYLLSNARWWLEEYKFDGFRFDGVTSMMYTHHGLQVEFTGNYNEYFGYSTDVDAVVYLMLVNDLIHGLYPEAIVVGEDVSGMPAFCVPVEDGGVGFDYRLHMAVADKWIELLKKRDEDWQVGDITFTLTNRRWGEKCVVYAESHDQALVGDKTIAFWLMDKDMYDFMAVDRQATPRVDRGIALHKMIRLITMGLGGEGYLNFMGNEFGHPEWIDFPRTDQHLPDGRVIAGNNGSYDKCRRRFDLGDAEYLRYHGLQEFDRAMQNLEETYGFMTSEHQYISRKDEGDRVIVFERGNLLFVFNFHWTNSYSDYRIGCSVPGKYKIVLDSDNSLFGGFNRLDDSAEFFTSDGRHDDRPCSFMVYAPCRTAVVYAAVDDDDDDERSSLVPIGLLPEDV

SEQ ID NO: 148632 - DNA, 2151 bp, Arabidopsis thaliana
  CDS (1)..(2151)
atggaatatactgaggcagtaagaacagaagaccaaacaatgaacgttgtcaaggagagaggggtgaaaccaagaatagttcccccaccgggtgatggcaagaaaatttatgagatagaccccatgttacgaacttacaacaatcatcttgattaccgttatggacagtataaaagattgcgtgaggaaatagacaagtatgagggtggtcttgaggcattctctcgtggctatgaaaagttaggattttcgcgcagtgatgccggtataacttatagagagtgggcgcctggagctaaggctgcatcacttatcggagatttcaacaactggaattctaatgcagatatcatgactcggaatgaatttggtgtttgggagatctttttgcccaacaacactgatggttcgcctgcaattcctcatggctcacgtgtaaagattcgtatggatactccatctggcattaaagactcaattcctgcttggatcaagttctcggtgcaagctccaggtgaaatcccattcaatggcatatactatgatcctccagaagaggagaagtatgtattcaaacatcctcaaccaaagagacctaagtcgctaaggatttatgaagcacatgttggcatgagtagcacggaaccaatggtcaatacgtatgctaactttagagatgatgttcttccccgcatcaaaaagcttggatataatgctgttcaaattatggccatacaagaacattcatattatgccagctttgggtaccatgtcacaaacttttttgccccaagcagtcgctgtgggaccccagaggaactaaaatcactgatagatagagctcacgagttaggcctggtagttctgatggatatcgttcatagccatgcttcaaaaaacacattggatggactgaacatgtttgatggaactgatgctcactattttcactctggacctcggggataccattggatgtgggattcacgacttttcaattatgggagctgggaagtattacgatatctcctttcaaatgcacggtggtggctagaagaatacaagtttgatggatttagatttgatggtgtaacctcaatgatgtatactcatcatggactctcggttggatttactgggaactacaccgaatactttggattggaaactgatgtggatgctgtgaattatctcatgctggttaatgatatgattcatgggctctaccctgaagcgattaccgttggtgaagatgttagtggtatgccaacattctgtattcctgtccaagatggtggcgttggatttgactaccgtttacacatggccatagctgataagtggatagaaatgctcaagaagagagatgaagactggcaaatgggcgacatcatttacacacttaccaacagaaggtggtcagagaagtgtatctcttatgctgaaagtcacgatcaagctcttgttggtgataaaacaattgccttctggttaatggacaaggatatgtatgatttcatggcagtagacagaccatcaactcctcttatcgatagaggaatagctttgcacaaaatgattaggcttataactatgggattaggcggtgaaggttacttaaattttatgggaaacgaattcggacatccagaatggattgattttcccagaggcgagcagcgtctttctgatggtagcgtgattcctggcaacaatttcagttatgacaaatgccgccgcagatttgatcttggggatgcagattatctcagataccgcggactacaagaatttgatcaggcaatgcaacatcttgaagagaattacggttttatgacttcggagcaccaattcatatcacgaaaagacgaagcagatagagtaatcgtattcgaaagaggtgatctcgtctttgtctttaactttcactggaccagcagctactttgattaccgcattggttgctccaagcctggaaaatataagatcgtattggactcggacgatcctctctttggtggattcaataggctcgatcgcaaggcagagtacttcacttatgatggcttatacgacgaacgaccctgctccttcatggtctatgcaccgtgtagaaccgccgtggtttatgctttagcaaaccacgattag

SEQ ID NO: 148633 - protein, 716 aa, Arabidopsis thaliana
MEYTEAVRTEDQTMNVVKERGVKPRIVPPPGDGKKIYEIDPMLRTYNNHLDYRYGQYKRLREEIDKYEGGLEAFSRGYEKLGFSRSDAGITYREWAPGAKAASLIGDFNNWNSNADIMTRNEFGVWEIFLPNNTDGSPAIPHGSRVKIRMDTPSGIKDSIPAWIKFSVQAPGEIPFNGIYYDPPEEEKYVFKHPQPKRPKSLRIYEAHVGMSSTEPMVNTYANFRDDVLPRIKKLGYNAVQIMAIQEHSYYASFGYHVTNFFAPSSRCGTPEELKSLIDRAHELGLVVLMDIVHSHASKNTLDGLNMFDGTDAHYFHSGPRGYHWMWDSRLFNYGSWEVLRYLLSNARWWLEEYKFDGFRFDGVTSMMYTHHGLSVGFTGNYTEYFGLETDVDAVNYLMLVNDMIHGLYPEAITVGEDVSGMPTFCIPVQDGGVGFDYRLHMAIADKWIEMLKKRDEDWQMGDIIYTLTNRRWSEKCISYAESHDQALVGDKTIAFWLMDKDMYDFMAVDRPSTPLIDRGIALHKMIRLITMGLGGEGYLNFMGNEFGHPEWIDFPRGEQRLSDGSVIPGNNFSYDKCRRRFDLGDADYLRYRGLQEFDQAMQHLEENYGFMTSEHQFISRKDEADRVIVFERGDLVFVFNFHWTSSYFDYRIGCSKPGKYKIVLDSDDPLFGGFNRLDRKAEYFTYDGLYDERPCSFMVYAPCRTAVVYALANHD

SEQ ID NO: 148634 - DNA, 2058 bp, Drosophila melanogaster
  CDS (1)..(2058)
atggccgaggctaaggacatcgagaagctgttcgagacggacggctacttgcggccgtttgagcatgagatccgtcgccgtcatggcgtgctcgaggattggctgaataagataaaccaaagcgagggcggactggatggcttttcgacggcttacaagcactacggacttcacttccagccggataattcggtgattgcccgcgagtgggcacctggagccagagatgtctatctcacgggtgacttcaacaactggcactgggaatcgcatccatttaaaaagctcgactttggcaagtgggagctacacctgccccccaacgaggacggcagtccggccatcaagcacttgagcgaaattaagattataattcgcaaccattccggtcaattgctggaccgcctgtcgccctgggccaagtacgtggtgcagccgcccaagtcggccaatcagggggtcaactacaagcagtacgtgtgggagccaccgtcctacgagcgctaccaacgccagcatccgggtccgccaagacccaagtcgctcaggatctacgagtgccacgtgggtatcgcctcccaggagccgcgggtcggcagctacgacgagttcgccgatcgcatcgtgccgcgcatcaagcgtcagggctataattgcatccaggttatggccatcatggagcacgcctactacgccagttttggctatcaagtgaccagcttctatgcggcctccagccgttatggcaacccggagcagctgaagcgcatgatcgacgtggcacactcgcacggcctgttcgttctgctcgatgtggtccactcgcatgcctccaagaacgttcaggacggtctgaaccagttcgatggcaccaacagttgcttcttccacgacggagcccgtggcgagcactcgctgtgggacagtcgtctcttcaactacgtggagtacgaggtgctgcgtttcttgctatccaacctgcgttggtggcacgacgagtacaacttcgatggctatcgcttcgacggagtgacctctatgctataccattcccgtggcattggggagggcttcagcggcgattacaacgagtactttggcctgaatgtcgacacggatgccctcaattatctgggactggccaatcatctgctgcacaccatagattcgaggattatcaccattgcagaggatgtttctggaatgcctaccttgtgtcgccccgtatcagagggtggtatcggtttcgactaccgcttgggtatggccatcccagacaagtggatcgaactgctgaaggagcagagtgacgatgagtgggacatgggcaacttggtgcacacgctgaccaaccgtcgctggatggagaacacagtggcctacgcagagtcccacgatcaagcgctagtgggcgacaagacgatcgccttctggctgatggacaaggagatgtatacgcacatgtcgacgttgtcggactcctcagtgatcatcgaccgaggactggcgctgcacaagatgattcgtctgatcacgcacgccctgggaggcgaggcgtacctgaactttatgggcaacgagttcggacatccagaatggctggacttcccacgcgttggcaacaacgattcgtatcactatgctcgccggcaatggaatcttgtggacgacgatctgctgaagtacaagtacctcaacgaattcgatcgagccatgaatgaggccgaggagcgctacggctggctgcattccggacccgcttgggtcagctggaagcacgagggcgacaagataatcgctttcgagcgtgccggcctggtgttcgttttcaacttccatccacagcagagtttcaccggataccgtgtgggcaccaactgggcgggcacctaccaggcggtgctctcctcagacgatcctctcttcggcggccacaaccgcatcgatgccaactgcaaacatccctccaatccggagggctacgccgggcgctccaatttcattgaggtctacacaccatcacgcacagccgtggtttatgcccgcgtcagtgactag

SEQ ID NO: 148635 - protein, 685 aa, Drosophila melanogaster
MAEAKDIEKLFETDGYLRPFEHEIRRRHGVLEDWLNKINQSEGGLDGFSTAYKHYGLHFQPDNSVIAREWAPGARDVYLTGDFNNWHWESHPFKKLDFGKWELHLPPNEDGSPAIKHLSEIKIIIRNHSGQLLDRLSPWAKYVVQPPKSANQGVNYKQYVWEPPSYERYQRQHPGPPRPKSLRIYECHVGIASQEPRVGSYDEFADRIVPRIKRQGYNCIQVMAIMEHAYYASFGYQVTSFYAASSRYGNPEQLKRMIDVAHSHGLFVLLDVVHSHASKNVQDGLNQFDGTNSCFFHDGARGEHSLWDSRLFNYVEYEVLRFLLSNLRWWHDEYNFDGYRFDGVTSMLYHSRGIGEGFSGDYNEYFGLNVDTDALNYLGLANHLLHTIDSRIITIAEDVSGMPTLCRPVSEGGIGFDYRLGMAIPDKWIELLKEQSDDEWDMGNLVHTLTNRRWMENTVAYAESHDQALVGDKTIAFWLMDKEMYTHMSTLSDSSVIIDRGLALHKMIRLITHALGGEAYLNFMGNEFGHPEWLDFPRVGNNDSYHYARRQWNLVDDDLLKYKYLNEFDRAMNEAEERYGWLHSGPAWVSWKHEGDKIIAFERAGLVFVFNFHPQQSFTGYRVGTNWAGTYQAVLSSDDPLFGGHNRIDANCKHPSNPEGYAGRSNFIEVYTPSRTAVVYARVSD

SEQ ID NO: 148636 - DNA, 2013 bp, Bacteroides thetaiotaomicron VPI-5482
  CDS (1)..(2013): transl_table=11
atgaaagagacactcaacattatcaaaaacgatccctggctggaacctttcgcagatgccattaccggtcgtcaccagtatgcactgaacaaggaagccgagttgaccaataaaggaaaacaaactctttcggactttgcatcaggctatctttattttggtctgcaccgtactcccaaaggatggacgttccgcgaatgggcaccgaatgctactcatatttatatggtaggtacattcaacaactgggaagagaaagctgcttataagctgaaaaaactgaaaaacggtaattgggaaatcaatcttccggcagatgccattcatcacggagacttatataagttgaatgtgtattgggatggcggacaaggtgaacgcattcctgcatgggctacacgtgtggtgcaggacgagcagaccaagatattcagcgcacaagtctgggcaccggaaaagccatataaattcaagaaaaagacatttaagcctactacgaatcctttgttgatctatgaatgtcatattggaatggcacaacaggaggaaaaagtaggcacatacaatgaattccgcgaaaaaacacttccacgcatagcacaggaaggctataactgtattcagattatggccattcaggagcatccttattatggtagttttggctatcatgtatccagtttctttgctgcttcctcccgctttggtacgcctgacgaactgaaagcgctgattgatgctgctcatgagatggggattgccgttattatggatattgtccattctcatgcggtgaaaaacgaagtggaaggtttgggcaactttgccggtgatccgaaccagtatttctatccggctcctcgtcgtgagcatccggcatgggattcactatgctttgattatggtaaaaatgaagtgatccatttcttattgtccaactgtaaatactggctggaagaatataagtttgacggattccgttttgacggtgtgacgtctatgttgtattatagccacgggttgggagaagcattctgtaattatggagattacttcaatggtcatcaggacggcaatgccatttgctacctgacattggcgaatgagttgattcatcaggtcaatccgaaggctatctctattgctgaagaagtttccggtatgccgggacttgccgccaaagtagaagatggcggttacggatttgattaccgtatggctatgaacatccctgattactggatcaagactatcaaggaaaagattgatgaggactggaaaccttccagtatgttctgggaagtaaccaaccgtcgtcaggatgaaaagacgatctcttatgcggaaagtcatgatcaggcattggtaggagacaagactattattttccgtctgattgatgccgatatgtattggcatatgcagaaaggcgatgagaattatgtagtcaatcgcggaatcgctttacataagatgatccgcttgctgacatcttcgacgatcaatggcggttatctgaactttatgggtaatgagttcgggcatcccgaatggatcgattttccgcgtgaaggtaatggatggtcttgtaagtatgcccgtcgtcagtgggatctggtagataacaagaatctggcttatcactacatgggggactttgatgctgagatgctgaaagtgatcaagagtgtgaaagatttccaggcgactccggtccaggagatctggcataatgatggtgatcaggtattggcttatggacgtaaggatctgatatttgtatttaacttcaatccgaaacagtcttttgtagattatggtttcctcgttagtccgggagcttatgaagtaatcttgaatacggataatgttgcatttggcggaaatggtcttgcagatgattcagtagttcatttcacgattgccgatccgttgtataagaaggaaaagaaagagtggctgaaactctatattcctgcacgtacagctgttgttttgagaaagaagaaataa

SEQ ID NO: 148637 - protein, 670 aa, Bacteroides thetaiotaomicron VPI-5482
MKETLNIIKNDPWLEPFADAITGRHQYALNKEAELTNKGKQTLSDFASGYLYFGLHRTPKGWTFREWAPNATHIYMVGTFNNWEEKAAYKLKKLKNGNWEINLPADAIHHGDLYKLNVYWDGGQGERIPAWATRVVQDEQTKIFSAQVWAPEKPYKFKKKTFKPTTNPLLIYECHIGMAQQEEKVGTYNEFREKTLPRIAQEGYNCIQIMAIQEHPYYGSFGYHVSSFFAASSRFGTPDELKALIDAAHEMGIAVIMDIVHSHAVKNEVEGLGNFAGDPNQYFYPAPRREHPAWDSLCFDYGKNEVIHFLLSNCKYWLEEYKFDGFRFDGVTSMLYYSHGLGEAFCNYGDYFNGHQDGNAICYLTLANELIHQVNPKAISIAEEVSGMPGLAAKVEDGGYGFDYRMAMNIPDYWIKTIKEKIDEDWKPSSMFWEVTNRRQDEKTISYAESHDQALVGDKTIIFRLIDADMYWHMQKGDENYVVNRGIALHKMIRLLTSSTINGGYLNFMGNEFGHPEWIDFPREGNGWSCKYARRQWDLVDNKNLAYHYMGDFDAEMLKVIKSVKDFQATPVQEIWHNDGDQVLAYGRKDLIFVFNFNPKQSFVDYGFLVSPGAYEVILNTDNVAFGGNGLADDSVVHFTIADPLYKKEKKEWLKLYIPARTAVVLRKKK

SEQ ID NO: 148638 - DNA, 2007 bp, Porphyromonas gingivalis W83
  CDS (1)..(2007): transl_table=11
atgagaataatcgaacaagatccttggctgcgcccatatgaatcagtaatagaaagcagactgaagtatgctcgcaaacgagagacggatttgaccggaggaagatccggaggattgagcgacttcgccaatggacatctctattacggtcttcatcaggacggggattcgtgggtgattcgtgagttcgcgcccgaagccacggccgtatatctgatcggcgaactttcgcgctggcgtagattgccacagtttcggtttgcgcctgtggatgaagcgggttcatgggaattgcgactttcatgccgactgcttccgcatggctctcgctacaggctcttcttcgaatggcccggtggcgaaggagagaggataccggcttggtgcaaccgtgtagaacaggatcctgaaacttatcttttctacgcccaagtgtgggtgccggatactccctatgaaatgaaacaccctcatcctaaccgtaaggacgagcctttgctaatttatgaatgtcatatcgggatgtcgtccgaggaggagaaggtcagcacatacgaagagtttcgacggaatatcctcccccgtatctgcaaggacggctataatgccatacagctcatggcgatacaggagcatccttattacgcgtcgttcggctatcatgtgtcgagtttctttgctccgagcagtcgttttggaacgcccgaagatctcaagcgtctgattgatgaagcccacgctctcggcctctacgtgatcatggatctggtgcattcgcatgcagtcaagaacgaggtcgaaggcttgggcttgtatgacggcacgcatacccttttcttccatgacggcaatcgcggactccatccggcttgggattcgtattgcttcgactatggtagggacaacgtactgcacttcctcctttccaactgcaaatactggctgacagagtttggattcgacggcttccgtttcgatggtgtgacgtccatgctatactatagtcatggactcggcgataggttcgacaattacgacagctattacaacggccatcaggacggcgatgctattgcctatctgatcttggccaacaaactcattcacgaactttgccccgatgcaatcacgatagccgaagaggtaagcggcatgcccggattagctcttcccttggcagatgggggatatggctttgactaccgtttagccatgaatatccccgatttctggatcaagctcatcaaagagcatcgtgacgaagactggaatcccggcgacatctggtatcaactgaccaatcgccgtcaggaggaaaagacgatcagctatgccgagagtcacgatcaggctttggtcggggacaagacaatcatatttcgcctgatcgatgccgatatgtattggtatatgaacaagcagagttgtgtacatagcgtggacagaggcattgcactgctgaagatgatccgtctcttcactgccacgacgatgaatggtggttatctcaatttcatgggcaatgaattcggacatcccgagtggatagacttccctcgcgaagggaatggctggtcgtacaagtatgcccgcaggcagtggagtctggccgatagtcctttcttgcgctatgcaggtctgcacttgtttgatcaggatatgatagccatgatacgatcggtggagagctttcacaaactccctttgcgcgaatactggctcaagagagaagagcaggtgatctgttacggtcgaggcgatttcttcttcgttttcaattttcaccccgaacgttcttattcggattatcccatccctcttccggccggtaagtattcggtagcgatgagtaccgatgcacggaagtacgaaggtttcggtcgtgtggacgaatgggtggagcactttactcttccggatgggagtaaagatcggtttacccatgaacagtatttgaacctctatctgccggctcgctctgctctcgtcctgaagcttgccgaatga

SEQ ID NO: 148639 - protein, 668 aa, Porphyromonas gingivalis W83
MRIIEQDPWLRPYESVIESRLKYARKRETDLTGGRSGGLSDFANGHLYYGLHQDGDSWVIREFAPEATAVYLIGELSRWRRLPQFRFAPVDEAGSWELRLSCRLLPHGSRYRLFFEWPGGEGERIPAWCNRVEQDPETYLFYAQVWVPDTPYEMKHPHPNRKDEPLLIYECHIGMSSEEEKVSTYEEFRRNILPRICKDGYNAIQLMAIQEHPYYASFGYHVSSFFAPSSRFGTPEDLKRLIDEAHALGLYVIMDLVHSHAVKNEVEGLGLYDGTHTLFFHDGNRGLHPAWDSYCFDYGRDNVLHFLLSNCKYWLTEFGFDGFRFDGVTSMLYYSHGLGDRFDNYDSYYNGHQDGDAIAYLILANKLIHELCPDAITIAEEVSGMPGLALPLADGGYGFDYRLAMNIPDFWIKLIKEHRDEDWNPGDIWYQLTNRRQEEKTISYAESHDQALVGDKTIIFRLIDADMYWYMNKQSCVHSVDRGIALLKMIRLFTATTMNGGYLNFMGNEFGHPEWIDFPREGNGWSYKYARRQWSLADSPFLRYAGLHLFDQDMIAMIRSVESFHKLPLREYWLKREEQVICYGRGDFFFVFNFHPERSYSDYPIPLPAGKYSVAMSTDARKYEGFGRVDEWVEHFTLPDGSKDRFTHEQYLNLYLPARSALVLKLAE

SEQ ID NO: 148640 - DNA, 2085 bp, Nasonia vitripennis
  CDS (1)..(2085)
atgggtggaaagtggtcgagtatggatcctatggaaattccagtgcctgatttagataaactgttggacagggatccttacttgaagccctatgaaaaagaaataagaaaaagatatggactatttaaagactatgtagataagatagagtcaggagagaaggatctgaaccagttttctaaatcatatacaaaatttggaatacatatcaatgaagataattctgttattgcgaaagaatgggcaccaggagctgaacaagtttacttgacaggagacttcaataactgggataggacaaaacacccatacaaaaagttggagtttggaaaatgggagttacagttaccgcaaaataatgacgggagttgtcctatcaagcatttatctgaagttaaaatcattattagagataaaagtggacagctaattgagaggcttagtccttgggccacatatgtcactcaatctaaaaatctggatgagggcacaactttcaaacaaaggatctggtaccctggaccacaaaatgtgtatcaacccaagcatccaaagccaaagaaaccagaaagtcttcgcatatatgagagtcatgtgggaattgcaactcaagaacaccgtgtaggcacctatctggaatttgctaaaaatgttatacctcgtataaaaaaacagggttacaatgcaatccaattaatggcagtaatggaacacgcatattatgcttcttttggctaccaggtcacttcgttttttgctgcatcctctcgttttggaactccagacgaattgaaagaattaatagatattgcccatcaaaatggtctatatgttttactcgatattgttcattcccacgcctcgaaaaatacgcttgacggattaaatatgtttgatggaactgatgcctgcttttttcattcgggaagtagaggtcagcatccactttgggacagtagattatttaattatggagactatgaagtattgaggtttttactttcgaatttgcgatggtacactgaagaatatggttttgatggttacaggtttgatggcgttacttctatgctctaccattctagaggtcttgggcaaggatttagtggatcgtatgatgaatattttgggttgaatgtagatgttgagggcattgtttatctcatgctggcaaattatttattgcatcattattatcctgaagttattactatagctgaagatgtcagtggaatgcccggaatttgcaggccagttagtgaagggggtattggtttcgattttcgattaggaatggctattccagataaatggattaaacttttaaaagaaacccctgatgaaaattggaatatgggcgatattgtttggacattgactaatcgaaggtggatggagaaaacagtagcctatgcagaatcgcatgatcaagctcttgttggcgataaaactatcgccttttggctgatggacaaagatatgtacacccatatgagtgttttaagctcaccaaatccagttataaatcgaggaatagcattgcacaatataataatgctcataacgcacgccttagggggcgaagcttaccttaactttataggtaatgagtttggacatccagaatggttagattttccacgtgtaggtaataataatagttatacttatgctagaagacaatggaatctagctgacgatgaactgcttaaatacaaatatatgggaagttgggatgcagctgtgaattcactagaggagaagtatggatggttacattcaaatccagcttatgtttcctggaaacacgaagatgataaaattattgcgtttgaacgagctggattagtttttgtatttaattttcatccgtcaaagtcgtttgctgattaccctgtgggagtagaccgtgctggaacttacaaagtaattttaagcagcgatgatacagagtatggtggtgagaatcggatcgattcgaaagtttcacattttacgaaaccagaaccgtttgctaatagagcaaacagaatgtttgtatacgcaccgtgtcgtactgccataatttatgcaactgattgttag

SEQ ID NO: 148641 - protein, 694 aa, Nasonia vitripennis
MGGKWSSMDPMEIPVPDLDKLLDRDPYLKPYEKEIRKRYGLFKDYVDKIESGEKDLNQFSKSYTKFGIHINEDNSVIAKEWAPGAEQVYLTGDFNNWDRTKHPYKKLEFGKWELQLPQNNDGSCPIKHLSEVKIIIRDKSGQLIERLSPWATYVTQSKNLDEGTTFKQRIWYPGPQNVYQPKHPKPKKPESLRIYESHVGIATQEHRVGTYLEFAKNVIPRIKKQGYNAIQLMAVMEHAYYASFGYQVTSFFAASSRFGTPDELKELIDIAHQNGLYVLLDIVHSHASKNTLDGLNMFDGTDACFFHSGSRGQHPLWDSRLFNYGDYEVLRFLLSNLRWYTEEYGFDGYRFDGVTSMLYHSRGLGQGFSGSYDEYFGLNVDVEGIVYLMLANYLLHHYYPEVITIAEDVSGMPGICRPVSEGGIGFDFRLGMAIPDKWIKLLKETPDENWNMGDIVWTLTNRRWMEKTVAYAESHDQALVGDKTIAFWLMDKDMYTHMSVLSSPNPVINRGIALHNIIMLITHALGGEAYLNFIGNEFGHPEWLDFPRVGNNNSYTYARRQWNLADDELLKYKYMGSWDAAVNSLEEKYGWLHSNPAYVSWKHEDDKIIAFERAGLVFVFNFHPSKSFADYPVGVDRAGTYKVILSSDDTEYGGENRIDSKVSHFTKPEPFANRANRMFVYAPCRTAIIYATDC

SEQ ID NO: 148642 - DNA, 2076 bp, Magnaporthe grisea 70-15
  CDS (1)..(2076)
atggctaccaatggatccaatacggtggtggccaacgaaggtacagttgagcacattggcgctgtaaagcttgacccctggctcgaacccttcgaggatgtcatcaaacgccgccatggcatggctgaagactggctcaagaagatcgagcagagcgaagggtcaattgagaagtttacgaggggcaccgaggtttacggattcaatgtgaagccagacaacacaatcgtgtatcgtgaatgggccccaaatgcaactgcggcattcctggttggtgacttcaaccaatggagccgccagtcgcaccctatgaagaagaatgagtatggagtcttcgagataaccgttccccccactgccgctggagaaccagctattcctcacaactccaaggttaagatctcccttttcctccccaatgggcaactcatagatcgccttccggcgtggatcaagtatgtcacgcaggatctctctgtatcgcctgcctacgacgccaggttctggaatcccccatccagtgagaggtatacattcaagaaccctcgccccaagaagcccaagagcgtgcgtgtctacgaggcccatgttggaatttcctcgcctgagcttcgtgtagccacatacaaggagttcaccaagaacatgctccctcgcatcaagaagcttggatacaacgtcatccaacttatggccattatggagcatgcttactatgccagctttggctaccagatcaacaacttctttgccgcaagcagccgctatggcaccccggaggatcttaaggagcttattgacgctgctcatggcatgggacttactgttctgcttgatgtggttcacagccacgcgtccaagaacgtcttggatggcatcaatgagtttgacgggacagaccatcagtacttccatgcaggcggcaaagggagacacgaccagtgggacagcaggctgttcaactacggccatcatgaagttcttcgattcctcctcagcaatctccgattctggatggacgagtatcagttcgatggcttccgttttgacggcgtgacaagcatgctgtatctccaccacggcatggggactggcttctctggaggctaccatgagtatttcggcccggatgccgacgaagaggctctcgtgtatctcatgcttgcaaacaagatgcttcatgagctgtaccccgaggtgatttccatcgcagaggacgtctctggcatgccaactctctgtcttccttggtccgacggcggagtgggcttcgattatcgtctagccatggcaatcccagacatgtggatcaagatcctcaaagagaagaaagatgaggaatgggacatggccgatatttgctggacattgaccaacagacggcacggcgagaagaccattgcgtactgcgagagtcacgatcaagcacttgtcggtgacaagactctcatgatgcatctctgcgacgctgagatgtacacccacatgtcaacactgacacctttgacccctatcattgaccgcgggatggctttgcacaaaatgattcgcctgctcactcatggtcttggaggcgagggttacctcaacttcgagggtaacgagtttgggcaccccgagtggcttgacttccctcgcgagggcaaccagaactcattctggtatgcaaggcgtcaattgaacctgaccgaggacaatcttttgagatatcggttcctaaacgacttcgacgccgccatgaacaactgcgaggagaagcacggctggctcagtgctccccaggcgtacatttcgctcaaaaacgagtctgatatggtagtcgtctttgaacgtgcaggtgtggtattcgctttcaacttccacccaacccagagctttgccgattacagaattggagtcgacgtgtctggcacgtacaaggtcgctttgaccacggacgacaaagaattcggaggccatggtcgtatagacagctccacacgattcttcaccaccccgatggagtggaacggtcgcaagaactggactcatatctatcttcccagccgtaccgctgtcgtcctcgagctggagtag

SEQ ID NO: 148643 - protein, 691 aa, Magnaporthe grisea 70-15
MATNGSNTVVANEGTVEHIGAVKLDPWLEPFEDVIKRRHGMAEDWLKKIEQSEGSIEKFTRGTEVYGFNVKPDNTIVYREWAPNATAAFLVGDFNQWSRQSHPMKKNEYGVFEITVPPTAAGEPAIPHNSKVKISLFLPNGQLIDRLPAWIKYVTQDLSVSPAYDARFWNPPSSERYTFKNPRPKKPKSVRVYEAHVGISSPELRVATYKEFTKNMLPRIKKLGYNVIQLMAIMEHAYYASFGYQINNFFAASSRYGTPEDLKELIDAAHGMGLTVLLDVVHSHASKNVLDGINEFDGTDHQYFHAGGKGRHDQWDSRLFNYGHHEVLRFLLSNLRFWMDEYQFDGFRFDGVTSMLYLHHGMGTGFSGGYHEYFGPDADEEALVYLMLANKMLHELYPEVISIAEDVSGMPTLCLPWSDGGVGFDYRLAMAIPDMWIKILKEKKDEEWDMADICWTLTNRRHGEKTIAYCESHDQALVGDKTLMMHLCDAEMYTHMSTLTPLTPIIDRGMALHKMIRLLTHGLGGEGYLNFEGNEFGHPEWLDFPREGNQNSFWYARRQLNLTEDNLLRYRFLNDFDAAMNNCEEKHGWLSAPQAYISLKNESDMVVVFERAGVVFAFNFHPTQSFADYRIGVDVSGTYKVALTTDDKEFGGHGRIDSSTRFFTTPMEWNGRKNWTHIYLPSRTAVVLELE

SEQ ID NO: 148644 - DNA, 2124 bp, Gibberella zeae PH-1
  CDS (1)..(2124)
atggcttcaatcgtcaagaattcatccaattctttggaccccaatcaggcaaacggtgctgctggcgacattcccaatgatggtacaggcgttgtcaagctcgatccttggctggagcccttcagcggagctctgaagagacgatattcgaaagcacaagattggatcaagaccatcaatgccgccgaaggtggccttgagaagttcagcaggggcgctgaaaagttcggatttaatgtcgatgccaacaacaacattgtgtaccgcgagtgggcacccaacgctactgctgcgtacctgatcggcgactttaacggctggaatcgtggcgctcaccccatgaagaagaacgatttcggtgtctttgagattacactccctgcccaaaatggccaagctgccattcctcacaactccaagctcaagatttctcttgacttgcccagtggtgagcatgttgatcgacttcctgcttggatcaagtacgtgacacaggacctgtccgtatctcccgcatacgatgcccgtttctggaaccctccagcttccgagacctacaagttcaagaactctcggcccaagaagcctgccagtgctcgtgtatacgaagcacatgtcggtatttccagccccgagcagaaagtcgcatcttacaaggagttcaccaagaacatgctccctcgtatcaaggctcttggatataacgtgattcaattgatggctgtcatggaacatgcgtactatgccagcttcggatatcaaatcaacaacttcttcgcagccagcagtcgatatggaactcctgaagaactgaaggagctcattgacaccgctcacggcttggggataactatgctactcgatgttgtccacagtcacgcgtccaagaacgtccttgatggtatcaacgagttcgacggtaccgaccaccagtacttccatggtggtggcaagggtcgacatgaccagtgggacagccgcctgttcaactacggacatcatgaggtgatgaggtttctgctgagcaacttgcgattctggatggacgagtaccagttcgacggtttccgattcgatggtgtgaccagtatgctttacgttcatcacggcatgggaactggcttttcgggtggctaccatgagtactttggctcagatgttgacgaggaggctgtcgtttacatgatgcttgcaaacgagatgttgcatcagctttaccctgaggttatcacaattgccgaagatgtctctggaatgcctgctctttgcgtgccactgtcacttggtggcattggctttgattatcgccttgccatggcaattcctgatatgtggatcaagatcctgaaggaagtcaaggatgacgaatgggatattgccaacatctgtcacaccctgaccaaccgccgacatggcgagaagactatcgcttatgctgagagtcatgaccaagccctcgtcggtgataaaacactcatgatgcatctctgcgatgccgagatgtacacccacatgtcgaccctctcgcccttgactcccgtcattgatcgtggtatggcccttcacaagatgatccgactggtgacacacggacttggaggagagggataccttaactttgagggcaacgagttcggccaccctgaatggctcgacttccctcgagagggcaacaacaactcattctggtacgctcgacgacagctcaacctcacagatgatcctctgcttcgatacaagttcctcgacaactttgaccgcatgatgaaccaaaccgaggccaagtacggctggttgtctgcgcctcaggcgtacatctcactgaagcatgagggtgacaaggttatcgtgttcgagcgagctggcttggtcttcatcttcaacttccaccccaccaacagcttcagcgactaccgtattggaattgaggttccaggaacataccgtgtggttcttaactcagaccacggagatgtcggaggccacaaccgcatcgatgagaacactcgattcttcactacacctatggaatggaacaacagaaagaactggacgcacgtctatattccttctcgaactgctatcattctggctcttgagtctactgtcactcaaagctcctaa

SEQ ID NO: 148645 - protein, 707 aa, Gibberella zeae PH-1
MASIVKNSSNSLDPNQANGAAGDIPNDGTGVVKLDPWLEPFSGALKRRYSKAQDWIKTINAAEGGLEKFSRGAEKFGFNVDANNNIVYREWAPNATAAYLIGDFNGWNRGAHPMKKNDFGVFEITLPAQNGQAAIPHNSKLKISLDLPSGEHVDRLPAWIKYVTQDLSVSPAYDARFWNPPASETYKFKNSRPKKPASARVYEAHVGISSPEQKVASYKEFTKNMLPRIKALGYNVIQLMAVMEHAYYASFGYQINNFFAASSRYGTPEELKELIDTAHGLGITMLLDVVHSHASKNVLDGINEFDGTDHQYFHGGGKGRHDQWDSRLFNYGHHEVMRFLLSNLRFWMDEYQFDGFRFDGVTSMLYVHHGMGTGFSGGYHEYFGSDVDEEAVVYMMLANEMLHQLYPEVITIAEDVSGMPALCVPLSLGGIGFDYRLAMAIPDMWIKILKEVKDDEWDIANICHTLTNRRHGEKTIAYAESHDQALVGDKTLMMHLCDAEMYTHMSTLSPLTPVIDRGMALHKMIRLVTHGLGGEGYLNFEGNEFGHPEWLDFPREGNNNSFWYARRQLNLTDDPLLRYKFLDNFDRMMNQTEAKYGWLSAPQAYISLKHEGDKVIVFERAGLVFIFNFHPTNSFSDYRIGIEVPGTYRVVLNSDHGDVGGHNRIDENTRFFTTPMEWNNRKNWTHVYIPSRTAIILALESTVTQSS

SEQ ID NO: 148646 - DNA, 2061 bp, Aspergillus nidulans FGSC A4
  CDS (1)..(2061)
atgacttccacagctccatctgacggcactggtatcatcgatcttgatccgtggttagagccttttcgggaggctatcaagcgccgattcgattatgttgagagctggatcaagaccgttgatgaggtggagggaggtctcgataagttcagcaagggctatgagaaattcggcttcaatgtcagcgagacgggcgacatcacctacagggaatgggctccaaacgccatagaagcggcgctggtgggtgacttcaacaattgggataccaaggcgaatccaatgacgagagacaacttcggtgtttgggagattgcccttcctgcgaagaatggcacgccggtcataccgcatgatagtaaggttaagataactatggtcacccgcagcggagaacgtatatatcgtattcccgcatggatcaagcgtgttgtgcaagatctgaatgtatcgcctatctacgaatctgtcttttggaacccaccaaaggcagagcggtataactttcagcatgcgcgccctaagaaacccgaaagcctacggatctatgaagctcacgtcggtatctcgtccccggataccagagtagcaacatacaaggagttcacagccaacatgctccctcggattaagtacctaggctacaacgcaatccagctcatggccattatggaacatgcctactatgccagcttcgggtaccaggttaacaatttcttcgcagcgagtagtcgctacggtaagcccgaggatctgaaggaactggttgacacggcacatagtatgggcttggtagttctcctcgacgtggtgcacagccacgcatcgaagaacgtcgatgacggactgaacatgtttgatggcagtgaccatttatatttccattccgggtcaaaaggtcagcacgagctatgggacagccgactgtttaactacggaaaccatgaagttctgcggttcctccttagcaatcttcgcttttggatggaggaatacggctttgacggttttcgatttgatggtgtcaccagcatgttatatacccatcacggtattgggactgtcagtggcttttcaggcggataccacgaatacttcggtccagcagttgacgacgatggcgttatgtacctagccctagcaaacgaaatgctgcaccgtctttacccagattgcataaccgtggcagaggatgtttcgggaatgccagcgttatgcctaccacacggccttggtggagtcggattcgactatcgtctcgcgatggccattccagatatgtatatcaagcttctaaaagagaagtcagacaacgattgggacattggcaatctcgccttcacgttgacaaaccgacgccatggcgagaagaccattgcatacgcagaaagccacgaccaagctctcgtcggcgacaaatctctcatgatgtggctctgcgataaagaaatgtacacacacatgtccgtcctgacagagttcacccccgtcatcgaacgcggcatggcactccacaaaatgatccggcttgtcacacacgcccttggtggcgaaggctacctcaatttcgaaggtaacgaattcgggcaccccgaatggctcgactttccccgcgccggcaacaacaactccttctggtacgcacgtcgccaactaaacctgaccgaagatcaccttctacgctacagattccttaacgagttcgaccgcgccatgcagttgacagaatccaagtacggctggctccatgcgccccaggcttatatttctctcaagcacgaaggagataaagtgcttgtctttgagcgggcggatttgctatggattttcaatttccatcctacggagagttttaccgattatagggtcggtgtagaacaagctgggacttatcgggttgtgcttgacactgatgaccaggcgtttgggggcttgggaaggatcgatcaggggactagattctttacaaccgatatggaatggaatgggaggaggaattacttgcaggtttatattccgactaggactgctctggccctagcattggaagagacgctgtaa

SEQ ID NO: 148647 - protein, 686 aa, Aspergillus nidulans FGSC A4
MTSTAPSDGTGIIDLDPWLEPFREAIKRRFDYVESWIKTVDEVEGGLDKFSKGYEKFGFNVSETGDITYREWAPNAIEAALVGDFNNWDTKANPMTRDNFGVWEIALPAKNGTPVIPHDSKVKITMVTRSGERIYRIPAWIKRVVQDLNVSPIYESVFWNPPKAERYNFQHARPKKPESLRIYEAHVGISSPDTRVATYKEFTANMLPRIKYLGYNAIQLMAIMEHAYYASFGYQVNNFFAASSRYGKPEDLKELVDTAHSMGLVVLLDVVHSHASKNVDDGLNMFDGSDHLYFHSGSKGQHELWDSRLFNYGNHEVLRFLLSNLRFWMEEYGFDGFRFDGVTSMLYTHHGIGTVSGFSGGYHEYFGPAVDDDGVMYLALANEMLHRLYPDCITVAEDVSGMPALCLPHGLGGVGFDYRLAMAIPDMYIKLLKEKSDNDWDIGNLAFTLTNRRHGEKTIAYAESHDQALVGDKSLMMWLCDKEMYTHMSVLTEFTPVIERGMALHKMIRLVTHALGGEGYLNFEGNEFGHPEWLDFPRAGNNNSFWYARRQLNLTEDHLLRYRFLNEFDRAMQLTESKYGWLHAPQAYISLKHEGDKVLVFERADLLWIFNFHPTESFTDYRVGVEQAGTYRVVLDTDDQAFGGLGRIDQGTRFFTTDMEWNGRRNYLQVYIPTRTALALALEETL

SEQ ID NO: 148648 - DNA, 2031 bp, Candida albicans SC5314
  CDS (1)..(2031): transl_table=12
atgtcaaaatcattaattcaaggagtattagacttagatccatggttagaaccattttctcaaccattaattaatcgacaaattgaatttcaaaaatggcataaaaaattaattgaatcagaaggttcattaattgattttgctaatagttataaaaaatatggtgtacatactttaccttctggtgaaattcaaatcattcaatatattcctgatgttgatgaagtttcaattgttggagattttaataattggaataaagatagtcataaattacggaaattaaatgaatttggaacttgggaattgactcttaaaccaggtagtatccccattgatagtaaatataaaattgccatgaaaaccaccaccaaaaatggcggggaatggatttatcgtttagatccatgggttcatagagctacatttgctaaacaacatgcattatatgaaggtcatttttgggaagataattatcaatttaaaaatcctcgtcctaaaaaaaatattgccgcaggtggtattaaaatttatgaagctcatgtaggtatttctactccggaaccaactattggtagttataaaaatttcactcaaaatgtcttgccaataattcgtgatcttggttataataccattcaattaatggcaattatggaacatgcttattatgcatcatttggttatcaagtgacgagttttttcgccatctcatctcgatatggtacccctgatgaattaaaagaattgattgataccgctcatggaatgggaattcaagtattattagatgtggtccattctcatagttcgaaaaatgtcgacgatggattaaatatgtttaatggtactgatcattatttatttcatggtggtagtagaggcaatcatgatttatgggattctcgattatttaattatacaaactatgaaactttaagatttttattatctaatttgaaatattatattgatgttttccaatttgatggctttagatttgatggggttactagtatgctttataaacatcatggattatctgttgggttcagtggtggatatcatgaatattttggtgatggagtcgataatgaagctatagtttatcttatgttagctcatcaattaatgaatgaaatttccaccacccaaaatttcaatttgacttcaattgcggaagacgtttccgggatgcctacattatgtcgtccaatatctgatggaggaattggtttcaattatagattatcaatggcaatccctgatatgtggattaaaattttaaaacatttaactgatgaacaatgggatcttggtaatattgttcatacattaaccaatcgaagatatggtgaaaaagtcattgcttattgcgaatctcatgatcaagctttggttggagataaaactttagccttttggttaatggataaagaaatgtataccaatatgtcagtattatccccattaacaccaattattgatagaggtattgcccttcataaattaatccgtttagtcacttttgcccttggtggtgatggatatctcaattttgaaggtaatgaatttggtcatcctgaatggttggatttccctcgtcaaggtaatggagaatcttatcattatgctcgtcgtcaattcaatttaattaatgatgatcttcttcgttataaatatttatatcaatttgataaaaaaatgttacaactagaaatcaccaatactggggaatatgtttctttaaaacatgaaggtgataaagttttagtatttgaaaaaggtaaatcagtttatattttcaatttcaatccaactcaatcatttgttgattatagaattggggttgaattaccagggacttataaattagtattggattctgattcagaagatttaggtggtcatggaagactcgatcataatactaaatatttcacttttaatgaaccttggaataatagaagtaattcccttttagtttatattccaactagaactgccattgtcttagaaaaagttgagtag

SEQ ID NO: 148649 - protein, 676 aa, Candida albicans SC5314
MSKSLIQGVLDLDPWLEPFSQPLINRQIEFQKWHKKLIESEGSLIDFANSYKKYGVHTLPSGEIQIIQYIPDVDEVSIVGDFNNWNKDSHKLRKLNEFGTWELTLKPGSIPIDSKYKIAMKTTTKNGGEWIYRLDPWVHRATFAKQHALYEGHFWEDNYQFKNPRPKKNIAAGGIKIYEAHVGISTPEPTIGSYKNFTQNVLPIIRDLGYNTIQLMAIMEHAYYASFGYQVTSFFAISSRYGTPDELKELIDTAHGMGIQVLLDVVHSHSSKNVDDGLNMFNGTDHYLFHGGSRGNHDLWDSRLFNYTNYETLRFLLSNLKYYIDVFQFDGFRFDGVTSMLYKHHGLSVGFSGGYHEYFGDGVDNEAIVYLMLAHQLMNEISTTQNFNLTSIAEDVSGMPTLCRPISDGGIGFNYRLSMAIPDMWIKILKHLTDEQWDLGNIVHTLTNRRYGEKVIAYCESHDQALVGDKTLAFWLMDKEMYTNMSVLSPLTPIIDRGIALHKLIRLVTFALGGDGYLNFEGNEFGHPEWLDFPRQGNGESYHYARRQFNLINDDLLRYKYLYQFDKKMLQLEITNTGEYVSLKHEGDKVLVFEKGKSVYIFNFNPTQSFVDYRIGVELPGTYKLVLDSDSEDLGGHGRLDHNTKYFTFNEPWNNRSNSLLVYIPTRTAIVLEKVE

SEQ ID NO: 148650 - DNA, 2100 bp, Ustilago maydis 521
  CDS (1)..(2100)
atggcagctgctaccacatccgctgcggcccaagcgcctgcacccatcgattattccaaggccaccgatggcactggcgtcattgcgcttgatccatggttggagcccttcgcacctgctctgcgcgagcgatatggcgtctacgcggactgggtcaagaggatcaacgcttccgaaggcggccttgaagccttctcgcgctcctaccgcaagatgggcttccagatcgaccccaccacgcaagccgtcacctacaccgaatgggcacccaacgcagtgcaagcttcgcttgtcggcgacttcaacaactggtctcgcgatgcacacccgatgtccaaggacgactttggaaagtggcacatcaccattccaccgttggcaaaggggcagtgcgccatcccgcacgactccaagatcaaggtctcgttcgtactaccctcgggtgaacgcatcgagcgtctgcctgcatggatcctgcgagtgacgcaggacctcaatgtttcgcctgtctacgatgctcgtttctggaatcctgccaagcaagatcgctacacgatgcgcttccccaaaccacccaagccggacaacattaaagtgtacgaagcgcacgttggcatcgctactcccgaagcgcgagtgggtcagttcaaagagtttaccaaaaacgtgctgccacgcatcaaggagctcggctacaacacgatccagctcatggcgattcaggagcacgcctactacgcgtcattcgggtaccaggtcaccaactttttcgctgccagcagccggtatggcaacccggaagacctcaaggaattgatcgacgtagcgcactcgctcggtatcacagttctgctcgacattgtgcactcgcacgcgtgcaaaaatgtgctcgacggtctcaacatgttcgacggtaccgaccacctctacttccacgaaggcggcaagggacgccacgaactttgggactcgcgcctgttcaactatggtcaccacgaggtgctgcgcttcctgctgagtaactgcctcttctggatggaggagtacggctttgacggtttcaggtttgacggcgtcacctcgatgctgtatacgcatcacgggatcggcacgggattcagcggtggctaccacgaatattttggaccttcggttgacgtagaggcggtcgtctatctgatgctcgccaaccagatgattcacgagtacaacccgaaagcgatcacaatcgctgaggacgtttcggggatgcctgcactgtgccgacctgtctcggaaggcggtgtgggttttgactatcgcctgtcgatggctgtgccggacatgtggatcaagctgctcaaggaaacgtcggacgaagactgggatttcggcaacatctgcttcacgctcaccaatcgacgacatttggaaaagtcgatcgcatacgctgaatcgcacgaccaggcgctcgtgggggacaaaacgttggcgttttggttgatggacaaggagatgtataccaacatgtcagacctcaccgaacgcacgcaggtgattgatcgcggcttggcgttgcacaagatgattcgtctgatcacgcatgcgctcggcggcgaggggtatctcaactttatcggcaacgaatttggacatccggaatggcttgattttcctcgcgagggcaatggcaactcgttccactacgcacgtcgtcaattcaacctggtcgacgaccagctgctccggtacaagtacctgtacgcgtttgacgctgccatgaacaaggcggaggaaaaatacaagtggcttgccgctcctcaagcgtacatatccttgaagcacgactcggatcgcgttgttgcgtttgaacgtgccggtctgctgtttgtctttaactggcatgccgataagtcgtacactgattatcgcatcggtgtcgacgtgcccggcaagtatagggtgctcctcgataccgaccaggccagcttgggcggccacgcgaggctcgaccatgccaccgagtacttctctaccgacatggcgtggaatggcaggagcaatttcgtgcagttgtacctacctagcagaagtgccattgtcctctacagggccggttga

SEQ ID NO: 148651 - protein, 699 aa, Ustilago maydis 521
MAAATTSAAAQAPAPIDYSKATDGTGVIALDPWLEPFAPALRERYGVYADWVKRINASEGGLEAFSRSYRKMGFQIDPTTQAVTYTEWAPNAVQASLVGDFNNWSRDAHPMSKDDFGKWHITIPPLAKGQCAIPHDSKIKVSFVLPSGERIERLPAWILRVTQDLNVSPVYDARFWNPAKQDRYTMRFPKPPKPDNIKVYEAHVGIATPEARVGQFKEFTKNVLPRIKELGYNTIQLMAIQEHAYYASFGYQVTNFFAASSRYGNPEDLKELIDVAHSLGITVLLDIVHSHACKNVLDGLNMFDGTDHLYFHEGGKGRHELWDSRLFNYGHHEVLRFLLSNCLFWMEEYGFDGFRFDGVTSMLYTHHGIGTGFSGGYHEYFGPSVDVEAVVYLMLANQMIHEYNPKAITIAEDVSGMPALCRPVSEGGVGFDYRLSMAVPDMWIKLLKETSDEDWDFGNICFTLTNRRHLEKSIAYAESHDQALVGDKTLAFWLMDKEMYTNMSDLTERTQVIDRGLALHKMIRLITHALGGEGYLNFIGNEFGHPEWLDFPREGNGNSFHYARRQFNLVDDQLLRYKYLYAFDAAMNKAEEKYKWLAAPQAYISLKHDSDRVVAFERAGLLFVFNWHADKSYTDYRIGVDVPGKYRVLLDTDQASLGGHARLDHATEYFSTDMAWNGRSNFVQLYLPSRSAIVLYRAG

SEQ ID NO: 148652 - DNA, 2079 bp, Tribolium castaneum
  CDS (1)..(2079)
atgggtggaaaatactcgtctttggaccccatggagatcgaggtgcctgaaattgataaactcctcgctagagacccgtatcttaagccgtttgagaaggaaatccgtcgccgatatgggtgttttaaagacctgcttgaaacaattgatgagaatgggtgcggtttggacagtttcacccaagggtataagtactatgggcttcacgtccagccagacaacacaattgtggccagagagtgggccccgggcgctgtgcagttgttcctaacaggagactttaatggctggaacagggacagccaccgttacaagaaactggagtttggcaaatgggaattagtcataccgccaaaacccgatggttcatgtgccataccccacttatccgaagtcaaagtggttgtggaaacacaatctggaacaaaagaagatcgcttatcgccctatgccacatatgtggtcgagccgccaaaagaccaaggaacaatttacaaacaaaagttctggaacccgccaaactcagagaagtacgaatttcggcactcaagaccggcgaaaccgaaaggcttgcgcatatatgaatgccatgtcggcatagccacgtctgaactgaaagtgggttcctacgacaatttcactgataatattctaccacggatcgtaaaacaaggctataacacgattcagctcatggcaataatggagcacgcatattatgccagtttcggttatcaagtaactagtttttacgccgcgtctagtcgttacgggacacccgaacaactgaaacggttgatagaccgggcacatgagctcggtttaaccgttctgctcgacttggtccattcacacgccagtaaaaacgtgttggatgggttgaaccagttcgacggtactgactcgtgtttcttccatgcgggggcgcgcggggagcactctttgtgggactcaagactgttcaattaccaggaattcgaagtgatgcggtttttgttgtccaacattcgttggtacatggaggagtacaagttcgatgggtttaggttcgatggggtcacctccatgttgtaccattcgcgggggatcgggcaaggtttcagcgggaattacgaggagtatttcgggttgaacgtcgatactgaaggcttagtctacctgatgttggccaatcacgtggcgcaccatttcaatcctgatggtataaccatagccgaggacgtgtcaggcatgcctgggacttgccgcccaattagcgagggttgcctaggttttgactaccgcctagctatggctgtgcccgataagtggatcaaactgctcaagcactactctgacgacgactggaacgtgggcaatatcgtgcacacgctcactaaccggaggtggatggaacccagcgtggcttacgccgagtcgcacgaccaggccctcgttggcgacaagaccattgccttttggctgatggacaaggagatgtacacccacatgagcaccctctcgccctcgtcccccgtggttgagcgcgggctcgctctgcacaagctaatccggttcataacgcacgcattggggggcgaagcctacctcaatttcatggggaacgagttcggacaccccgaatggctcgacttcccgcgcgctgggaacaacaactcctatcattacgcgcgccggcagtggcagctagtcgacgacgagctcctcaagtacaaatttttgaacaactgggacgccgcgatgaaccacgccgaggagaagtacggctggttgagcgcacccccggcctacgtcagctggaagcacgaggacgataaggtgatagcgttcgaacgcgccggcttgttattcgtcttcaatttccacccaacgaaaagtttcgcggattataaacttggattcgagggcgagggcgagtttcgcatcgccttgtgttcggacgataaggaattcgggggccacagtaggatcgatacgtcgattcataatttcacgaaaccggaaagtttctgcgggaggagaaactcgattcaggtgtatataccttccaggactgttatcatgttggccaaagtctaa

SEQ ID NO: 148653 - protein, 692 aa, Tribolium castaneum
MGGKYSSLDPMEIEVPEIDKLLARDPYLKPFEKEIRRRYGCFKDLLETIDENGCGLDSFTQGYKYYGLHVQPDNTIVAREWAPGAVQLFLTGDFNGWNRDSHRYKKLEFGKWELVIPPKPDGSCAIPHLSEVKVVVETQSGTKEDRLSPYATYVVEPPKDQGTIYKQKFWNPPNSEKYEFRHSRPAKPKGLRIYECHVGIATSELKVGSYDNFTDNILPRIVKQGYNTIQLMAIMEHAYYASFGYQVTSFYAASSRYGTPEQLKRLIDRAHELGLTVLLDLVHSHASKNVLDGLNQFDGTDSCFFHAGARGEHSLWDSRLFNYQEFEVMRFLLSNIRWYMEEYKFDGFRFDGVTSMLYHSRGIGQGFSGNYEEYFGLNVDTEGLVYLMLANHVAHHFNPDGITIAEDVSGMPGTCRPISEGCLGFDYRLAMAVPDKWIKLLKHYSDDDWNVGNIVHTLTNRRWMEPSVAYAESHDQALVGDKTIAFWLMDKEMYTHMSTLSPSSPVVERGLALHKLIRFITHALGGEAYLNFMGNEFGHPEWLDFPRAGNNNSYHYARRQWQLVDDELLKYKFLNNWDAAMNHAEEKYGWLSAPPAYVSWKHEDDKVIAFERAGLLFVFNFHPTKSFADYKLGFEGEGEFRIALCSDDKEFGGHSRIDTSIHNFTKPESFCGRRNSIQVYIPSRTVIMLAKV

SEQ ID NO: 148654 - DNA, 2265 bp, Prochlorococcus marinus str. AS9601
  CDS (1)..(2265): transl_table=11
atgatcgagacaattcaagcagactggattaaatcagaagctatcaacctagaaaattgttgcaatgataatccattaaaaatattaggtcctcatttttatgaagaacaatgggtaattagggtatggatgcctgaagccgacgaagttaaaataaattttaaaaacaatacctataaggcggaaagcataaaccataaatggctttttgaagctatattgcctgaaaatccaaatcacaattacgaaataaatattttacgaggaggggtcacacatacacaacatgacccttggtcatatagagaagaatggatgggagaagttgatagacatctttttgcagaaggtaatcatcatcatatttgggaaaaaatgggagcacatctcattgaagaaaagaatcaaaaaggggttatgttttgcatttgggctccaaatgcaaaatcaatttcgataattggagatataaattcttgggatggaagacatcatccaatgcaaaaaagattagggggaatttgggaactattcatgccatcaatgcaagagggcgatacatacaaatacgaaataagaacacaacaaggtcatatctatgagaaagctgatccatatggtttccttcatgaaatcagacctcaaaatggttcaatagtttcaaagttaaaaaactttaattggaatgatagttcttggatttcaaacagagattcttctagtcaaattaacaagccaatttcagtttatgaaatgcatttagggagttggctccatgaatcaacagataataaatatctggagaacaatggtgatccaagagacccggtacctgcagccgatttaaaacctggaacacgattattaacttatccagaattaaccaagaaactaatcccttacgtaaaagaaagaggatttactcatattgaactaatgccaatatctgaacatcctttcgatggttcatggggataccaagttacaggctggtatgcaccaacgagtagatttggtaccccaaatgaatttagagagtttgtaaataaatgtcatgaagagggcataggcgtaattcttgattgggtgcccggtcattttccaaaagataaacatggtttagcattttttgatggctgccatctttatgagcatggagattcacgaataggagaacacaaagaatgggggaccctaatatttaattacagcagaaacgaagtaaggaatttcttagtagcaaatctcgtttattggtttgaagagtttcatattgatggcataagagtagatgctgtagcttccatgctttacagagattatctacgtcctgatggagaatggatacccaatgaaaatggtgggaatgaaaatatagaagccgttaaatttcttcaacaggctaatcatgtactcttccaacacttcccaggtgcactttctatcgctgaagaatcaacaacttggccaatggtaaccaaaccaactgacatgggagggttagggtttaacttgaaatggaatatgggatggatgcacgatatgcttgattattttgaaatagatccttggtttaggcaattccatcaaaatagtgtgactttctcaattacatataactatacagagaactttatgcttgcacttagtcatgatgaggtcgtccatgggaaaagtcatcttttgcataaaatgcctggcgatgactggaagaaatatgcaaatactcgagcgttactaacttatatgtggacccaccctggtaaaaaaacaatatttatgggaatggaatttgggcaaagacaagaatggaatgtttgggatgatctgcaatgggagttactagaatttgaaccccataaaggtatcagaaacttgattgatgacctaaacgttctttataaaaatgaacctgcattatggaaaaatgactttgatccttatggattccaatggatagattgtaatgacaaatctaattcggttataagtttcatgagaagagaaaacgatactaatgagtggcttgttgttgttgctaactttacacctaatactcatgagtcatacaaagtaggtgttcctatggaaggattctatagagaaatatttaattcagatggctctagatacgggggcagtaacaaaggaaatttggggggtaaagaaactataaattacaatattcatgattatcaaaatgctctagaacttgctttgcccccattaagcgtgagtatattcaaacatcaatcaaaaaaataa

SEQ ID NO: 148655 - protein, 754 aa, Prochlorococcus marinus str. AS9601
MIETIQADWIKSEAINLENCCNDNPLKILGPHFYEEQWVIRVWMPEADEVKINFKNNTYKAESINHKWLFEAILPENPNHNYEINILRGGVTHTQHDPWSYREEWMGEVDRHLFAEGNHHHIWEKMGAHLIEEKNQKGVMFCIWAPNAKSISIIGDINSWDGRHHPMQKRLGGIWELFMPSMQEGDTYKYEIRTQQGHIYEKADPYGFLHEIRPQNGSIVSKLKNFNWNDSSWISNRDSSSQINKPISVYEMHLGSWLHESTDNKYLENNGDPRDPVPAADLKPGTRLLTYPELTKKLIPYVKERGFTHIELMPISEHPFDGSWGYQVTGWYAPTSRFGTPNEFREFVNKCHEEGIGVILDWVPGHFPKDKHGLAFFDGCHLYEHGDSRIGEHKEWGTLIFNYSRNEVRNFLVANLVYWFEEFHIDGIRVDAVASMLYRDYLRPDGEWIPNENGGNENIEAVKFLQQANHVLFQHFPGALSIAEESTTWPMVTKPTDMGGLGFNLKWNMGWMHDMLDYFEIDPWFRQFHQNSVTFSITYNYTENFMLALSHDEVVHGKSHLLHKMPGDDWKKYANTRALLTYMWTHPGKKTIFMGMEFGQRQEWNVWDDLQWELLEFEPHKGIRNLIDDLNVLYKNEPALWKNDFDPYGFQWIDCNDKSNSVISFMRRENDTNEWLVVVANFTPNTHESYKVGVPMEGFYREIFNSDGSRYGGSNKGNLGGKETINYNIHDYQNALELALPPLSVSIFKHQSKK

SEQ ID NO: 148656 - DNA, 2265 bp, Prochlorococcus marinus str. MIT 9515
  CDS (1)..(2265): transl_table=11
atgaaagaaactattcaaacagactggattaaatcagaagctttcaacctcgaaaattgttgcaatgataatccattaaatattttaggtccccatttcttcaaagggaagtgggttacaagagtatggatgccagaggcagatgaagtaaatattacttttaaggataaaacctataaaacaactactcccaatcataaatggatgtttgaggcaattcttcatgaagacccaaaaaataattatcaaataaatgtattgagaggaggagtttctcattcacaacaagacccatgggcttttaaggatgaatggatgggggaggtcgataggcacctttttgcagagggtaatcaccatcatatttggaagaaaatgggtgcccatatcagtgaagatataaatcaaaaaggtgtaatgttctgtatttgggcaccaaatgcaaaatcaatctcaataatcggagatataaattcttgggacggtagacatcatcctatgcaaaaaaggctgggtggagtttgggaattatttatgccaatattgaaggaaggagatgtttataaatatgaaataagaactcaacaagggcatatttatgaaaaagcagacccatatggttttcttcatgaagtaaggccccaaaatggctcaataatatctaaactcaacaacttcaattgggaagatagttcttggatcactagtagagattcatcaagtcaaattaacaaacctatttcagtttatgagatgcatcttggaagttggatgcatgattcaaccgataataagtatattgaaaaaaatggcaacccaagacatccagtacccgcagcagatttaaagcctgggacaaggtttttaacttatcctgaattaaccgaaaagcttatcccatatgtgaaagaaagaggatttactcatatcgaattaatgcctatttcagaacatccttttgatggttcatggggatatcaagttacaggttggtatgccccaacaagtagatatggaactccaaatgaatttaaagagtttataaataaatgccatgcagagggcataggtgtcattctagactgggttcctggccatttcccaaaagataaacatggtttagctttctttgatggttgtcatctttatgagcatggtgatcctcgtattggagaacataaagaatggggaactttaatttttaactacagtagaaatgaagtaaggaattttttagtagcaaatcttatttattggtttgaagaatttcatattgatggaataagagtagatgctgtagcttcaatgttatacagagattatttacgtccagaaggagaatggattccaaatgaaaatggtggaaatgaaaatttagaagctgttaaatttcttcagcaagcaaatcatgtcctttttcaacatttcccgggagcactatctattgctgaagaatccactacttggccaatggttacagagccaacaaatgtaggaggtttaggtttcaatttaaagtggaatatggggtggatgcacgatatgctcgattattttgaaatagacccttggtttagacaatttcatcaaaatagcgtgaccttttcgataacttataactataccgaaaattttatgcttgctcttagccatgatgaggttgttcatgggaaaagtcaccttctacataaaatgccaggagatgattggaaaaaatttgcgaatacaagagctttattaacttatatgtggacacatcctggtaaaaagacaatttttatgggaatggaatttggacaaaggcaagaatggaatgtttgggatgatcttcaatgggaacttctagaatatgaaccccacaaaggtattagaaaccttattgatgacttaaataaactttataaaaatgagccatctttatggaaaaatgactttgatccttatggatttcaatggatagattgcgatgacacctctaattcagttattagttttatgagaagggaaaatgaaagtaatgaatggcttgtggttatagcaaactttacccctaattttcacgaatcatataagataggtgttccattagaaggatactataaggagatttttaattcagatggatctaaatatggaggaagtaacaaagggaatatgggaggtaaggacaccctaaaatataatattcacaattatgaaaatgctcttgaaattgctctcccaccactaagtgtaagtatctttaagcatcagctaaagaaataa

SEQ ID NO: 148657 - protein, 754 aa, Prochlorococcus marinus str. MIT 9515
MKETIQTDWIKSEAFNLENCCNDNPLNILGPHFFKGKWVTRVWMPEADEVNITFKDKTYKTTTPNHKWMFEAILHEDPKNNYQINVLRGGVSHSQQDPWAFKDEWMGEVDRHLFAEGNHHHIWKKMGAHISEDINQKGVMFCIWAPNAKSISIIGDINSWDGRHHPMQKRLGGVWELFMPILKEGDVYKYEIRTQQGHIYEKADPYGFLHEVRPQNGSIISKLNNFNWEDSSWITSRDSSSQINKPISVYEMHLGSWMHDSTDNKYIEKNGNPRHPVPAADLKPGTRFLTYPELTEKLIPYVKERGFTHIELMPISEHPFDGSWGYQVTGWYAPTSRYGTPNEFKEFINKCHAEGIGVILDWVPGHFPKDKHGLAFFDGCHLYEHGDPRIGEHKEWGTLIFNYSRNEVRNFLVANLIYWFEEFHIDGIRVDAVASMLYRDYLRPEGEWIPNENGGNENLEAVKFLQQANHVLFQHFPGALSIAEESTTWPMVTEPTNVGGLGFNLKWNMGWMHDMLDYFEIDPWFRQFHQNSVTFSITYNYTENFMLALSHDEVVHGKSHLLHKMPGDDWKKFANTRALLTYMWTHPGKKTIFMGMEFGQRQEWNVWDDLQWELLEYEPHKGIRNLIDDLNKLYKNEPSLWKNDFDPYGFQWIDCDDTSNSVISFMRRENESNEWLVVIANFTPNFHESYKIGVPLEGYYKEIFNSDGSKYGGSNKGNMGGKDTLKYNIHNYENALEIALPPLSVSIFKHQLKK

SEQ ID NO: 148658 - DNA, 2268 bp, Prochlorococcus marinus str. NATL1A
  CDS (1)..(2268): transl_table=11
atgaccgtctctatcctactagattctttgaaagacgacggacaaagactttctgaatgcagacatgaaagtccattttcaattcttggtcctcaaccatttaaagataaatggataattcgaatatggatgcctgaggcaagtgaagttgaactgataacacaacaaactaaaattaagctacaaaatcccaatcatgaatggatatttgagggggttttagaaaaagatccaggtaatgactatcaaataaaagtaaatagaggaggaattgaacatgttcaacatgatccttggagtttccgaaaagagtggatgggtgaaattgatagacatcttttcgcggagggaaatcaccatcacatatggcgaaaaatgggtgctcacctcactgaaataaataaaaagcaaggcgttatgttttgcttatgggcgcctcatgcaaagagtgtttccgttattggtgatctcaattcatgggatggacgccatcacccaatgcaaaaacgtctaggaggaatttgggaactattcatacctggtctaagtgagggagatttatacaaatatgaaatcaggactgaaaaaggacattgctacgagaaagccgacccttatggttttcaacatgaagtaagaccagcaaaaagctcagtaatatcaaaaatcgactcatttcaatggaatgatcagtcttggatatccaatcgtgacaatagagatcctttagagcaaccaatttcggtttatgaaatgcatttaggaagctggatgcatgcttcctcggacgatccatttatcaactcaaacggagagcatagagcccctgttccagctgcagatatgaagcctggctcaagattgcttacatataaagaactggcaaataaagtcattccctatgtcaaagaaagaggctttactcatatcgagcttatgccaatttcagagcacccttttgatgggtcatgggggtatcaagttacaggttggtatgcgcctacaagtagatttggatcaccagatgagtttcgtgccttcgttgattcatgtcataaagaaggaataggaatcattctcgattgggtcccaggccacttccctaaagatcagcatggactagcttattttgatggcagccatctatacgagcattcagatcccagagttggagagcataaagaatggggaacattaattttcaattacagtcgaaatgaagttcgtaattttctagttgcaaatctaattttctggtttgatcaatttcatatagatggcatacgtgttgatgcagttgcctcaatgctttacaaagactatcttcgtccagagggtgaatggatacctaatgaagatggagggaatgaaaattttgaagcagtcagatttctacaacaggctaatcacgttctttttcaacattttccaggtgcactttctattgcagaagaatcaacgacatggagtggtgtaaccaaaccaactgacatggatggactcggtttcaatctgaaatggaacatgggttggatgcacgatatgctcgattattttgaaattgacccatggtttagacaattcaatcaaaacaacattactttctccatttgttataactttaccgaaaactttatgcttgctttaagccacgatgaagttgttcacgggaaaagtcatctcttacacaaaatgccaggcgatgactggcagaagtacgctaatacacgagccttacttgcctatatgtggacacatccaggtaaaaaaacaatatttatgggaatggaatttgggcagcgccaagaatggaatgtttgggatgatttgcaatgggatcttctaaattatgaacctcataaaggaatacagaaattagtagatgatttgaataatttatataaaagagaacctgctttgtggagaaatgattttgacgaatacggattccagtggattgattgcgatgataataaaaattcagtaatcagtttcatgagaagagaaaaaactgatggagaatggctagtaatagtggcaaacttcacgcctcaaaaccactctaattacagaataggtgtgcctgttgacggattctatgaagaaattttcaatacagatgcgagtcaatatggaggttcaaacctaggtaatatgggagggaaatcaacagatctatacaacatacatggctatgaaaattctatagatctttgccttcctcctcttagcgttctggttctaaagcataaatccaagaagaattaa

SEQ ID NO: 148659 - protein, 755 aa, Prochlorococcus marinus str. NATL1A
MTVSILLDSLKDDGQRLSECRHESPFSILGPQPFKDKWIIRIWMPEASEVELITQQTKIKLQNPNHEWIFEGVLEKDPGNDYQIKVNRGGIEHVQHDPWSFRKEWMGEIDRHLFAEGNHHHIWRKMGAHLTEINKKQGVMFCLWAPHAKSVSVIGDLNSWDGRHHPMQKRLGGIWELFIPGLSEGDLYKYEIRTEKGHCYEKADPYGFQHEVRPAKSSVISKIDSFQWNDQSWISNRDNRDPLEQPISVYEMHLGSWMHASSDDPFINSNGEHRAPVPAADMKPGSRLLTYKELANKVIPYVKERGFTHIELMPISEHPFDGSWGYQVTGWYAPTSRFGSPDEFRAFVDSCHKEGIGIILDWVPGHFPKDQHGLAYFDGSHLYEHSDPRVGEHKEWGTLIFNYSRNEVRNFLVANLIFWFDQFHIDGIRVDAVASMLYKDYLRPEGEWIPNEDGGNENFEAVRFLQQANHVLFQHFPGALSIAEESTTWSGVTKPTDMDGLGFNLKWNMGWMHDMLDYFEIDPWFRQFNQNNITFSICYNFTENFMLALSHDEVVHGKSHLLHKMPGDDWQKYANTRALLAYMWTHPGKKTIFMGMEFGQRQEWNVWDDLQWDLLNYEPHKGIQKLVDDLNNLYKREPALWRNDFDEYGFQWIDCDDNKNSVISFMRREKTDGEWLVIVANFTPQNHSNYRIGVPVDGFYEEIFNTDASQYGGSNLGNMGGKSTDLYNIHGYENSIDLCLPPLSVLVLKHKSKKN

SEQ ID NO: 148660 - DNA, 2013 bp, Bacteroides fragilis NCTC 9343
  CDS (1)..(2013): transl_table=11
atggaaaagactcttaatcttattaaaaatgatccttggctggaaccttacaaagacgctatcgttggacgttttgaacatgccatggataagaaggccgaattgaccaatgggggaaaatctacgttatcggacttcgcttccggatatctttatttcggtttgcatcgcactgataaaggatggatattccgtgagtgggcaccgaatgcatcacatatttatatggtgggtacattcagtaattgggaagaaaagcctgcttataaactaaaacgcctgaaaaatggtagttgggaaatcaaattaccgatcgacactatacaacatggtgacttatataaattacacgtctactgggaaggcggacagggagaacgaatccctgcttgggccaatcgggtagtacaagatgacaatacaaaaatattcagtgcccaggtatgggcaccggaaaagccatttaaatttaaaaagaaaacttttaagcctagtacagatccactgttaatctatgaatgtcatatcggtatggcacagcaggaagaaaaagtcggaacttataatgagtttcgtgaaaaaattctgccgcgtattgccaaagagggatacaattgtattcagattatggctatacaggagcacccatattatggtagttttggctatcatgtatcgagtttttttgctgcatcgtctcgttttggaactccagaagaacttaagcagttgattgataccgcacacggattgggtattgctgtcattatggatatcgttcactcacatgcagtaaagaatgaagtagaagggttaggaaactttgcaggtgatccaaatcaatatttctatccaggcggacgaagagaacatccggcatgggattcactttgttttgactatggtaaaaatgaagtgatgcattttttactttccaattgtaaatattggttggaagaatatcattttgatggcttccgttttgacggggtgacatccatgctttattatagccacggattgggagaagcattttgcaattacggcgactactttaatggacatcaagatgataatgccatctgctatctgacattggcaaacgaattgattcatgaagtaaatcctaaggctattaccattgcagaagaggtttcgggtatgccaggacttgccgccaaggtggaagatggaggatatggatttgattatcgtatggctatgaatatccccgattattggatcaagacaattaaagagaagatagatgaagattggaaaccatccagcatgttttgggaagtaactaaccgtcggcaagacgaaaaaacaatttcgtacgctgaaagtcatgatcaggcattggtaggagataaaacgattattttccgcctgattgatgcagatatgtattggcatatgcagaaaggtgatgaaaattatatagttcatcggggcgttgctcttcacaaaatgattcgtttactaactgcaagcaccattaacggtggatatctgaactttatgggaaatgaattcggacatccggaatggatcgattttccgagggaaggtaatggatggtcatgtaagtatgctcgccgccaatgggatttagtcgataataaaaacttgacttatcattatctgggtgattttgatgcagatatgttgaaagtaattaagagcgtaaaaaacatccagcaaacccctgtacaagaaatatggcacaacgatggcgaccaagtgttagcgtaccaacgtaaagatcttgtttttgtattcaattttaatccgagtcaatcattcaccgattatggctttttagtaacaccgggaacttatgaggtggtactgaatacagataacataatttatggaggaaatggcttgtcagatgatagtgtgaagcatttcacattgcccgatcctttgtataagaaagaaaagaaagaatggttgaaactctatattcctgcacgtacagcaatggtattgagaagaaccaaataa

SEQ ID NO: 148661 - protein, 670 aa, Bacteroides fragilis NCTC 9343
MEKTLNLIKNDPWLEPYKDAIVGRFEHAMDKKAELTNGGKSTLSDFASGYLYFGLHRTDKGWIFREWAPNASHIYMVGTFSNWEEKPAYKLKRLKNGSWEIKLPIDTIQHGDLYKLHVYWEGGQGERIPAWANRVVQDDNTKIFSAQVWAPEKPFKFKKKTFKPSTDPLLIYECHIGMAQQEEKVGTYNEFREKILPRIAKEGYNCIQIMAIQEHPYYGSFGYHVSSFFAASSRFGTPEELKQLIDTAHGLGIAVIMDIVHSHAVKNEVEGLGNFAGDPNQYFYPGGRREHPAWDSLCFDYGKNEVMHFLLSNCKYWLEEYHFDGFRFDGVTSMLYYSHGLGEAFCNYGDYFNGHQDDNAICYLTLANELIHEVNPKAITIAEEVSGMPGLAAKVEDGGYGFDYRMAMNIPDYWIKTIKEKIDEDWKPSSMFWEVTNRRQDEKTISYAESHDQALVGDKTIIFRLIDADMYWHMQKGDENYIVHRGVALHKMIRLLTASTINGGYLNFMGNEFGHPEWIDFPREGNGWSCKYARRQWDLVDNKNLTYHYLGDFDADMLKVIKSVKNIQQTPVQEIWHNDGDQVLAYQRKDLVFVFNFNPSQSFTDYGFLVTPGTYEVVLNTDNIIYGGNGLSDDSVKHFTLPDPLYKKEKKEWLKLYIPARTAMVLRRTK

SEQ ID NO: 148662 - DNA, 1989 bp, Syntrophus aciditrophicus SB
  CDS (1)..(1989): transl_table=11
atgaaagacccctatttgtacccttatctttccgtaatccggcgccgtcttgaaaaagtccgcgacagggaacagcgtcttaccgaaggccgcatggaactggtagatttcgcgtccggacatgaatatttcggtcttcaccgtgaaggcgccgagtgggtctttcgcgaatgggcccccaatgccacatcgatttccctgatcggtgattttacagactggcgcgaagaaaaagactattcactccatagaacaggggaaagcggaaactgggaagtacgcattcctgccgacaaactgaaatcaggacagctttacaaactcctgatgcgctggccgggcggcagcggcgagcgcatccctgcctatgtccggcgcacggtccaggatccgcacacgcacctcttcgccgcgcaggtatggaaacctgagcagccttacgcgtggcacagtccctttttccgccgtccaccggaatcgccccggatctacgaggcccatatcggcatggctcaggaggaagaaagagtcggcgcctatgatgaattccggaaaaatatcctgccccgtgtcatcgatgctggatacaataccctccagctcatggccattcaggagcatccctattacggttccctgggctatcatgtgtccagttttttcgcagcctcatcccgattcggcacaccggaagaattgaaggaacttatcgatgccgctcatgaggccggcctcgccgtcattatggatctcgttcattcccatgccgcccgaaatgaacaggaaggaatcagccgattcgacggaaccctctatcagtatttccatgaaggccccaggggagaccacattgcctgggattcccgctgctttgattacggcaagccggaagtccttcattttctcctctcgaactgccgcttctggctggatgagtatcatttcgacggattccgctttgacggcgtgaccagcatgctctacctggaccatggactgggaaaggcctttacggaatacgccgattatttcggggacaacgtggatgaagatgccctgacctatcttgccctggccaacaaagtcattcacactctgcggcctgatgccattactattgcggaagatgtcagcggcatgccgggccttgccgcatctcgcgaggagggcggttttggtttcgattaccggcttgccatgggcgtaccggattactggatcaagctcttaaaagaaaccccggacgagcaatggcctataggtcatctgtattacgaactgaccaaccggagggcggacgagaaaacgatcggttacgcggaatcccacgaccaggctattgtgggagacaaaacactgatcttccgcctcatcgatgcggaaatgtacactcacatgaacgttttcgaatccaatcttcgggtggaccggggaatcgcccttcacaaaatgatccgtctgattaccctggccaccgcaggcaacggctacctgaatttcatgggcaacgagttcggccatcccgaatggatcgatttcccccgcgaaggaaataactggtcatacaaatatgcccgccgccagtggcgcctccgggacgacaccaacctgcgttaccgttttctggcggcatttgacaaggccatgatgcatcttgcagcggaatacagtctgcttgacgcctctggaccatacctgatcctggaaaatcaggccaacctgcttctgggtttccagcgggccggtctggttttcctgttctgcttccacccccatcaatccctggcccactatccggtggatctgcaacccggggaatatcacctgattctggacagcgatgccgttgaattcggcggtcacgggcgcctgcatcccggccaggtttacttcacgaaaccggagccccttccggacggcaacatacggcacacggcgactctctatctaccgacccgctcagccctggtcctgcgtcggaaggaataa

SEQ ID NO: 148663 - protein, 662 aa, Syntrophus aciditrophicus SB
MKDPYLYPYLSVIRRRLEKVRDREQRLTEGRMELVDFASGHEYFGLHREGAEWVFREWAPNATSISLIGDFTDWREEKDYSLHRTGESGNWEVRIPADKLKSGQLYKLLMRWPGGSGERIPAYVRRTVQDPHTHLFAAQVWKPEQPYAWHSPFFRRPPESPRIYEAHIGMAQEEERVGAYDEFRKNILPRVIDAGYNTLQLMAIQEHPYYGSLGYHVSSFFAASSRFGTPEELKELIDAAHEAGLAVIMDLVHSHAARNEQEGISRFDGTLYQYFHEGPRGDHIAWDSRCFDYGKPEVLHFLLSNCRFWLDEYHFDGFRFDGVTSMLYLDHGLGKAFTEYADYFGDNVDEDALTYLALANKVIHTLRPDAITIAEDVSGMPGLAASREEGGFGFDYRLAMGVPDYWIKLLKETPDEQWPIGHLYYELTNRRADEKTIGYAESHDQAIVGDKTLIFRLIDAEMYTHMNVFESNLRVDRGIALHKMIRLITLATAGNGYLNFMGNEFGHPEWIDFPREGNNWSYKYARRQWRLRDDTNLRYRFLAAFDKAMMHLAAEYSLLDASGPYLILENQANLLLGFQRAGLVFLFCFHPHQSLAHYPVDLQPGEYHLILDSDAVEFGGHGRLHPGQVYFTKPEPLPDGNIRHTATLYLPTRSALVLRRKE

SEQ ID NO: 148664 - DNA, 2019 bp, Cytophaga hutchinsonii ATCC 33406
  CDS (1)..(2019): transl_table=11
atgaaagagaaaaaaggaatcgccctaattgaagacgacccatggctggagccctatgaagctgaaattcaagatcgcattatccggtataaacgcgcagtaaaagaaattaaagaacattacggagacctgttgacatttgccacaggacataaatactatggcataaatttcgatgaggacgagcgcggctggtattacagagaatgggctcctgaagcctatgaagtataccttacaggtgacttcaacgattgggacagacgttcacatccgttgacacgcaatgaatttggtgtgtggcagatcttccttccatacgatctgtatcaaaaacgttttgttcataaaagtaaaattaaagtacagattgtaggtgccaatggcacacacgaccgtattccggcatacataacccgcgttgtacaggatactgaaacaacagacttctccggacagctttggttcccgcaaaaaccttttgaatggacagaccgcgatttcaatttgcgcaagatcaaaaatccgattatctacgaagcacacgtagggatggcgcaggagaaagaaggtgttggtacgtacagagaatttgcggataagattgttccccgcatccgtcagatgggctataacagcattcagctgatggctgttatggaacacccgtattatggttcatttggttatcacgtttccaatttctttgctccttcttcccgcttcggcacgcctgaagatctgaaatacctggtagatcgtgcacataaattcggactggcagtaatcatggacgttgtgcattcacatgccgtaaaaaatctgtctgaaggcctgaatgaatttgatggcagcgatcatcaatacttccatccgggcgacagagggtatcatacgggctgggattctaaactatttgattacggcaagcttgaagtaaaacgctttctgctatcaaacctacgttactggctggaagaatatcactttgatggtttccgctttgatggtgttacttcgatgctgtattttgatcacggcatgaaaacatttgacagctacgacacctattttaaaggcggtgtggattttgatgccgttacgtatttacaattagccaacgaggtaacccataggtatttaaaagattccattacgattgctgaagatgtaagcggtatgccgggcttatcacgctccatacgagatggcggtgttggtttcgattaccgtttggcaatgggtatacctgatttctggatcaagtatttaaaacatttgcaggatgagcaatggaacatctatgaaatgtggagcacgttaacgaatcgacgctacaaagaaaaaacaattgcctatgcagagtcgcatgaccaggcaatggttggcgacaaaaccattgccttctggttaatggacaaggaaatgtatttccacatgcaggtagatgatcccaatccggtgattgaccgcggcattgcgatacataagctgctgcgtttatttacgtttgccctgggcggcgaagggtatttaaactttatgggcaatgaattcgggcatccggaatggattgattttccaagggaaggaaacggctggagttaccaatacgcccgccgccagtggtcgctggtagataatcctaaattgaaatatcaatacttaggagcatttgatgaagcgatgatgcgtctggtacgtaaaacacgattgcttgcagcagaacctgcacagcaattgaatatggacgaccacaacaaagtgattatcttcgaacgcaataatatgatctttgtattcaatttcagtgtaagcaattcggtatttgattataaattcaaatcattcgcaccgggtacatttgagatcgtattaaatagcgacgacacacgtttcggcggtcacggccgtgtagatgacacacttgaataccataccaacacagaaggtcagttgagcatctatacgccaaacagaagtgtgctggtttttcaacggaaagaagcatcagaataa

SEQ ID NO: 148665 - protein, 672 aa, Cytophaga hutchinsonii ATCC 33406
MKEKKGIALIEDDPWLEPYEAEIQDRIIRYKRAVKEIKEHYGDLLTFATGHKYYGINFDEDERGWYYREWAPEAYEVYLTGDFNDWDRRSHPLTRNEFGVWQIFLPYDLYQKRFVHKSKIKVQIVGANGTHDRIPAYITRVVQDTETTDFSGQLWFPQKPFEWTDRDFNLRKIKNPIIYEAHVGMAQEKEGVGTYREFADKIVPRIRQMGYNSIQLMAVMEHPYYGSFGYHVSNFFAPSSRFGTPEDLKYLVDRAHKFGLAVIMDVVHSHAVKNLSEGLNEFDGSDHQYFHPGDRGYHTGWDSKLFDYGKLEVKRFLLSNLRYWLEEYHFDGFRFDGVTSMLYFDHGMKTFDSYDTYFKGGVDFDAVTYLQLANEVTHRYLKDSITIAEDVSGMPGLSRSIRDGGVGFDYRLAMGIPDFWIKYLKHLQDEQWNIYEMWSTLTNRRYKEKTIAYAESHDQAMVGDKTIAFWLMDKEMYFHMQVDDPNPVIDRGIAIHKLLRLFTFALGGEGYLNFMGNEFGHPEWIDFPREGNGWSYQYARRQWSLVDNPKLKYQYLGAFDEAMMRLVRKTRLLAAEPAQQLNMDDHNKVIIFERNNMIFVFNFSVSNSVFDYKFKSFAPGTFEIVLNSDDTRFGGHGRVDDTLEYHTNTEGQLSIYTPNRSVLVFQRKEASE

SEQ ID NO: 148666 - DNA, 2292 bp, Nostoc punctiforme PCC 73102
  CDS (1)..(2292): transl_table=11
atgtccatgaccacgatcgcccctgaacaggttaatagcatcgtttggaatcagcataacgatccctttgaaatactaggttctcatcccatagaacaagacggcaaaaccgtctgggctgtgcgggcctatctaccaaatgcaagtgcagtatgggtcgttcttcctgaacaacggaaagaatacccaatgcaaacagtgcatcatcctcacttttttgaatgcactattgaaaccgcagaactggcaaactaccagttacgaattaaagaaggggaacatgagcgtgttacttatgacccttacgccttccgttctcccaatttgacagactttgatttgcatttgtttagtgaaggcaaccatcaccgaatatatgaaaaactgggagcgcaccccacggaaataggcggcgttaagggcgtttattttgcagtttgggcacccaacgcccggaatgtttcattgttaggagatttcaacctttgggatgggcgcaaacaccaaatgcgtaaagggccaactggggtttgggaattgtttattcctgaaatcggtatgggagaacattacaaatatgaaatcaaaaattttgaaggacacatttacgaaaaatccgatccctacggtttccagcaagaaccccgcccgaaaacggcatccattgtcactgatttagatgcttacacctggaatgacgaaagctggatggaaaagcggcgacacactgacccccttacccagcctgtctcagtttatgaagtgcatctaggctcttggttacacgcttcgagtgccgaacctgctaaactgccaaatggtgaaactgaaccggtagttgttgtttcagaacttaagccgggcgcacgtttccttacctaccgggaactagctgaccgactcattccttatgtcaaagaattgggatacacccatatagaaatgctgcccattgcggagcatccctttgatggttcttggggttatcaagtaactgggtactatgctcccacctcccgttttggcagtcccgaagatttcatgtattttgttgacaaatgtcaccaaaatgatataggggtaattgtggattgggttcctggtcacttccccaaagatggacatggtttagctttctttgatggtagccacctgtacgaacatgctgacccccgcaagggcgaacacaaaggatggggtactttggtgttcaactacggtcgccatgaagtcagtaatttcttagcagcaaatgccctcttttggttcgacaagtatcacattgatgggattcgtgtcgatgctgttgcctcaatgctttataacgattattgccgcgaaccaggagaatggttgcccaaccagtacggcggcagagaaaacctagaagcagcagattttctgcgtcaggtaaatcacattatctttagttatttccccggtattctctccattgctgaagaatctacttcttggccaatggtatcttggccaacctatacaggcgggctgggctttaacttgaagtggaatatgggctggatgcacgatatgctggattacttcagcatggacccttggttccgccagttccaccaaaacaatatcacctttagtatgtggtacaaccacagcgagaactttatgctggctctgtcccacgatgaagtggtgcatggtaagagcaatatcatcggcaaaatgccgggggatacatggcagaagttagctaatatccgttgtttatttacctatatgtttgctcacccaggcaagaaaactatgtttatgagcatggagtttgggcagtggagtgagtggaatgcttgggctgatttggagtggcatttattgcagcatgaaccacaccaacagttaaaaacctttttccagggtttgaaccatctctaccgttctgaaccagttttgtacacccaggattttgctgaacctgggtttgaatggattgactgtagcgataaccgccatagtgtagtttcattcatccgtcgtgataaggattctgatgattttgcgatcgtagtttgcaattttacaccgcaaccccattctcactaccgcatcggtgtaccgcagaagggattttacactgagttattcaatagtgatgcacgtcaatatggcggtagcaatatgggtaacttaggcggtaagtggactgatgattggtctttgcacagtcgtccctattcgctagatttgtgtttgccacctttgggtgtgttgattctcaagttggataagaagaagactgctgaggtaattggataa

SEQ ID NO: 148667 - protein, 763 aa, Nostoc punctiforme PCC 73102
MSMTTIAPEQVNSIVWNQHNDPFEILGSHPIEQDGKTVWAVRAYLPNASAVWVVLPEQRKEYPMQTVHHPHFFECTIETAELANYQLRIKEGEHERVTYDPYAFRSPNLTDFDLHLFSEGNHHRIYEKLGAHPTEIGGVKGVYFAVWAPNARNVSLLGDFNLWDGRKHQMRKGPTGVWELFIPEIGMGEHYKYEIKNFEGHIYEKSDPYGFQQEPRPKTASIVTDLDAYTWNDESWMEKRRHTDPLTQPVSVYEVHLGSWLHASSAEPAKLPNGETEPVVVVSELKPGARFLTYRELADRLIPYVKELGYTHIEMLPIAEHPFDGSWGYQVTGYYAPTSRFGSPEDFMYFVDKCHQNDIGVIVDWVPGHFPKDGHGLAFFDGSHLYEHADPRKGEHKGWGTLVFNYGRHEVSNFLAANALFWFDKYHIDGIRVDAVASMLYNDYCREPGEWLPNQYGGRENLEAADFLRQVNHIIFSYFPGILSIAEESTSWPMVSWPTYTGGLGFNLKWNMGWMHDMLDYFSMDPWFRQFHQNNITFSMWYNHSENFMLALSHDEVVHGKSNIIGKMPGDTWQKLANIRCLFTYMFAHPGKKTMFMSMEFGQWSEWNAWADLEWHLLQHEPHQQLKTFFQGLNHLYRSEPVLYTQDFAEPGFEWIDCSDNRHSVVSFIRRDKDSDDFAIVVCNFTPQPHSHYRIGVPQKGFYTELFNSDARQYGGSNMGNLGGKWTDDWSLHSRPYSLDLCLPPLGVLILKLDKKKTAEVIG

SEQ ID NO: 148668 - DNA, 2334 bp, Actinobacillus pleuropneumoniae serovar 1 str. 4074
  CDS (1)..(2334): transl_table=11
atgaaaacatatacgtattctaaacaagatttatcttttattgagcaactttctcaagcgtattgtaaagatcctttctcttatctcggcttacatcaagcgggtgatgtgagcgtaattcgtgtttttctaccggaagcaacgacggttaaaattctgagtgcagtcggtcaaatactttccgaagctttgaaaatagacgactcaggcttgtttgtagcgcaattggcgcagcagtattcttccttaaattatcgtttaagagtcggttattctttagcggaaatcgaccttgaagatccctatcgttttacttcttcgcttctaccgatggataactggttattggcggaaggaactcaccttcgtccatacgaaatcttaggtgcgcatttgaaaacgcaagaaggcgtttccggcgtacatttttccgtttgggcgccgaatgcccgtcgtgtatcggttgtcggcgatttcaactattgggacgggcgagtaaacccgatgcgttttcatgcggaaagcggcatttgggatattttcctacctaatgttgagaaaggtgcattatataaattcgaaattttagatagcaacggtaacattcgtttgaaatccgacccttatgcgttcgcatcgcaattcagaccggatacggcatccgtagtaacgggtttaccggaaaaaatagaagtggatgcgaaactacgtcatgcgaatgatcccgaccagccgatttcaatttatgaagtgcatctcggttcgtggcgtcgtcaccttgaaaataattattggctgaattatgaagaaattgccaacgaattaattccttatgttaaagatatggggttcactcatatcgaattgttaccgattaccgaatatccgttcgacggttcttggggttatcaaccgaccggactttattctccgaccagccgattcggttcgccggaggatttacgtaccttgattcgtaaagcgcatgaagcgggtattaatgtgattcttgactgggtagtcgggcatttcccgaccgattcgcacggtttaaccgagtttgacggctcgcatttatatgaacatcaagatccgcgagaaggttatcatcaagattggaataccttaatttttaattacggtcgtcacgaggtgtttaattatctttccagtaacgccttatattggacggaacgattcggtatcgacggtttacgtgtcgatgcggtttcttccatgatttaccgcgattattctcgtaaagacggcgagtggattccgaatcaatacggcggacgagaaaatttagaagcgcttgatttccttcgtagaaccaatcgtatgttgaaaaaagaaggacacggagcggttgtgattgcggaggaatccacttcatttgccggtattacgcatagtccggaggaaaacggggtcggtttcgactataaatggaatatgggctggatgaacgataccttacgttatatgtcgctcgatccgatttatcgtcaatatcatcacgattggatgaccttcgggatgatgtatcaatatagcgaaaaattcgtattaccgctttcacacgatgaagtggtgcatggcaaatgttccattctcggaaaaatgtccggcgattgttggcaaaaatttgcgaacttaagagcctattacggttatatgtggggctatccgggtaaaaaattactgtttatgggtaatgaattcgcccaaggtcgtgaatggaattacaacgaaagcctcgattggttcctgttaggcgaacaaggcggcggttggcataaaggcgtgctgaattgggtgagagatttgaaccgtacttaccaaaaatatccggcgctttatcaattggattacgatcctgccggttttgaatggttagtagtcgatgactggcaacaatcggtatttgcttttgaacgtaaagccaaaaacggcgagagtgtgatcgtagtcagtaactttacgccggtcgttcgccataattatcgtataggcgtgcgtcaagacggcacttatactgaaatcctcaattcggatgcggcttactatgaaggaagtaacgtaggcaattacggcgagattgaatgcgaagcaatcgaatcgcacggtaaaccgttctctattgaactttcgattccgccgttatcaaccatttttattgcttgtcagcctaagcctaaagaagcggttgaagccgaacaagatattgtgaaaatggcggaagttgcgatgcaaaaagcattaaaacccactaaaaaaacggtaagcgtaaaagctaaagcacataaaaaagctcataaaaataagaagtaa

SEQ ID NO: 148669 - protein, 777 aa, Actinobacillus pleuropneumoniae serovar 1 str. 4074
MKTYTYSKQDLSFIEQLSQAYCKDPFSYLGLHQAGDVSVIRVFLPEATTVKILSAVGQILSEALKIDDSGLFVAQLAQQYSSLNYRLRVGYSLAEIDLEDPYRFTSSLLPMDNWLLAEGTHLRPYEILGAHLKTQEGVSGVHFSVWAPNARRVSVVGDFNYWDGRVNPMRFHAESGIWDIFLPNVEKGALYKFEILDSNGNIRLKSDPYAFASQFRPDTASVVTGLPEKIEVDAKLRHANDPDQPISIYEVHLGSWRRHLENNYWLNYEEIANELIPYVKDMGFTHIELLPITEYPFDGSWGYQPTGLYSPTSRFGSPEDLRTLIRKAHEAGINVILDWVVGHFPTDSHGLTEFDGSHLYEHQDPREGYHQDWNTLIFNYGRHEVFNYLSSNALYWTERFGIDGLRVDAVSSMIYRDYSRKDGEWIPNQYGGRENLEALDFLRRTNRMLKKEGHGAVVIAEESTSFAGITHSPEENGVGFDYKWNMGWMNDTLRYMSLDPIYRQYHHDWMTFGMMYQYSEKFVLPLSHDEVVHGKCSILGKMSGDCWQKFANLRAYYGYMWGYPGKKLLFMGNEFAQGREWNYNESLDWFLLGEQGGGWHKGVLNWVRDLNRTYQKYPALYQLDYDPAGFEWLVVDDWQQSVFAFERKAKNGESVIVVSNFTPVVRHNYRIGVRQDGTYTEILNSDAAYYEGSNVGNYGEIECEAIESHGKPFSIELSIPPLSTIFIACQPKPKEAVEAEQDIVKMAEVAMQKALKPTKKTVSVKAKAHKKAHKNKK

SEQ ID NO: 148670 - DNA, 2280 bp, Prochlorococcus marinus str. MIT 9211
  CDS (1)..(2280): transl_table=11
atgaccaccagttttgtttccgactggatggctcaagaggggcaaaaactatctgattgcaaacatgatgatccttttagcgtattaggtatacaacctttccagggaaaatggattgcgagaatctggatgcctgaggctgaggaagttgagttattaataaatgggtcattaataccattaacacccccaaatcacccttggatatttgaagcacttttggatgaaaatcctggttcaaattatcaagttaaagttcatagaggtggaataaaacatcaacaatacgacccctggtcttttagagatgaatggatgggtgaaatagatacccatttatttgcagaaggtaatcatcaccatatttggcgtcgaatgggagctcacctttctgaaatgaatggtgtttgtggtgtaatgttctgcttgtgggctccaaatgctcgaagcgtttctgttattggtgaagtaaattcttgggatgggcgccaccatccaatgcaaaaaagaatgggtggtatttgggagttatttattccgggattaaaagagggagctttatataagtacgaaatcagaactcaaaacggacattgctatgagaaatcagatccatacggctttgaacatgaagtcagaccagctcaaagctcaaaagtttctagaattgacaattttaagtggtctgaccaagaatggatcactaaaagggacagcagcaacccattagatcaacccatatctgtatatgaaatgcatttagggagttggttgcacgctccttcagatgaaccgttcatagaacctaatggcaataaaagaactgcagtccctgcagcagatctgaaaccaggcacaagacttcttacatacccagaattaaaacaaaaactaattaagtatgtaaaggaaagagggttcactcacattgaattgatgccaatatctgagcatccatttgatggatcctggggataccaagcaactggatggtatgcaccaacaagtagatatggaacacctaatgagttcagagcatttgtagatgcatgtcattcagagggtataggtgtaatccttgactgggttccaggacatttcccaaaggattctcatgggctagctttttttgacggctctcacctttatgagcattccgaccctcgaataggagaacacaaagagtggggaacattaatctttaattacagcagaaacgaagtaagaaatttcctagtagcaaatctagttttttggttcgagcaattccatattgatggcattagggttgatgctgtcgcatcaatgctttataaggattatttgcggcctgaagggcagtggataccaaatgaagatggaggaaacgaaaatacagaagccgtcaagttcctacaacaggccaatcatgttctttttgaacattttcctggtgctctttcaattgctgaagagtcgacaacctggcctggagtaaccaatccaactgatgttggaggtttaggttttaatctcaaatggaatatggggtggatgcatgacatgcttgattattttgaggtagacccatggtttaggcagtttcaccaaaacaatgtaactttctcgattacctacaactacacagagaactttatgcttgctctaagtcatgacgaagtagttcatggcaaaagccatctcctgcacaaaatgcctggagatgattggagaaagtatgcaaatacccgagcattgcttgcatatatgtggacacatcccggtaagaaaacaatatttatgggtatggaatttggccaaagaaaagaatggaatgtttgggatgacttagagtgggatctattaggttatcagccacaccaagggatacaaagattagttgatgatttaaatgtgctttataaatctaatcctgcattatggagagatgattttaatcaatatggtttccagtggatagattgtaaagataacaagaattctgtgattagttttatgagaagagaaactctaaataatgaatggctaatagttgtcgcaaatttcacgccagagagtcaccctaactacagagtaggtgttcctctagaaggtttttatgaggaaatctttaatactgattcagataaatatggtggttccaatacaggtaacatgggtggaaaagcttctgaaaaatggagtattcacgaatatgaagattctattgatctatcgctaccacccttgagtgtacttgtatttaagtacgctcagaaaaagagtccaaatgaaaactaa

SEQ ID NO: 148671 - protein, 759 aa, Prochlorococcus marinus str. MIT 9211
MTTSFVSDWMAQEGQKLSDCKHDDPFSVLGIQPFQGKWIARIWMPEAEEVELLINGSLIPLTPPNHPWIFEALLDENPGSNYQVKVHRGGIKHQQYDPWSFRDEWMGEIDTHLFAEGNHHHIWRRMGAHLSEMNGVCGVMFCLWAPNARSVSVIGEVNSWDGRHHPMQKRMGGIWELFIPGLKEGALYKYEIRTQNGHCYEKSDPYGFEHEVRPAQSSKVSRIDNFKWSDQEWITKRDSSNPLDQPISVYEMHLGSWLHAPSDEPFIEPNGNKRTAVPAADLKPGTRLLTYPELKQKLIKYVKERGFTHIELMPISEHPFDGSWGYQATGWYAPTSRYGTPNEFRAFVDACHSEGIGVILDWVPGHFPKDSHGLAFFDGSHLYEHSDPRIGEHKEWGTLIFNYSRNEVRNFLVANLVFWFEQFHIDGIRVDAVASMLYKDYLRPEGQWIPNEDGGNENTEAVKFLQQANHVLFEHFPGALSIAEESTTWPGVTNPTDVGGLGFNLKWNMGWMHDMLDYFEVDPWFRQFHQNNVTFSITYNYTENFMLALSHDEVVHGKSHLLHKMPGDDWRKYANTRALLAYMWTHPGKKTIFMGMEFGQRKEWNVWDDLEWDLLGYQPHQGIQRLVDDLNVLYKSNPALWRDDFNQYGFQWIDCKDNKNSVISFMRRETLNNEWLIVVANFTPESHPNYRVGVPLEGFYEEIFNTDSDKYGGSNTGNMGGKASEKWSIHEYEDSIDLSLPPLSVLVFKYAQKKSPNEN

SEQ ID NO: 148672 - DNA, 2079 bp, Aspergillus niger
  CDS (1)..(2079)
atggcttctaccgaaactcaaactgcccttcaatcggcgcctccagatggtacaggcgttatccagcttgatccttggcttgagcccttccgggatgctctgaagcagagattccagttcgtagagagctgggtcaagacgattaatgaaactgagggcgggttggacaagtttagcaggggctacgagagatacggtatcaatgtcaacgccaatggggacatcacttacagagaatgggcacccaatgctgtcgaggctgagctagttggggattttaacaattgggatgtcacggcccacccgatgacgaagaatagcttcggtgtctgggagatcacattgccagcaaaggatggggtcccggtgatccctcatgacagcaaaatcaagataactatggtcactcccgaaggagaacgaatctaccgaatccctgcatggatcaagcgtgtcgtgcaagaccttactgtgtctccgacatatgagtcggttttctggaaccctccagcaaccgagcggtatcaattcaaacattctcgcccaaagaggcccgaaagccttcgtatctatgaggcccacgtgggtatttcttctccggaaacgagagtcgcaacttacaaagaattcactgcaaatatgctacctcgcatcaagtatctggggtacaacgcaatccagcttatggccatcatggagcatgcctactacgccagcttcgggtaccaggtcaatagcttcttcgcggccagcagtcgctatggtacgccggaagacctgaaagagctagtagatacagcacatagcatgggcttggtggtgcttcttgacgtcgtccacagtcatgcgtccaaaaatgtcctggacgggctgaacatgtttgatggctctgaccatctctactttcactccgggggaaagggtcagcatgaactctgggacagtcgtctgttcaactacggaagccatgaagtcctgaggttcctcctgagcaatctccgcttctggatggaagaatataagtttgacggtttccgtttcgatggtgttacaagtatgctttatacccatcacgggataggaactggtttctctggcggatatcacgagtactttggtggttcggtagatggcgagggtgtgatgtacctgaccttggccaacgaaatgctccacagtctatatcccgactgtataactgtggcagaagatgtatctggaatgccagcactgtgcttgccgcacgcccttggaggtgttggatttgactaccgacttgccatggcaattccagacatgtacatcaagctcttgaaggagaagtcggacgatgaatgggacattggcaacctctctttcacgttggtcaaccgacgtcacggggaaaagacgatcgcctacgcggagagtcatgatcaggcacttgttggcgacaaaaccatcatgatgtggctttgtgacaaggagatgtacacccacatgtccgtgttgacagagttcacccccattattgaaagaggcatggctctacacaagatgctccgcctagttacacatggactcggtggtgagggttatctcaacttcgaaggtaacgaattcggtcatcccgaatggctcgacttccctcgtgccggtaataacaactcattctggtacgcacgtcgccaactgaacctaacggaagaccacctccttcgctacaaattcctgaacgacttcgaccgcgccatgcaattaaccgaagagaaatacggctggcttcattccccacaagcatacatcagcctgaagcacgagggtgacaaggtccttgtctttgaacgtgcaggcctcctctggatctttaactttcatccctcaaacagcttcacggactacagagtgggcgtcgagcaagccggaacctacagaatcgtacttgacaccgatgacaaggagtttggtggtttcggtcgcaatctcaaggagacgcgcttcttcactacagacctgccctggaatgggcgcagcaattatctacaggtctatcttcctacgcgaacagcattggttcttgccttggaagagaccctatag

SEQ ID NO: 148673 - protein, 692 aa, Aspergillus niger
MASTETQTALQSAPPDGTGVIQLDPWLEPFRDALKQRFQFVESWVKTINETEGGLDKFSRGYERYGINVNANGDITYREWAPNAVEAELVGDFNNWDVTAHPMTKNSFGVWEITLPAKDGVPVIPHDSKIKITMVTPEGERIYRIPAWIKRVVQDLTVSPTYESVFWNPPATERYQFKHSRPKRPESLRIYEAHVGISSPETRVATYKEFTANMLPRIKYLGYNAIQLMAIMEHAYYASFGYQVNSFFAASSRYGTPEDLKELVDTAHSMGLVVLLDVVHSHASKNVLDGLNMFDGSDHLYFHSGGKGQHELWDSRLFNYGSHEVLRFLLSNLRFWMEEYKFDGFRFDGVTSMLYTHHGIGTGFSGGYHEYFGGSVDGEGVMYLTLANEMLHSLYPDCITVAEDVSGMPALCLPHALGGVGFDYRLAMAIPDMYIKLLKEKSDDEWDIGNLSFTLVNRRHGEKTIAYAESHDQALVGDKTIMMWLCDKEMYTHMSVLTEFTPIIERGMALHKMLRLVTHGLGGEGYLNFEGNEFGHPEWLDFPRAGNNNSFWYARRQLNLTEDHLLRYKFLNDFDRAMQLTEEKYGWLHSPQAYISLKHEGDKVLVFERAGLLWIFNFHPSNSFTDYRVGVEQAGTYRIVLDTDDKEFGGFGRNLKETRFFTTDLPWNGRSNYLQVYLPTRTALVLALEETL

SEQ ID NO: 148674 - DNA, 2517 bp, Populus trichocarpa
  CDS (1)..(2517)
atgttaggttcttcttcaggtctattgccagcacctcctttgttgccttctgtggctgagaattccaaatgggctataaggtataaaagatgcactgcaaaagagaagccagttagactgccttctggggggtctaagaaattgctttgtcacagcagattttgttttccattaagaatctcaaataatgatagggttcgccatggtttcgctatatcagcggttttgacagatgacccaacaatgacaaccgttggggatggcttggaaaatatcggtcttgtaagcattgatcctgggttggaatcatttaaagatcacttcagatatagaatgaaaagatatgtagatcagaaaaagctcattgaaagatacgaaggaggtcttgaggaatttgcacttggatatcagaaatttggatttaatagagatgaaggaggcattgtctaccgtgagtgggcccctgcagctcaggaagcacagattatcggggacttcaatggatgggatggctccaaccacaggatggaaaagaatgaatttggtgtttggagtattaaaatacctgattctggtggaaatccagcaattcctcacaattcaagggtcaagttccgattcatgcaaggtaatggagtttgggttgatagaatacctgcttggataaaatgtgccactgtggatcctgcaagttttggagcaccatatgatggtgtgtactgggacccaccaacttcagaaaggtatgaatttaagttcccgcggcctcccaaacccaatgccccacgcatatatgaggctcatgttggaatgagtagctcagaaccccgtgttaattcctacagagaatttgctgataatgttttgcctcgtatacgagcaaataactacaacacagtacaactaatggcagtaatcgagcattcctattatgcatcgtttggttatcatgttacgaacttttttgctgttagcagcagatctggaaatcctgaagacctcaagtatttaattgataaagcccatagcttgggtctacgtgtcctgatggatgttgtccacagtcatgcaagtaacaatgtcactgatggtctcaatggttttgacattggccaaggtgctcaagagtcctattttcacactggagatcgaggctaccataatttatgggacagtagactctttaattatgctaattgggaagttcttcgctttctgttatccaacttgagatggtggcttgaggagttcaaatttgatgggtttcgatttgatggagtaacttccatgttgtaccatcaccatggaatcaacatggcattcacgggagattataatgagtacttcagtgaggcaacggatgttgatgctgttgtttacttaatgctggctaattatctgatacataatatcttgccagatgcaacagtgattgctgaagatgtttctggtatgcctggacttggttgtccagtctctgaggggggagttggatttgactaccgcctggcaatggccatccctgacaaatggattgattacttgaaaaacaagagtgatctagagtggtcaatgaatgaaatctcccggagcttaactaataggagatatactgagaaatgtgttgcttatgccgagagccatgaccagtccattgtaggtgacaagactattgccttcatcctgatggataaagaaatgtattctggcatgtcttgtttgacagaggctccacctgctgttgatcgagggattgctcttcataagatgatacattttataactatggcactaggtggcgagggataccttaattttatgggaaatgaatttgggcatcctgagtggattgacttccccagagaaggcaatggatggagttacgaaatgtgtagacgccaatggaatcttgctgacatggaacacttaagatacaagttcatgaatgcatttgacagagctatgaatttgcttgatgaaaaatattcattcctagcatctacgaagcagattgtgagcagtacaaatgaagaagataaggttattgtctttgagcgtggagatctggtttttgtgttcaattttcatccggagaaaacatatgatgggtataaggttgggtgtgacttgcctgggaagtatagagttgcactggacagtgatgccttggaatttggtggacatggaagagtgggccatgatgcagaccatttcacatctcctgaagggataccaggagtacctgaaacaaatttcaacaatcgtcccaactccttcaaagtactctcgccagcccgcacatgtgtggtttactatagagtcgaagaaagcgaagagagccatgatgatgatgatgagatgggcttgaatgagatattagctgctgatgttataccagagcaagaggatgttgaagaagctgccagtcaggctaaggtcggaaaaccgcacttggtggatggtgatggtgatggtgatggtgagtgggtgatggtagtggacttagcaagacagtaa

SEQ ID NO: 148675 - protein, 838 aa, Populus trichocarpa
MLGSSSGLLPAPPLLPSVAENSKWAIRYKRCTAKEKPVRLPSGGSKKLLCHSRFCFPLRISNNDRVRHGFAISAVLTDDPTMTTVGDGLENIGLVSIDPGLESFKDHFRYRMKRYVDQKKLIERYEGGLEEFALGYQKFGFNRDEGGIVYREWAPAAQEAQIIGDFNGWDGSNHRMEKNEFGVWSIKIPDSGGNPAIPHNSRVKFRFMQGNGVWVDRIPAWIKCATVDPASFGAPYDGVYWDPPTSERYEFKFPRPPKPNAPRIYEAHVGMSSSEPRVNSYREFADNVLPRIRANNYNTVQLMAVIEHSYYASFGYHVTNFFAVSSRSGNPEDLKYLIDKAHSLGLRVLMDVVHSHASNNVTDGLNGFDIGQGAQESYFHTGDRGYHNLWDSRLFNYANWEVLRFLLSNLRWWLEEFKFDGFRFDGVTSMLYHHHGINMAFTGDYNEYFSEATDVDAVVYLMLANYLIHNILPDATVIAEDVSGMPGLGCPVSEGGVGFDYRLAMAIPDKWIDYLKNKSDLEWSMNEISRSLTNRRYTEKCVAYAESHDQSIVGDKTIAFILMDKEMYSGMSCLTEAPPAVDRGIALHKMIHFITMALGGEGYLNFMGNEFGHPEWIDFPREGNGWSYEMCRRQWNLADMEHLRYKFMNAFDRAMNLLDEKYSFLASTKQIVSSTNEEDKVIVFERGDLVFVFNFHPEKTYDGYKVGCDLPGKYRVALDSDALEFGGHGRVGHDADHFTSPEGIPGVPETNFNNRPNSFKVLSPARTCVVYYRVEESEESHDDDDEMGLNEILAADVIPEQEDVEEAASQAKVGKPHLVDGDGDGDGEWVMVVDLARQ

SEQ ID NO: 148676 - DNA, 2502 bp, Populus trichocarpa
  CDS (1)..(2502)
atggtgtactgcgctatatcaggcgtacgttttccttgccttccttcagtgtacaacaccaagtctcaatcaagtttcaatggcgatcctttgtgtcgaaagggcctctcctttttctcgaagaaagacccatcttctttgaagatgcttgctggaaagtcttcttacgattccgattccccaaatttagctgttactacttctactgctacaacaacaaccacaccgacacctgagaaagtccttgtcccccccgatggcaacgcttcagaagatcctctggtacctcatgatgtagagtgtctaacaatggaagataatcagattgttgaagacaaggaaaagcaggagacatctactcctttgagcgagtcaataatcattggtaaaactgaagcgaaatctaggtctatccccccacctggctctgggcagagaatatatgaaatagatccaagtttgacaggtttccgtcaacatcttgattaccgatattcacagtacaaaagaattcgtgaagaaattgacaagtatgaaggtggtttggaagtgttttctcgtggctatgaaaagcttggattcatacgcagtgaaacaggaataacctacagggaatgggcaccaggagctaagtgggcagcattgattggagattttaacaattggaatcccaatgcagatgtcatgacccagaatgaatttggtgtctgggaagtgttccttccaaacaatgcagatggttcaccaccaattccccatggttctcgagtaaagatacgcatggatactccttctggcattaaagattctattcctgcttggattaagttctcagtacaggctccaggagaaatcccatacaatggcatttattatgatccaccggaggaggaaaagtatatattcaaacatcctcaaccaaagagaccagagtcacttaggatttatgaagctcatgtcggaatgagtagtacggagccattaatcaacacatatgccaactttagagatgatgtgcttcctcggatcaaaaaacttggttataatgctgttcagattatggctattcaagagcattcatattatgctagttttgggtaccatgtcacaaattattttgcaccctgtagtcgatgtggaacccctgatgatctgaagtctctgatagatagagctcacgagttaggtctgcttgttctcatggatattgttcacagccatgcatcgaacaatactttggatggtttgaatatgttcgatggaactgataatcactacttccactctggttcacggggacatcattggatgtgggactctcgccttttcaactatgggagctgggaagtactgaggtttcttctttcaaatgcaagatggtggctggatgaatataagtttgatgggttcagatttgatggtgtgacttcgatgatgtacacccaccatgggttgcagatgacttttactggaaactacaatgagtactttggatatgcaactgacatagatgctgtcgtatatctgatggttgttaatgatatgattcatggtctcttccctgatgctgttagcattggtgaagatgtcagtggaatgccaacattctgcattcctgtccaagatggtggcgtgggatttgattatcgcctccacatggccattgctgataaatggattgagcttctccagaagaaggatgaagactggagaatgggtgacattgtacacactctcactaacagaaggtggctggaaaagtgcgtttcatatgctgaaagtcatgaccaagctcttgttggtgacaagaccattgcattctggttgatggacaaggatatgtacgacttcatggctcttgatagaccatcaactcctcttgtagatcgtggaatagcattgcacaaaatgatccggcttattaccatgggtttaggaggagaaggatatttgaattttatgggaaatgagtttggacaccctgagtggattgatttcccaaggggcgatcagcgccttcctactggtaaaattattccaggcaataataacagttttgataaatgccggcgtagatttgatctaggggatgcagaatatctaagataccatggaatgcaagaatttgatcgggcaatgcagcatcttgaagaaatctatggtttcatgacatctgagcaccaatatatatcacggaaaaacgaaggggatcgagttattgtcttcgaaagagggaacttggtttttgtctttaattttcattggaccaacagttattcagattaccgagtaggctgcttaaagccaggaaagtacaagattgttttagattctgatgatccattgtttggaggcttcaaaaggcttgataaggatgctgagtacttcagctcagaagggtggtatgatgaccggcctcgttccttcctggtgtatgcaccaagtagaacggctgtggtctatgctctggtggaggatgaattggaacctgctgagggctga

SEQ ID NO: 148677 - protein, 833 aa, Populus trichocarpa
MVYCAISGVRFPCLPSVYNTKSQSSFNGDPLCRKGLSFFSKKDPSSLKMLAGKSSYDSDSPNLAVTTSTATTTTTPTPEKVLVPPDGNASEDPLVPHDVECLTMEDNQIVEDKEKQETSTPLSESIIIGKTEAKSRSIPPPGSGQRIYEIDPSLTGFRQHLDYRYSQYKRIREEIDKYEGGLEVFSRGYEKLGFIRSETGITYREWAPGAKWAALIGDFNNWNPNADVMTQNEFGVWEVFLPNNADGSPPIPHGSRVKIRMDTPSGIKDSIPAWIKFSVQAPGEIPYNGIYYDPPEEEKYIFKHPQPKRPESLRIYEAHVGMSSTEPLINTYANFRDDVLPRIKKLGYNAVQIMAIQEHSYYASFGYHVTNYFAPCSRCGTPDDLKSLIDRAHELGLLVLMDIVHSHASNNTLDGLNMFDGTDNHYFHSGSRGHHWMWDSRLFNYGSWEVLRFLLSNARWWLDEYKFDGFRFDGVTSMMYTHHGLQMTFTGNYNEYFGYATDIDAVVYLMVVNDMIHGLFPDAVSIGEDVSGMPTFCIPVQDGGVGFDYRLHMAIADKWIELLQKKDEDWRMGDIVHTLTNRRWLEKCVSYAESHDQALVGDKTIAFWLMDKDMYDFMALDRPSTPLVDRGIALHKMIRLITMGLGGEGYLNFMGNEFGHPEWIDFPRGDQRLPTGKIIPGNNNSFDKCRRRFDLGDAEYLRYHGMQEFDRAMQHLEEIYGFMTSEHQYISRKNEGDRVIVFERGNLVFVFNFHWTNSYSDYRVGCLKPGKYKIVLDSDDPLFGGFKRLDKDAEYFSSEGWYDDRPRSFLVYAPSRTAVVYALVEDELEPAEG

SEQ ID NO: 148678 - DNA, 2745 bp, Triticum aestivum
  CDS (17)..(2509)
gccgccatcgacgaagatgctctgcctcaccgccccctcctgctcgccatctctcccgccgcgcccctcccgtcccgctgctgaccggcccggaccggggatctcgggcggcggcaatgtgcggctgagcgcggtgcccgcgccctcttcgctccgctggtcgtggccgcggaaggccaagagcaagttctctgttcccgtgtctgcgccaagagactacaccatggcaacagctgaagatggtgttggcgaccttccgatatacgatctggatccgaagtttgccggcttcaaggaacacttcagttataggatgaaaaagtaccttgaccagaaacattcgattgagaagcacgagggaggccttgaagagttctctaaaggctatttgaagtttgggatcaacacagaaaatgacgcaactgtgtaccgggaatgggcccctgcagcaatggatgcacaacttattggtgacttcaacaactggaatggctctgggcacaggatgacaaaggataattatggtgtttggtcaatcaggatttcccatgtcaatgggaaacctgccatcccccataattccaaggttaaatttcgatttcaccgtggagatggactatgggtcgatcgggttcctgcatggattcgttatgcaacttttgatgcctctaaatttggagctccatatgacggtgttcactgggatccaccttctggtgaaaggtatgtgtttaagcatcctcggcctcgaaagcctgacgctccacgtatttacgaggctcatgtggggatgagtggtgaaaagcctgaagtaagcacatacagagaatttgcagacaatgtgttaccgcgcataaaggcaaacaactacaacacagttcagctgatggcaatcatggaacattcatattatgcttcttttgggtaccatgtgacgaatttcttcgcagttagcagcagatcaggaacgccagaggacctcaaatatcttgttgacaaggcacatagtttagggttgcgtgttctgatggatgttgtccatagccatgcgagcagtaataagacagatggtcttaatggctatgatgttgggcaaaacacacaggagtcctatttccacacaggagaaaggggctatcataaactgtgggatagccgcctgttcaactatgccaattgggaggtcttacgatttcttctttctaatctgagatattggatggacgaattcatgtttgatggcttccgatttgatggggtaacatccatgctatataatcaccatggtatcaatatgtcattcgctggaagttacaaggaatattttggtttggatactgatgtagatgcagttgtttacctgatgcttgcgaaccatttaatgcacaaactcttgccagaagcaactgttgttgcagaagatgtttcaggcatgccagtgctttgtcggtcagttgatgaaggtggagtagggtttgactatcgcctggctatggctattcctgatagatggatcgactacttgaagaacaaagatgaccttgaatggtcaatgagtggaatagcacatactctgaccaacaggagatatacggaaaagtgcattgcatatgctgagagccatgatcagtctattgttggcgacaagactatggcatttctcttgatggacaaggaaatgtatactggcatgtcagacttgcagcctgcttcgcctacaattgatcgtggaattgcacttcaaaagatgattcacttcatcaccatggcccttggaggtgatggctacttgaattttatgggtaatgagtttggccacccagaatggattgactttccaagagaaggcaacaactggagttatgataaatgcagacgccagtggagcctcgcagacattgatcacctacgatacaagtacatgaacgcatttgatcaagcaatgaatgcgctcgacgacaaattttccttcctatcatcatcaaagcagattgtcagcgacatgaatgaggaaaagaagattattgtatttgaacgtggagatctggtcttcgtcttcaattttcatcccagtaaaacttatgatggttacaaagtcggatgtgacttgcctgggaagtacaaggtagctctggactctgatgctctgatgtttggtggacatggaagagtggcccatgacaacgatcactttacgtcacctgaaggagtaccaggagtacctgaaacaaacttcaacaaccgccctaactcattcaaaatcctgtctccatcccgcacttgtgtggcttactatcgcgtcgaggagaaagcggaaaagcccaaggatgaaggagctgcttcttgggggaaaactgctctcgggtacatcgatgttgaagccactggcgtcaaagacgcagcagatggtgaggcgacttctggttccgaaaaggcgtctacaggaggtgactccagcaagaagggaattaactttgtctttctgtcacccgacaaagacaacaaataagcaccatatcaacgcttgatcaggaccgtgtgccgacgtccttgtaatactcctgctattgctagtagtagcaatactgtcaaactgtgcagacttgagattctggcttggactttgctgaggttacctactatatagaaagataaataagcggtgatggtgcgggtcgagtccagctatatgtgccaaatatgcgccatcccgagtcctctgtcataaagaaagtttcgggcttc

SEQ ID NO: 148679 - protein, 830 aa, Triticum aestivum
MLCLTAPSCSPSLPPRPSRPAADRPGPGISGGGNVRLSAVPAPSSLRWSWPRKAKSKFSVPVSAPRDYTMATAEDGVGDLPIYDLDPKFAGFKEHFSYRMKKYLDQKHSIEKHEGGLEEFSKGYLKFGINTENDATVYREWAPAAMDAQLIGDFNNWNGSGHRMTKDNYGVWSIRISHVNGKPAIPHNSKVKFRFHRGDGLWVDRVPAWIRYATFDASKFGAPYDGVHWDPPSGERYVFKHPRPRKPDAPRIYEAHVGMSGEKPEVSTYREFADNVLPRIKANNYNTVQLMAIMEHSYYASFGYHVTNFFAVSSRSGTPEDLKYLVDKAHSLGLRVLMDVVHSHASSNKTDGLNGYDVGQNTQESYFHTGERGYHKLWDSRLFNYANWEVLRFLLSNLRYWMDEFMFDGFRFDGVTSMLYNHHGINMSFAGSYKEYFGLDTDVDAVVYLMLANHLMHKLLPEATVVAEDVSGMPVLCRSVDEGGVGFDYRLAMAIPDRWIDYLKNKDDLEWSMSGIAHTLTNRRYTEKCIAYAESHDQSIVGDKTMAFLLMDKEMYTGMSDLQPASPTIDRGIALQKMIHFITMALGGDGYLNFMGNEFGHPEWIDFPREGNNWSYDKCRRQWSLADIDHLRYKYMNAFDQAMNALDDKFSFLSSSKQIVSDMNEEKKIIVFERGDLVFVFNFHPSKTYDGYKVGCDLPGKYKVALDSDALMFGGHGRVAHDNDHFTSPEGVPGVPETNFNNRPNSFKILSPSRTCVAYYRVEEKAEKPKDEGAASWGKTALGYIDVEATGVKDAADGEATSGSEKASTGGDSSKKGINFVFLSPDKDNK

SEQ ID NO: 148680 - DNA, 2853 bp, Triticum aestivum
  CDS (313)..(2502)
gtgagatctgggcgactggctgactcaatcactacgcggggatggcgacgtttcgcggtgtccggcgcgactctcggtgtggcgcgggccggcgtcggagtggcgcgggccggctcggagcggaggggcggggcggacttgccgtcgctgctcctcaggaagaaggactcctctcgcgccgtcctgagccgcgcggcctctccagggaaggtcctggtgcctgacggcgagagcgacgacttggcaagtccggcgcaacctgaagaattacagatacctgaagatatccaggagcaaacggcggaagtgaacatgacaggggggactgcagaaaaacttcaatcttcagaaccgactcagggcattgtggaaacaatcactgatggtgtaaccaaaggagttaaggaactagtcgtgggggagaaaccgcgagttgtcccaaaaccaggagatgggcagaaaatatacgagattgacccaacactgaaagattttcggagccatcttgactaccgataccgcgaatacaagagaattcgtgctgctattgaccaacatgaaggtggattggaagcattttctcgtggttatgaaaagcttggatttacccgcagtgctgaaggtatcacttaccgagaatgggctcctggagcgcattctgcagcattagtaggtgacttcaacaattggaatccaaatgcagatgctatgaccagagatgattatggtgtttgggagattttcctccctaacaacgctgatggatcctcagctattcctcatggctcacgtgtaaagatacggatggatactccatccggtgtgaaggattcaatttctgcttggatcaagttctctgtgcaggctccaggtgaaatacctttcaatggcatatattatgatccacctgaagaggagaagtatgtcttccaacatcctcaacctaaacgaccagagtcactaaggatttatgaatcacacattggaatgagcagcccggaaccgaagataaattcatatgctaattttagggatgaggtgttgccaagaattaaaaggcttggatacaatgcagtgcagataatggcaatccaggagcattcatactatgcaagctttgggtaccatgttactaatttttttgcaccaagtagccgttttggaactccagaggacttaaaatccttgatcgatagagcacatgagcttggtttgcttgttcttatggatattgttcatagtcattcgtcaaataatacccttgacggtttgaatggtttcgatggcactgatacacattacttccacggtggtccacgcggccatcattggatgtgggattctcgtctattcaactatgggagttgggaagtattgagattcttactgtcaaacgcgagatggtggcttgaagaatataattttgatggatttcgatttgatggggtgacctccatgatgtatactcaccatggattacaaatgacatttactgggaactatggcgaatattttggatttgctactgatgttgatgcggtagtttacttgatgctggtcaacgatctaattcatggactttatcctgatgctgtatccattggtgaagatgtcagtggaatgcctacattttgcatccctgttccagatggtggtgttggttttgactaccgcctgcatatggctgtagcagataaatggattgaactcctcaagcaaagtgacgaatcttggaaaatgggcgatattgtgcacaccctaacaaataaaaggtggcttgagaagtgtgtaacttatgcagaaagtcatgatcaagcactagttggtgacaagactattgcattctggttgatggataaggatatgtatgatttcatggctctggataggccttcaactcctcgcattgatcgtggcatagcattacataaaatgatcaggcttgtcaccatgggtttaggtggtgaaagctatcttaacttcatgggaaatgagtttgggcatcctgaatggatagattttccaagaggcccacaaactcttccaaccggcaaagttctccctggaaataacaataattatgataaatgccgccgtagatttgatcttggagatgcagaatttcttagatatcgtggtatgcaagagttcgatcaggcaatgcagcatcttgaggaaaaatatgggtttatgacatctgagcaccagtatgtttcacggaaacatgaggaagataaggtgatcatcttcgaaagaggagatttggtatttgttttcaacttccactggagcaatagcttttttgactaccgtgttgggtgttccaagcctgggaagtacaaggtggccttggactccgacgatgcactctttggtggattcagcaggcttgatcatgatgtcgactacttcacaaccgaacatccgcatgacaacaggccgcgctctttctcggtgtacactccgagcagaactgcggtcgtgtatgcccttacagagtaagaaccagcagcggcttgttacaaggcaaagagagaactccagagagctcgtggatcgtgagcgaagcgacgggcaacggcgcgaggctgctccaagcgccatgactgggaggggatcgtgcctcttccccagatgccaggaggagcagatggataggtagcttgttggtgagcgctcgaaagaaaatggacgggcctgggtgtttgttgtgctgcactgaaccctcctcctatcttgcacattcccggttgtttttgtacatataactaataattgcccgtgcgcttcaacatgaacatataaatattctaataggttatcccgtgaaaaaaaaaaaaaaaaaaaaaaaaa

SEQ ID NO: 148681 - protein, 729 aa, Triticum aestivum
MTGGTAEKLQSSEPTQGIVETITDGVTKGVKELVVGEKPRVVPKPGDGQKIYEIDPTLKDFRSHLDYRYREYKRIRAAIDQHEGGLEAFSRGYEKLGFTRSAEGITYREWAPGAHSAALVGDFNNWNPNADAMTRDDYGVWEIFLPNNADGSSAIPHGSRVKIRMDTPSGVKDSISAWIKFSVQAPGEIPFNGIYYDPPEEEKYVFQHPQPKRPESLRIYESHIGMSSPEPKINSYANFRDEVLPRIKRLGYNAVQIMAIQEHSYYASFGYHVTNFFAPSSRFGTPEDLKSLIDRAHELGLLVLMDIVHSHSSNNTLDGLNGFDGTDTHYFHGGPRGHHWMWDSRLFNYGSWEVLRFLLSNARWWLEEYNFDGFRFDGVTSMMYTHHGLQMTFTGNYGEYFGFATDVDAVVYLMLVNDLIHGLYPDAVSIGEDVSGMPTFCIPVPDGGVGFDYRLHMAVADKWIELLKQSDESWKMGDIVHTLTNKRWLEKCVTYAESHDQALVGDKTIAFWLMDKDMYDFMALDRPSTPRIDRGIALHKMIRLVTMGLGGESYLNFMGNEFGHPEWIDFPRGPQTLPTGKVLPGNNNNYDKCRRRFDLGDAEFLRYRGMQEFDQAMQHLEEKYGFMTSEHQYVSRKHEEDKVIIFERGDLVFVFNFHWSNSFFDYRVGCSKPGKYKVALDSDDALFGGFSRLDHDVDYFTTEHPHDNRPRSFSVYTPSRTAVVYALTE

SEQ ID NO: 148682 - DNA, 2400 bp, Zea mays
  CDS (1)..(2400)
atggcgttccgggtttctggggcggtgctcggtggggccgtaagggctccccgactcaccggcggcggggagggtagtctagtcttccggcacaccggcctcttcttaactcggggtgctcgagttggatgttcggggacgcacggggccatgcgcgcggcggccgcggccaggaaagcggtcatggttcctgagggcgagaatgatggcctcgcatcaagggctgactcggctcaattccagtcggatgaactggaggtaccagacatttctgaagagacaacgtgcggtgctggtgtggctgatgctcaagccttgaacagagttcgagtggtccccccaccaagcgatggacaaaaaatattccagattgaccccatgttgcaaggctataagtaccatcttgagtatcggtacagcctctatagaagaatccgttcagacattgatgaacatgaaggaggcttggaagccttctcccgtagttatgagaagtttggatttaatcgcagcgcggaaggtatcacatatcgagaatgggctcctggagcattttctgcagcattggtgggtgacttcaacaactgggatccaaatgcagatcgtatgagcaaaaatgagtttggtgtttgggaaatttttctgcctaacaatgcagatggtacatcacctattcctcatggatctcgtgtaaaggtgagaatggatactccatcagggataaaggattcaattccagcctggatcaagtactcagtgcaggccccaggagaaataccatatgatgggatttattatgatcctcctgaagaggtaaagtatgtgttcaggcatgcgcaacctaaacgaccaaaatcattgcggatatatgaaacacatgtcggaatgagtagcccggaaccgaagataaacacatatgtaaactttagggatgaagtcctcccaagaataaaaaaacttggatacaatgcagtgcaaataatggcaatccaagagcactcatattatggaagctttggataccatgtaactaatttttttgcgccaagtagtcgttttggtaccccagaagaattgaagtctttgattgatagagcacatgagcttggtttgctagttctcatggatgtggttcatagtcatgcgtcaagtaatactctggatgggttgaatggttttgatggtacagatacacattactttcacagtggtccacgtggccatcactggatgtgggattctcgcctatttaactatgggaactgggaagttttaagatttcttctctccaatgctagatggtggctcgaggaatataagtttgatggtttccgttttgatggtgtgacctccatgatgtacactcatcacggattacaagtaacatttacggggaacttcaatgagtattttggctttgccaccgatgtagatgcagtggtttacttgatgctggtaaatgatctaattcatggactttatcctgaggctgtaaccattggtgaagatgttagtggaatgcctacatttgcccttcctgttcacgatggtggggtaggttttgactatcggatgcatatggctgtggctgacaaatggattgaccttctcaagcaaagtgatgaaacttggaagatgggtgatattgtgcacacactgacaaataggaggtggttagagaagtgtgtaacttatgctgaaagtcatgatcaagcattagtcggcgacaagactattgcgttttggttgatggacaaggatatgtatgatttcatggccctcgatagaccttcaactcctaccattgatcgtgggatagcattacataagatgattagacttatcacaatgggtttaggaggagagggctatcttaatttcatgggaaatgagtttggacatcctgaatggatagattttccaagaggtccgcaaagacttccaagtggtaagtttattccagggaataacaacagttatgacaaatgtcgtcgaagatttgacctgggtgatgcagactatcttaggtatcatggtatgcaagagtttgatcaggcaatgcaacatcttgagcaaaaatatgaattcatgacatctgatcaccagtatatttcccggaaacatgaggaggataaggtgattgtgttcgaaaagggagatttggtatttgtgttcaacttccactgcaacaacagctattttgactaccgtattggttgtcgaaagcctggggtgtataaggtggtcttggactccgacgctggactatttggtggatttagcaggatccatcacgcagccgagcacttcaccgccgactgttcgcatgataataggccatattcattctcggtttatacaccaagcagaacatgtgtcgtctatgctccagtggagtga

SEQ ID NO: 148683 - protein, 799 aa, Zea mays
MAFRVSGAVLGGAVRAPRLTGGGEGSLVFRHTGLFLTRGARVGCSGTHGAMRAAAAARKAVMVPEGENDGLASRADSAQFQSDELEVPDISEETTCGAGVADAQALNRVRVVPPPSDGQKIFQIDPMLQGYKYHLEYRYSLYRRIRSDIDEHEGGLEAFSRSYEKFGFNRSAEGITYREWAPGAFSAALVGDFNNWDPNADRMSKNEFGVWEIFLPNNADGTSPIPHGSRVKVRMDTPSGIKDSIPAWIKYSVQAPGEIPYDGIYYDPPEEVKYVFRHAQPKRPKSLRIYETHVGMSSPEPKINTYVNFRDEVLPRIKKLGYNAVQIMAIQEHSYYGSFGYHVTNFFAPSSRFGTPEELKSLIDRAHELGLLVLMDVVHSHASSNTLDGLNGFDGTDTHYFHSGPRGHHWMWDSRLFNYGNWEVLRFLLSNARWWLEEYKFDGFRFDGVTSMMYTHHGLQVTFTGNFNEYFGFATDVDAVVYLMLVNDLIHGLYPEAVTIGEDVSGMPTFALPVHDGGVGFDYRMHMAVADKWIDLLKQSDETWKMGDIVHTLTNRRWLEKCVTYAESHDQALVGDKTIAFWLMDKDMYDFMALDRPSTPTIDRGIALHKMIRLITMGLGGEGYLNFMGNEFGHPEWIDFPRGPQRLPSGKFIPGNNNSYDKCRRRFDLGDADYLRYHGMQEFDQAMQHLEQKYEFMTSDHQYISRKHEEDKVIVFEKGDLVFVFNFHCNNSYFDYRIGCRKPGVYKVVLDSDAGLFGGFSRIHHAAEHFTADCSHDNRPYSFSVYTPSRTCVVYAPVE

SEQ ID NO: 148684 - DNA, 2970 bp, Triticum aestivum
  CDS (151)..(2622)
cgccagcttccacccccgccgcacacgttgctcccccttctcatcgcttctcaattaatatctccatcactcgggttccgcgctgcatttcggccggcgggttgagtgagatctgggccactgaccgactcactcgctcgctgcgcggggatggcgacgttcgcggtgtccggcgcgaccctcggtgtggcgcggcccgccggcgccggcggcggactgctgccgcgatccggctcggagcggaggggcggggtggacctgccgtcgctgctcctcaggaagaaggactcctctcgcgccgtcctgagccgcgcggcctctccagggaaggtcctggtgcctgacggtgagagcgacgacttggcaagtccggcgcaacctgaagaattacagatacctgaagacatcgaggagcaaacggctgaagtaaacatgacaggggggactgcagaaaaacttgaatcttcagaaccgactcaaggcattgtggaaacaatcactgatggtgtaaccaaaggagttaaggaactagtcgtgggggagaaaccgcgagttgtcccaaaaccaggagatgggcagaaaatatacgagattgacccaacgctgaaagattttcggagccatcttgactaccgatacagcgaatacaggagaattcgtgctgctattgaccaacatgaaggtggattggaagcattttctcgtggttatgaaaagcttggatttacccgcagtgctgaaggtatcacttaccgagaatgggctcctggagcgcattctgcagcattagtaggtgacttcaacaattggaatccgaatgcagatactatgaccagagatgattatggtgtttgggagattttcctccctaacaatgctgatggatccccagctattcctcatggctcacgtgtaaagatacggatggatactccatctggtgtgaaggattcaatttctgcttggatcaagttctctgtgcaggctccaggtgaaataccattcaatggcatatattatgatccacctgaagaggagaagtatgtcttccaacatcctcaacctaaacgaccagagtcactgaggatttatgaatcacacattggaatgagcagcccagaaccgaagataaattcatatgctaattttagggatgaggtgctgccaagaattaaaaggcttggatacaatgcagtgcagataatggcaatccaggagcattcatactatgcgagctttgggtaccatgttactaatttttttgcaccaagtagccgttttggaactccagaggacttaaaatccctgatcgatagagcacatgagcttggtttgcttgttcttatggatattgttcatagtcattcatcaaataatacccttgacggcttgaatggtttcgatggcactgatacacattacttccacggtggtccacgtggccatcattggatgtgggattctcgtctattcaactatgggagttgggaagtattgagattcttactgtcaaacgcgagatggtggcttgaagaatataagtttgatggatttcgatttgatggggtgacctccatgatgtatactcaccatggattacaaatgacatttactgggaactatggcgagtattttggatttgctactgatgttgatgcggtagtttacttgatgctggtcaacgatctaattcatggacttcatcctgatgctgtatccattggtgaagatgtcagtggaatgcccacattttgcatccctgttccagatggtggtgttggtttggactatcgcttgcatatggctgtagcagataaatggattgaactcctcaagcaaagtgacgaatcttggaaaatgggtgatattgtgcacaccctaacaaatagaaggtggcttgagaagtgtgtaacttatgcagaaagtcatgatcaagcactagttggtgacaagactattgcattctggttgatggataaggatatgtatgatttcatggctctggataggccttcaactcctcgcattgatcgtggcatagcattacataaaatgatcaggcttgtcaccatgggtttaggtggtgaaggctatcttaacttcatgggaaatgagtttgggcatcctgaatggatagattttccaagaggtccgcaaactcttccaaccggcaaagttctccctggaaataacaatagttatgataaatgccgccgtagatttgatcttggagatgcagattttcttagatatcatggtatgcaagagttcgatcaggcaatgcagcatcttgaggaaaaatatgggtttatgacatctgagcaccagtatgtttcacggaaacatgaggaagataaggtgatcatcttcgaaagaggagatttggtatttgttttcaacttccactggagcaatagcttttttgactaccgtgttgggtgttccaggcctgggaagtacaaggtggccttagactccgacgatgcactctttggtggattcagcaggcttgatcatgatgtcgactacttcacaaccgaacatccgcatgacaacaggccgcgctctttctcggtgtacactccgagcagaactgcggtcgtgtatgcccttacagagtaagaaccagcagctgcttgttacaaggcaaagagagaactccagagagctcgtggatcgtgagcgaagcgacgggcaacggcgcgaggctgctctaagcgccatgactgggaggggatcgtgcctcttccccagatgccaggaggagcagatggataggtagcttgttggtgagcgctcgaaagaaaatggacgggcctgggtgtttgtcgtgctgcactaccctcctcctatcttgcacattcccggttgtttttgtacatataactaataattgcccgtgcgctccacgtgaacatataaatattctaataataggttatcccgtgaaaaaaaaaaaaaaaaaaaaaa

SEQ ID NO: 148685 - protein, 823 aa, Triticum aestivum
MATFAVSGATLGVARPAGAGGGLLPRSGSERRGGVDLPSLLLRKKDSSRAVLSRAASPGKVLVPDGESDDLASPAQPEELQIPEDIEEQTAEVNMTGGTAEKLESSEPTQGIVETITDGVTKGVKELVVGEKPRVVPKPGDGQKIYEIDPTLKDFRSHLDYRYSEYRRIRAAIDQHEGGLEAFSRGYEKLGFTRSAEGITYREWAPGAHSAALVGDFNNWNPNADTMTRDDYGVWEIFLPNNADGSPAIPHGSRVKIRMDTPSGVKDSISAWIKFSVQAPGEIPFNGIYYDPPEEEKYVFQHPQPKRPESLRIYESHIGMSSPEPKINSYANFRDEVLPRIKRLGYNAVQIMAIQEHSYYASFGYHVTNFFAPSSRFGTPEDLKSLIDRAHELGLLVLMDIVHSHSSNNTLDGLNGFDGTDTHYFHGGPRGHHWMWDSRLFNYGSWEVLRFLLSNARWWLEEYKFDGFRFDGVTSMMYTHHGLQMTFTGNYGEYFGFATDVDAVVYLMLVNDLIHGLHPDAVSIGEDVSGMPTFCIPVPDGGVGLDYRLHMAVADKWIELLKQSDESWKMGDIVHTLTNRRWLEKCVTYAESHDQALVGDKTIAFWLMDKDMYDFMALDRPSTPRIDRGIALHKMIRLVTMGLGGEGYLNFMGNEFGHPEWIDFPRGPQTLPTGKVLPGNNNSYDKCRRRFDLGDADFLRYHGMQEFDQAMQHLEEKYGFMTSEHQYVSRKHEEDKVIIFERGDLVFVFNFHWSNSFFDYRVGCSRPGKYKVALDSDDALFGGFSRLDHDVDYFTTEHPHDNRPRSFSVYTPSRTAVVYALTE

SEQ ID NO: 148686 - DNA, 2459 bp, Ostreococcus tauri
  CDS (124)..(2454)
atgcgccacattcacgcgttgagcacgcgtcgcgcgcgcttcgtggatccgcccgtgcgcctaacgcgcgcccgggccgtcgacgacgccgacgcccacgcgcgatcgacacacccgcgcgcgatgcacccatcggcgtcgtccacggtccgagcgcgcgtgacgcgcacgggcggacgcacgacgcgcgcgcgacgcgtttttcacgcggcatcgccgtccaccggcgccgcgccagcgtgtccgccgaagcgatcggcgacgcgaccgcgcgcgtcgtcggagaccgaggtcgagacgtcgacgacgacggcgcgatcgatggaggcggcggatgggagcgaagcggtggcgctggatgaacagctcgcgccgcacgtcgagcatttgagatatcgttacgcgacgtttcgcgaacgaaaatcagcgatcgaagccgcggaggggtcgctggacgcgttctccagagggtacgaacgcttcgggttcaccacggacgcgagtggggagataacgttccgggagtgggcgcccgcggcgtcgcacgtggcgctgatcggagactttaacgattggaacggcgacgcgacgccgctgcgtcggagcgagttcgggacgtgggaggtaacgctgccgaagggggcgatcgcgcacggatcgcgggtgaaggttcgcgtgtacaacgatcaagggcagtttgatcgcattccggcgtggattcgaagggcgacggtggagcccggggtcatgggcgccggatacgacggcgtctactgggcgcccgaggaaaagtatgagttcaagaacgcgaagccaaagaagcccgtggcgtcgaggatttacgaagcgcacgtgggaatgagctcgaatgatccgaagattaactcctacagggagttcgccgacgacgtgctcccgagagtcgccgcgggtgggtacaatacggtgcaactcatggcggtgatggagcacgcgtattacggatccttcggttatcacgtcacgaatccgttcgcggtttcctcgcgtagcgggaccccggaagatttgaagtacttggtggacaaggcacacggtctgggcgttcgagtgctcttggacgtcgtgcactcgcacgcgtcgagcaacacgaacgacggcatcgccggtttcgacttgggacaacgcgacgtggattcctactttggcaccggtgaagccggctaccactggctgtgggactccagattgtacaagtacgacaactgggaggtaatgcgctacttgctttcgaacttacgatactgggtcgacgaatacaattttgacggcttccgattcgacggcgtcacgtccatgttgtaccatcaccacggattacaaatggagttttccggagactacgaacaatacttttccacgtcgacgaacgtcgacggcgtggtgtacttgatgctcgcgaacgagttgcttcactcgttgtaccctgaaatcgaagtcatcgccgaagatgtgagcgggatgcccacgctttgcttgccggtggataagggcggcgtcggtttcgacgctcgtctggcgatgtccatccccgacttttgggtcaagtacctcaaaactaagccggatgagcaatggagcacgtttgaaatggtaagcacgctgtgcaaccgtcgatacacagaaaaggcgatcgcgtatgtggaatcgcacgaccaatccatcgtcggcgacaagacgactgcgttttggttgatggacgccgagatgtatgatggtatgtccacgctgaacgaaccctccgtcgtcatcgagcgtggtatcgctctgcacaagatgcttcgtctcgtcaccgcctctctcggcggtgagggctacctcacgttcatgggcaacgagttcggccatccggagtgggtggacttcccgcgagagggcaacggctggagccacgattactgccgtcgtcgctgggacttggcggacgccgatcacctgcgttaccaacaccttctcaacttcgacaagggcatgctcgcgctcgatgatcagtactcctacatcgcggccgcacatcagcacgtgagcaccgccgacgacaaccgacagattctcgtctttgagcgcggtccgctcgtcttcgtgttcaatttccatccgcaccaaacgtacgagggattggagatcggcgtcccagagcccggaaagtaccagctcgccttcgacaccgacgcacgagagttcggtgggaagtcccgctgcggtttttccgtcgatcatttcacctctccggatggtcccgagtcctgggtcggcccgtacgagcaaccgccacgcgcggcgaagatgctcgtcttatccccggcccgaagcgcccaggtctacttcaaggttcccgagcccgcaccatcggccgaaccctccgtgagcgacatcgttcgcgagatcgacgccgacgccggcgccgcgcgatagagtga

SEQ ID NO: 148687 - protein, 776 aa, Ostreococcus tauri
MHPSASSTVRARVTRTGGRTTRARRVFHAASPSTGAAPACPPKRSATRPRASSETEVETSTTTARSMEAADGSEAVALDEQLAPHVEHLRYRYATFRERKSAIEAAEGSLDAFSRGYERFGFTTDASGEITFREWAPAASHVALIGDFNDWNGDATPLRRSEFGTWEVTLPKGAIAHGSRVKVRVYNDQGQFDRIPAWIRRATVEPGVMGAGYDGVYWAPEEKYEFKNAKPKKPVASRIYEAHVGMSSNDPKINSYREFADDVLPRVAAGGYNTVQLMAVMEHAYYGSFGYHVTNPFAVSSRSGTPEDLKYLVDKAHGLGVRVLLDVVHSHASSNTNDGIAGFDLGQRDVDSYFGTGEAGYHWLWDSRLYKYDNWEVMRYLLSNLRYWVDEYNFDGFRFDGVTSMLYHHHGLQMEFSGDYEQYFSTSTNVDGVVYLMLANELLHSLYPEIEVIAEDVSGMPTLCLPVDKGGVGFDARLAMSIPDFWVKYLKTKPDEQWSTFEMVSTLCNRRYTEKAIAYVESHDQSIVGDKTTAFWLMDAEMYDGMSTLNEPSVVIERGIALHKMLRLVTASLGGEGYLTFMGNEFGHPEWVDFPREGNGWSHDYCRRRWDLADADHLRYQHLLNFDKGMLALDDQYSYIAAAHQHVSTADDNRQILVFERGPLVFVFNFHPHQTYEGLEIGVPEPGKYQLAFDTDAREFGGKSRCGFSVDHFTSPDGPESWVGPYEQPPRAAKMLVLSPARSAQVYFKVPEPAPSAEPSVSDIVREIDADAGAAR

SEQ ID NO: 148688 - DNA, 2843 bp, Manihot esculenta
  CDS (54)..(2612)
ttatattttgcttagggagagagaaataagaacgattggctaagttggccaagatgttaggttctttgggtctgtttccggcgcctgattttgggtctttatcaccttctttagccaagaactccaaaagggctgtggaaagaaactgtcaaattgtcaaacaaaaccagattgaactgactggatgtcgaaaattgcctggtggtcctagatccctttttctaccaagaatctcaatagataagagggtgaagcaaggtcttgcaatctcagcagctgtggcagatgagaagaaaacgataacaagctttgaggaggacatggaaattactggtcttttgagcattgatcctgggttagaatcatttaaagatcatttcagatatagaatgcaaagatttacaaatcagaaacaactcattgaaaaatatgaaggtggtcttgaggaattttcaaaaggttacctgaaatttggatttaatagggaagcaggtggaattgtctatcgtgagtgggctcctgcagctcaggaagcacaagttattggggactttaatggttggattggttccaaccataggatggaaaagaatgaatttggtgtttggagtatcaacatacctgattctggcggaaatccagccattcatcacaattcaagggtcaaattcagattcaagcatggtgatggagtttgggttgatcgaattccagcttggattagatatgccactgtggaccccacaaaatttggagcaccatatgatggtgtctactgggatcctccacctccagaaaggtaccaattcaactatccccggcctccaaaaccccaggcccctcgcatatatgaggctcatgtgggaatgagtagctcagaacctcgcattaatacatacagagagtttgctgatgatgttctccctcgtatacgggcaaacaactataatacggttcagttaatggctgttatggagcattcatattatgggtcgtttgggtaccatgttacaaacttttttgctgtaagcagtagatctggaactcctgaggatcttaaatatttaattgataaagctcatagcttgggtttacgtgttctgatggatgttgttcacagtcacgcaagtaacaatatcactgatggacttaatggctttgatgttggccaaagcactcaagattcctactttcacactggagatcgaggctaccataagctatgggatagcagactctttaactatgctaattgggaagttattcgcttccttctgtccaacttaagatggtggcttgaggagtacaaatttgatggattccgatttgacggagtaacatcaatgttgtaccatcatcatgggatcaacatggcatttacaggggattataatgagtatttcagtgaggcaactgatattgatgccgttgtttatctgatgctggccaattctctgattcacaacatcttgcctgatgctactgtgattgctgaagatgtttctggcatgcctgggcttggccgttctgtctctgaggggggaataggttttgactatcgcctagcaatggccatccctgacaaatggatcgattacttgaaaaacaagagtgatgaagagtggtcaatgaaggaaatctcatggagcttaactaataggagatacactgagaaatgtgttgcttatgctgagagtcatgaccaagccattgtaggtgacaagacggttgcctttttattaatggataaagaaatgtattatggaatgtcttgtttgacagatgcttcacctatggttgatcgcggggtagcgcttcataagatggttcaacttttaactatggcttttggaggtaagggctacctaaattttatgggaaatgagtttggccatcctgagtggattgacttcccaagagaaggcaatgggtggagttatgacaagtgcagacgccaatggaacctagttgacactgaacacttgagatacaagttcatgaatgcatttgacagggctatgaacttgcttgatgaaaagtattcattcctagcatcaacaaagcagattgtgagcagcacaaatgaagaggataaggttatcgtctttgagcgtggggacctggtttttgtattcaattttcatccagagaatacatatgatgggtacaaggttggttgcgacttgcccggaaagtatcgagttgcattggatagtgatgcttgggagtttggtggacgtggaagagtgggccatgatgtggaccattttacatctcctgaagggatacctggagtgcccgaaacaaatttcaacaatcgtccaaactccttcaaaatactctctgcagctcgcacttgtgtggtttactatagagttgaagaaaaagaaggaaatcacaacagtagtgatattggtgctgcaaatgagacattgacagacattgcaaagctgggagattttgaaggtatcaacgagacatcaccagcagatgctgtggcaaagcaggaggatcttaaggcagcacaaccttctttgattgccgatgatattgcaacaaaggcaaacacagaaacagaagagattgaggaagagacatcggatgacaaatgaaagtgacaatccatcatccaattcctgagttcaggtttagacatgaggctttatcactgggaagttctttttcaggttttaaattgcaaggggattttgtatggccctcatcagtagacatcagtaggtatgctgctgtaaataagtcagcttgctgttaagttatgcttttcttaattgctggggagttgtcttgtaaataaaaaataaataaatccttatttaaaaaaa

SEQ ID NO: 148689 - protein, 852 aa, Manihot esculenta
MLGSLGLFPAPDFGSLSPSLAKNSKRAVERNCQIVKQNQIELTGCRKLPGGPRSLFLPRISIDKRVKQGLAISAAVADEKKTITSFEEDMEITGLLSIDPGLESFKDHFRYRMQRFTNQKQLIEKYEGGLEEFSKGYLKFGFNREAGGIVYREWAPAAQEAQVIGDFNGWIGSNHRMEKNEFGVWSINIPDSGGNPAIHHNSRVKFRFKHGDGVWVDRIPAWIRYATVDPTKFGAPYDGVYWDPPPPERYQFNYPRPPKPQAPRIYEAHVGMSSSEPRINTYREFADDVLPRIRANNYNTVQLMAVMEHSYYGSFGYHVTNFFAVSSRSGTPEDLKYLIDKAHSLGLRVLMDVVHSHASNNITDGLNGFDVGQSTQDSYFHTGDRGYHKLWDSRLFNYANWEVIRFLLSNLRWWLEEYKFDGFRFDGVTSMLYHHHGINMAFTGDYNEYFSEATDIDAVVYLMLANSLIHNILPDATVIAEDVSGMPGLGRSVSEGGIGFDYRLAMAIPDKWIDYLKNKSDEEWSMKEISWSLTNRRYTEKCVAYAESHDQAIVGDKTVAFLLMDKEMYYGMSCLTDASPMVDRGVALHKMVQLLTMAFGGKGYLNFMGNEFGHPEWIDFPREGNGWSYDKCRRQWNLVDTEHLRYKFMNAFDRAMNLLDEKYSFLASTKQIVSSTNEEDKVIVFERGDLVFVFNFHPENTYDGYKVGCDLPGKYRVALDSDAWEFGGRGRVGHDVDHFTSPEGIPGVPETNFNNRPNSFKILSAARTCVVYYRVEEKEGNHNSSDIGAANETLTDIAKLGDFEGINETSPADAVAKQEDLKAAQPSLIADDIATKANTETEEIEEETSDDK

SEQ ID NO: 148690 - DNA, 2873 bp, Ipomoea batatas
  CDS (46)..(2673)
ggagctcagaagactctgattctgctgcagattgcgacaaatattatgcaaacttcttgcgccctcctatcgtcaccttctcgtgggtctttcatacccattccgactaaaaatctcttgcgggctgctagaaataagagatcttttgcttcaccatgcactactggtgcgatctttgaatctcaaaagctctccagggatgttttttctattacagcatcaaggcttaggaatgacagatggagggagcacagttcaaatatttcatctgtcttgactgatgacagttcaacaatggcggacgtagagaaagaaattgaaaatatccacattcttggcctagaccaagggttgaaaccgtataaagatcacttcagatatagaatgaagagatatttggatcagaaaaagctctttgaaaattttgaagggggtcttgaggaatttgctttaggttatttgaaatttgggtttaacaaagaagaaggctgcattgtctatcaggaatgggcccctgctgctcaggaagcagaaattattggtgatttcaatgagtgggatgggtccagtcacaagatggagaagaaccaatttggtgtatggagcataaaaattcctgattgtgatggaaagccagctattccgcacaactccagagttaagttccgttttaagcacaacagtggtgtttggattgataggatcccagcttggataaagtatgctacagttgaccctacaaagtttgctgcaccttatgatggtgtgtactgggacccaccagcttctgaaagatatgattttaaatacccccgccctcctcaacccaaggctccccggatatatgaagctcatgttgggatgagtagcttggaacctcgtgtaaattcataccgagaatttgctgatgatgttttaccccgtataaaggaaaacaattataatacagtccagttgatggctataatggagcattcctactatgcatcatttggatatcatgtcacaaacttttttgcagtgagtagtagatctggaacaccagaggaccttaagtacctgattgataaagcacatagcttaggtttacgggtcttgatggatgttgtccacagccatgctagcaacaatgtcaccgatggtctcaacggctttgatgttggacaaggttcacaagattcttactttcatactggtgaccggggctaccatcaagtgtgggatagcaggctgtttaattattctaattgggaagtcctgcgtttccttctttccaacttgaggtggtggctagaagagtacaaatttgatggatttcgattcgatggagtaacttcaatgttatatcatcaccatggaatcaatctgacattcacaggatactataatgagtactttagtgagaagacagatgttgatgctgtggtgtatttgatgctggccaatactctgatccacagtatcatgccagatgcaactgtgattgctgaagatgtgtctggtatgcctggactttgccggtctgtgtctgagggtggtattgggtttgactaccggttagcaatgggcattccagacaagtggattgattacttaaagaataagagttatgcagattggtcaatgaaagaaataacatggactttgacaaataggcgatacacagagaaatgtgtagcttatgcagagagccatgaccaggctattgttggagacaaaactattgcgtttctcctaatgtacagagaaatgtattctggcatgtcctgtttgacagaagcttctcctgttgttgatcatggaattgcacttgtcaagatgattcactttctatcaatggcattaggaggagaagcgtatctaaatttcatgggaaatgagtttggccatcctgattggattgacttccctagagatggcaacaactggagttatgagaagtgcagacgccaatggaatcttgtggatacagatcacttgagatacaagttcatgaatgcatttgacagggccatgaatttgcttgatgaggagttttccttccttgcttcagaaaaacagatagtaagcagcatagacgaagataataaggtaattgtatttgagcgtggagatctggtatttgtatttaactttcatccagagaatacatacgaggggtataaagttggatgcgacttgccaggtaaataccaagttgcactggatagtgatgcttgggtcttcggtgggcatggcagggtgggccatgatgtagaccatttcacatcacctgaaggaatacctggagttgctgaaacaaatttcaatggtcgtccaaactctttcaaagtactctctcctcctcaggcatgcgtggcctattacagagttgaagaaagcttagacgaagtccaagatgaacagcctgccagttttactgagactatatcaaccaatctagtgttggtaagtgatgacgatcttcaagaattgcccaccgaaaatcttcaggaattgcctaaggtgggtaatagtgatgttgacggtcttcaagatttgcctgccatgggtaatagtgatgttgatgatcttcaagaattgggtactgtggctaatagtgatgttgggcaaagcaaggtgcaagacctggaggagaaccccccggaactggatgatgagtcagatgattgaggcagctatctatctttgagcatatatgtacagatggaagagaatcaaggttgtcttgttatgtttaatgtttttagaatggctgtaaatataaccttgtgaaactaaatccatcttttgaagttggtcctttgatgtctgcaataaagcaaaggcttgtataaaaaaaaaaaaaaaaaaaaaaaaaaaaaaaaaaaaaa

SEQ ID NO: 148691 - protein, 875 aa, Ipomoea batatas
MQTSCALLSSPSRGSFIPIPTKNLLRAARNKRSFASPCTTGAIFESQKLSRDVFSITASRLRNDRWREHSSNISSVLTDDSSTMADVEKEIENIHILGLDQGLKPYKDHFRYRMKRYLDQKKLFENFEGGLEEFALGYLKFGFNKEEGCIVYQEWAPAAQEAEIIGDFNEWDGSSHKMEKNQFGVWSIKIPDCDGKPAIPHNSRVKFRFKHNSGVWIDRIPAWIKYATVDPTKFAAPYDGVYWDPPASERYDFKYPRPPQPKAPRIYEAHVGMSSLEPRVNSYREFADDVLPRIKENNYNTVQLMAIMEHSYYASFGYHVTNFFAVSSRSGTPEDLKYLIDKAHSLGLRVLMDVVHSHASNNVTDGLNGFDVGQGSQDSYFHTGDRGYHQVWDSRLFNYSNWEVLRFLLSNLRWWLEEYKFDGFRFDGVTSMLYHHHGINLTFTGYYNEYFSEKTDVDAVVYLMLANTLIHSIMPDATVIAEDVSGMPGLCRSVSEGGIGFDYRLAMGIPDKWIDYLKNKSYADWSMKEITWTLTNRRYTEKCVAYAESHDQAIVGDKTIAFLLMYREMYSGMSCLTEASPVVDHGIALVKMIHFLSMALGGEAYLNFMGNEFGHPDWIDFPRDGNNWSYEKCRRQWNLVDTDHLRYKFMNAFDRAMNLLDEEFSFLASEKQIVSSIDEDNKVIVFERGDLVFVFNFHPENTYEGYKVGCDLPGKYQVALDSDAWVFGGHGRVGHDVDHFTSPEGIPGVAETNFNGRPNSFKVLSPPQACVAYYRVEESLDEVQDEQPASFTETISTNLVLVSDDDLQELPTENLQELPKVGNSDVDGLQDLPAMGNSDVDDLQELGTVANSDVGQSKVQDLEENPPELDDESDD

SEQ ID NO: 148692 - DNA, 2859 bp, Ipomoea batatas
  CDS (46)..(2673)
ggagctcagaagactctgattctgctgcagattgcgacaaatattatgcaaacttcttgcgccctcctatcgtcaccttctcgtgggtctttcatacccattccgactaaaaatctcttgcgggctgctagaaataagagatcttttgcttcaccatgcactactggtgcgatctttgaatctcaaaagctctccagggatgttttttctattacagcatcaaggcttaggaatgacagatggagggagcacagttcaaatatttcatctgtcttgactgatgacagttcaacaatggcggacgtagagaaagaaattgaaaatatccacattcttggcctagaccaagggttgaaaccgtataaagatcacttcagatatagaatgaagagatatttggatcagaaaaagctctttgaaaattttgaagggggtcttgaggaatttgctttaggttatttgaaatttgggtttaacaaagaagaaggctgcattgtctatcaggaatgggcccctgctgctcaggaagcagaaattattggtgatttcaatgagtgggatgggtccagtcacaagatggagaagaaccaatttggtgtatggagcataaaaattcctgattgtgatggaaagccagctattccacacaactccagagttaagttccgttttaagcacaacagtggtgtttggattgataggatcccagcttggataaagtatgctacagttgaccctacaaagtttgctgcaccttatgatggtgtgtactgggacccaccagcttctgaaagatatgattttaaatacccccgccctcctcaacccaaggctccccggatatatgaagctcatgttgggatgagtagcttggaacctcgtgtaaattcataccgagaatttgctgatgatgttttaccccgtataaaggaaaacaattataatacagtccagttgatggctataatggagcattcctactatgcatcatttggatatcatgtcacaaacttttttgcagtgagtagtagatctggaacaccagaggaccttaagtacctgattgataaagcacatagcttaggtttacgggtcttgatggatgttgtccacagccatgctagcaacaatgtcaccgatggtctcaacggctttgatgttggacaaggttcacaagattcttactttcatactggtgaccggggctaccatcaagtgtgggatagcaggctgtttaattattctaattgggaagtcctgcgtttccttctttccaacttgaggtggtggctagaagagtacaaatttgatggatttcgattcgatggagtaacttcaatgttatatcatcaccatggaatcaatctgacattcacaggagactataatgagtactttagtgagaagacagatgttgatgctgtggtgtatttgatgctggccaatactctgatccacagtatcatgccagatgcaactgtgattgctgaagatgtgtctggtatgcctggactttgccggtctgtgtctgagggtggtattgggtttgactaccggttagcaatgggcattccagacaagtggattgattacttaaagaataagagttatgcagattggtcaatgaaagaaataacatggactttgacaaataggcgatacacagagaaatgtgtagcttatgcagagagccatgaccaggctattgttggagacaaaactattgcgtttctcctaatggacagagaaatgtattctggcatgtcctgtttgacagaagcttctcctgttgttgatcatggaattgcacttgtcaagatgattcactttctatcaatggcattaggaggagaagcgtatctaaatttcatgggaaatgagtttggccatcctgattggattgacttccctagagatggcaacaactggagttatgagaagtgcagacgccaatggaatcttgtggatacagatcacttgagatacaagttcatgaatgcatttgacagggccatgaatttgcttgatgaggagttttcattccttgcttcagaaaaacagatagtaagcagcatagacgaagataataaggtaattgtatttgagcgtggagatctggtatttgtatttaactttcatccagagaatacatacgaggggtataaagttggatgcgacttgccaggtaaataccaagttgcactggatagtgatgcttgggtctttggtgggcatggcagggtgggccatgatgtagaccatttcacatcacctgaaggaatacctggagttgctgaaacaaatttcaatggtcgtccaaactctttcaaagtactctctcctcctcaggcatgcgtggcctattacagagttgaagaaagcttagacgaagtccaagatgaacagcctgccagttttactgagactatatcaaccaatctagtgttggtaagtgatgacgatcttcaagaattgcccaccgaaaatcttcaggaattgcctaaggtgggtaatagtgatgttgacggtcttcaagatttgcctgccatgggtaatagtgatgttgatgatcttcaagaattgggtactgtggctaatagtgatgttgggcaaagcaaggtgcaagacctggaggagaaccccccggaactggatgatgagtcagatgattgaggcagctatctatctttgagcatatatgtacagatggaagagaatcaaggttgtcttgttatgtttattgtttttagaatggctgtaaatataaccttgtgaaactaaatccatcttttgaagttggtcctttgatgtctgcaataaagcaaaggcttgtaaaaaaaaaaaaaaaaaaaaaaaaaa

SEQ ID NO: 148693 - protein, 875 aa, Ipomoea batatas
MQTSCALLSSPSRGSFIPIPTKNLLRAARNKRSFASPCTTGAIFESQKLSRDVFSITASRLRNDRWREHSSNISSVLTDDSSTMADVEKEIENIHILGLDQGLKPYKDHFRYRMKRYLDQKKLFENFEGGLEEFALGYLKFGFNKEEGCIVYQEWAPAAQEAEIIGDFNEWDGSSHKMEKNQFGVWSIKIPDCDGKPAIPHNSRVKFRFKHNSGVWIDRIPAWIKYATVDPTKFAAPYDGVYWDPPASERYDFKYPRPPQPKAPRIYEAHVGMSSLEPRVNSYREFADDVLPRIKENNYNTVQLMAIMEHSYYASFGYHVTNFFAVSSRSGTPEDLKYLIDKAHSLGLRVLMDVVHSHASNNVTDGLNGFDVGQGSQDSYFHTGDRGYHQVWDSRLFNYSNWEVLRFLLSNLRWWLEEYKFDGFRFDGVTSMLYHHHGINLTFTGDYNEYFSEKTDVDAVVYLMLANTLIHSIMPDATVIAEDVSGMPGLCRSVSEGGIGFDYRLAMGIPDKWIDYLKNKSYADWSMKEITWTLTNRRYTEKCVAYAESHDQAIVGDKTIAFLLMDREMYSGMSCLTEASPVVDHGIALVKMIHFLSMALGGEAYLNFMGNEFGHPDWIDFPRDGNNWSYEKCRRQWNLVDTDHLRYKFMNAFDRAMNLLDEEFSFLASEKQIVSSIDEDNKVIVFERGDLVFVFNFHPENTYEGYKVGCDLPGKYQVALDSDAWVFGGHGRVGHDVDHFTSPEGIPGVAETNFNGRPNSFKVLSPPQACVAYYRVEESLDEVQDEQPASFTETISTNLVLVSDDDLQELPTENLQELPKVGNSDVDGLQDLPAMGNSDVDDLQELGTVANSDVGQSKVQDLEENPPELDDESDD

SEQ ID NO: 148694 - DNA, 3027 bp, Ipomoea batatas
  CDS (178)..(2805)
aagggatttttgtttgtttgctttgtatgctattctattctacttcgtacagtgatgaaggtgtcacattcatcaagactcctctcccatgtccctaatttattcaattcatttcgcttctctgcttctcggtgagctcagaagactctgattctgctgcagattgcgacaaatattatgcaaacttcttgcgccctcctatcgtcaccttctcgtgggtctttcatacccattccgactaaaaatctcttgcgggctgctagaaataagagatcttttgcttcaccatgcactactggtgcgatctttgaatctcaaaagctctccagggatgttttttctattacagcatcaaggcttaggaatgacagatggagggagcacagttcaaatatttcatctgtcttgactgatgacagttcaacaatggcggacgtagagaaagaaattgaaaatatccacattcttggcctagaccaagggttgaaaccgtataaagatcacttcagatatagaatgaagagatatttggatcagaaaaagctctttgaaaattttgaagggggtcttgaggaatttgctttaggttatttgaaatttgggtttaacaaagaacaaggctgcattgtctatcaggaatgggcccctgctgctcaggaagcagaaattattggtgatttcaatgagtgggatgggtccagtcacaagatggagaagaaccaatttggtgtatggagcataaaaattcctgattgtgatggaaagccagctattccacacaactccagagttaagttccgttttaagcacaacagtggtgtttggattgataggatcccagcttggataaagtatgctacagttgaccctacaaagtttgctgcaccttatgatggtgtgtactgggacccaccagcttctgaaagatatgattttaaatacccccgccctcctcaacccaaggctccccggatatatgaagctcatgttgggatgagtagcttggaacctcgtgtaaattcataccgagaatttgctgatgatgttttaccccgtataaaggaaaacaattataatacagtccagttgatggctataatggagcattcctactatgcatcatttggatatcatgtcacaaacttttttgcagtgagtagtagatctggaacaccagaggaccttaagtacctgattgataaagcacatagcttaggtttacgggtcttgatggatgttgtccacagccatgctagcaacaatgtcaccgatggtctcaacggctttgatgttggacaaggttcacaagattcttactttcatactggtgaccggggctaccatcaagtgtgggatagcaggctgtttaattattctaattgggaagtcctgcgtttccttctttccaacttgaggtggtggctagaagagtacaaatttgatggatttcgattcgatggagtaacttcaatgttatatcatcaccatggaatcaatctgacattcacaggagactataatgagtactttagtgagaagacagatgttgatgctgtggtgtatttgatgctggccaatactctgatccacagtatcatgccagatgcaactgtgattgctgaagatgtgtctggtatgcctggactttgccggtctgtgtctgagggtggtattgggtttgactaccggttagcaatgggcattccagacaagtggattgattacttaaagaataagagttatgcagattggtcaatgaaagaaataacatggactttgacaaataggcgatacacagagaaatgtgtagcttatgcagagagccatgaccaggctattgttggagacaaaactattgcgtttctcctaatggacagagaaatgtattctggcatgtcctgtttgacagaagcttctcctgttgttgatcatggaattgcacttgtcaagatgattcactttctatcaatggcattaggaggagaagcgtatctaaatttcatgggaaatgagtttggccatcctgattggattgacttccctagagatggcaacaactggagttatgagaagtgcagacgccaatggaatcttgtggatacagatcacttgagatacaagttcatgaatgcatttgacagggccatgaatttgcttgatgaggagttttccttccttgcttcagaaaaacagatagtaagcagcatagacgaagataataaggtaattgtatttgagcgtggagatctggtatttgtatttaactttcatccagagaatacatacgaggggtataaagttggatgcgacttgccaggtaaataccaagttgcactggatagtgatgcttgggtctttggtgggcatggcagggtgggccatgatgtagaccatttcacatcacctgaaggaatacctggagttgctgaaacaaatttcaatggtcgtccaaactctttcaaagtactctctcctcctcaggcatgcgtggcctattacagagttgaagaaagcttagacgaagtccaagatgaacagcctgccagttttactgagactatatcaaccaatctagtgttggtaagtgatgacgatcttcaagaattgcccaccgaaaatcttcaggaattgcctaaggtgggtaatagtgatgttgacggtcttcaagatttgcctgccatgggtaatagtgatgttgatgatcttcaagaattgggtactgtggctaatagtgatgttgggcaaagcaaggtgcaagacctggaggagaaccccccggaactggatgatgagtcagatgattgaggcagctatctatctttgagcatatatgtacagatggaagagaatcaaggttgtcttgttatgtttaatgtttttagaatggctgtaaatataaccttgtgaaactaaatccatcttttgaagttggtcctttgatgtctgcaataaagcaaaggcttgtataaattatgttgtcatttaagagtacagaattcttacaaaaaaaaaaaaaaaaaaaaaaaa

SEQ ID NO: 148695 - protein, 875 aa, Ipomoea batatas
MQTSCALLSSPSRGSFIPIPTKNLLRAARNKRSFASPCTTGAIFESQKLSRDVFSITASRLRNDRWREHSSNISSVLTDDSSTMADVEKEIENIHILGLDQGLKPYKDHFRYRMKRYLDQKKLFENFEGGLEEFALGYLKFGFNKEQGCIVYQEWAPAAQEAEIIGDFNEWDGSSHKMEKNQFGVWSIKIPDCDGKPAIPHNSRVKFRFKHNSGVWIDRIPAWIKYATVDPTKFAAPYDGVYWDPPASERYDFKYPRPPQPKAPRIYEAHVGMSSLEPRVNSYREFADDVLPRIKENNYNTVQLMAIMEHSYYASFGYHVTNFFAVSSRSGTPEDLKYLIDKAHSLGLRVLMDVVHSHASNNVTDGLNGFDVGQGSQDSYFHTGDRGYHQVWDSRLFNYSNWEVLRFLLSNLRWWLEEYKFDGFRFDGVTSMLYHHHGINLTFTGDYNEYFSEKTDVDAVVYLMLANTLIHSIMPDATVIAEDVSGMPGLCRSVSEGGIGFDYRLAMGIPDKWIDYLKNKSYADWSMKEITWTLTNRRYTEKCVAYAESHDQAIVGDKTIAFLLMDREMYSGMSCLTEASPVVDHGIALVKMIHFLSMALGGEAYLNFMGNEFGHPDWIDFPRDGNNWSYEKCRRQWNLVDTDHLRYKFMNAFDRAMNLLDEEFSFLASEKQIVSSIDEDNKVIVFERGDLVFVFNFHPENTYEGYKVGCDLPGKYQVALDSDAWVFGGHGRVGHDVDHFTSPEGIPGVAETNFNGRPNSFKVLSPPQACVAYYRVEESLDEVQDEQPASFTETISTNLVLVSDDDLQELPTENLQELPKVGNSDVDGLQDLPAMGNSDVDDLQELGTVANSDVGQSKVQDLEENPPELDDESDD

SEQ ID NO: 148696 - DNA, 2860 bp, Triticum aestivum
  CDS (81)..(2591)
  misc_feature (2833)..(2833): n is a, g, c or t
  misc_feature (2854)..(2854): n is a, g, c or t
cgtgggtttaagcaggagacgaggcggggtcagttgggcagttaggttggatccgatccggctgcggcggcggcgacgggatggctgcgccggcattcgcagtttccgcggcggggctggcccggccgtcggctcctcgatccggcggggcagagcggagggggcgcggggtggagctgcagtcgccatcgctgctcttcggccgcaacaagggcacccgttcaccccgtgccgtcggcgtcggaggttctggatggcgcgtggtcatgcgcgcgggggggccgtccggggaggtgatgatccctgacggcggtagtggcggaacaccgccttccatcgacggtcccgttcagttcgattctgatgatctgaaggttccattcattgatgatgaaacaagcctacaggatggaggtgaagatagtatttggtcttcagagacaaatcaggttagtgaagaaattgatgctgaagacacgagcagaatggacaaagaatcatctacgagggagaaattacgcattctgccaccaccgggaaatggacagcaaatatacgagattgacccaacgctccgagactttaagtaccatcttgagtatcgatatagcctatacaggagaatacgttcagacattgatgaacacgaaggaggcatggatgtattttcccgcggttacgagaagtttggatttatgcgcagcgctgaaggtatcacttaccgagaatgggctcctggagcagattctgcagcattagttggcgacttcaacaattgggatccaaatgcagaccatatgagcaaaaatgaccttggtgtttgggagatttttctgccaaacaatgcagatggttcgccaccaattcctcacggctcacgggtgaaggtgcgaatgggtactccatctgggacaaaggattcaattcctgcttggatcaagtactccgtgcagactccaggagatataccatacaatggaatatattatgatcctcccgaagaggagaagtatgtattcaagcatcctcaacctaaacgaccaaaatcattgcggatatatgaaacacatgttggcatgagtagcccggaaccaaagatcaacacatatgcaaacttcagggatgaggtgcttccaagaattaaaagacttggatacaatgcagtgcaaataatggcaatccaagagcactcatactatggaagctttgggtaccatgttaccaatttctttgcaccaagtagccgttttgggtccccagaagatttaaaatctttgattgatagagctcacgagcttggcttggttgtcctcatggatgttgttcacagtcacgcgtcaaataataccttggacgggttgaatggttttgatggcacggatacacattacttccatggcggttcacggggccatcactggatgtgggattcccgtgtgtttaactatgggaataaggaagttataaggtttctactttccaatgcaagatggtggctagaggagtataagtttgatggtttccgattcgatggcgcgacctccatgatgtatacccatcatggattacaagtaacctttacaggaagctaccatgaatattttggctttgccactgatgtagatgcggtcgtttacttgatgctgatgaatgatctaattcatgggttttatcctgaagccgtaactatcggtgaagatgttagtggaatgcctacatttgcccttcctgttcaagttggtggggttggttttgactatcgcttacatatggctgttgcccgcaaatggattgaacttctcaaaggaaacgatgaagcttgggagatgggtaatattgtgcacacactaacaaacagaaggtggctggaaaagtgtgttacttatgctgaaagtcacgatcaagcacttgttggagacaagactattgcattctggttgatggacaaggatatgtatgatttcatggcgctgaacggaccttcgacgcctaatattgatcgtggaatagcactgcataaaatgattagacttatcacaatgggtctaggaggagagggttatcttaactttatgggaaatgagttcgggcatcctgaatggatagactttccaagaggcccacaagtacttccaagtggtaagttcatcccaggaaacaacaacagttacgacaaatgccgtcgaagatttgacctgggtgatgcagaatttcttaggtatcatggtatgcagcagtttgatcaggcaatgcagcatcttgaggaaaaatatggttttatgacatcagaccaccagtacgtatctcggaaacatgaggaagataaggtgatcgtgtttgaaaaaggggacttggtatttgtgttcaacttccactggagtagtagctatttcgactaccgggtcggctgtttaaagcctgggaagtacaaggtggtcttagactcggacgctggactctttggtggatttggtaggatccatcacactgcagagcacttcacttctgactgccaacatgacaacaggccccattcattctcagtgtacactcctagcagaacctgtgttgtctatgctccaatgaactaacagcaaagtgcagcatacgcgtgcgcgctgttgttgctagtagcaagaaaaatcgtatggtcaatacaaccaggtgcaaggtttaataaggatttttgcttcaacgagtcctggatagacaagacaacatgatgttgtgctgtgtgctcccaatccccagggcgttgtgaagaaaacatgctcatctgtgttattttatggatcagcgacgaaacctcccccaaataccccttttttttttnaaaggaggataggcccccggnctttgc

SEQ ID NO: 148697 - protein, 836 aa, Triticum aestivum
MAAPAFAVSAAGLARPSAPRSGGAERRGRGVELQSPSLLFGRNKGTRSPRAVGVGGSGWRVVMRAGGPSGEVMIPDGGSGGTPPSIDGPVQFDSDDLKVPFIDDETSLQDGGEDSIWSSETNQVSEEIDAEDTSRMDKESSTREKLRILPPPGNGQQIYEIDPTLRDFKYHLEYRYSLYRRIRSDIDEHEGGMDVFSRGYEKFGFMRSAEGITYREWAPGADSAALVGDFNNWDPNADHMSKNDLGVWEIFLPNNADGSPPIPHGSRVKVRMGTPSGTKDSIPAWIKYSVQTPGDIPYNGIYYDPPEEEKYVFKHPQPKRPKSLRIYETHVGMSSPEPKINTYANFRDEVLPRIKRLGYNAVQIMAIQEHSYYGSFGYHVTNFFAPSSRFGSPEDLKSLIDRAHELGLVVLMDVVHSHASNNTLDGLNGFDGTDTHYFHGGSRGHHWMWDSRVFNYGNKEVIRFLLSNARWWLEEYKFDGFRFDGATSMMYTHHGLQVTFTGSYHEYFGFATDVDAVVYLMLMNDLIHGFYPEAVTIGEDVSGMPTFALPVQVGGVGFDYRLHMAVARKWIELLKGNDEAWEMGNIVHTLTNRRWLEKCVTYAESHDQALVGDKTIAFWLMDKDMYDFMALNGPSTPNIDRGIALHKMIRLITMGLGGEGYLNFMGNEFGHPEWIDFPRGPQVLPSGKFIPGNNNSYDKCRRRFDLGDAEFLRYHGMQQFDQAMQHLEEKYGFMTSDHQYVSRKHEEDKVIVFEKGDLVFVFNFHWSSSYFDYRVGCLKPGKYKVVLDSDAGLFGGFGRIHHTAEHFTSDCQHDNRPHSFSVYTPSRTCVVYAPMN

SEQ ID NO: 148698 - DNA, 3549 bp, Pisum sativum
  CDS (220)..(2988)
ccattcttcaccgtacaatacatccctatctataataaacaacaattttcttctcatcattatatcattttattcaattattaaatagttttattctttcaagaagttaatgcgaatcattttttactctgtatgtcatcacacttctcttgcctccttctactcaattttttagatctcttcttctttgcaatataaaccctaagctgatagaagaagatggtttatacaatctcaggaattcgatttcccgttcttccttctctgcacaagtcgaccttacgctgcgatcgcagagcttcatctcactctttttttctcaagaacaactcgtcatcattctctcggacctcactttatgcaaagttttcccgcgattctgaaaccaaatcttccacaattgctgaatctgataaagtacttattcctgaagatcaagataactctgtatccttggcagatcaacttgaaaatcctgatataacctcagaggatgcacagaacttggaggatttaaccatgaaagatgggaataagtacaatattgatgaatcaactagcagttatagagaggttggagatgagaaaggttctgttacgtcatcatcacttgtagatgttaacaccgacactcaagccaagaagacatcagttcattcagacaagaaagtaaaagtagataaacctaagatcattcctccacccggtactgggcagaaaatatatgagattgatccacttttgcaagctcaccgtcagcatcttgatttccgttatggacaatacaaaagaattcgggaggaaattgacaaatatgaaggtggtcttgatgcattttcgcgtgggtacgaaaagtttggcttcacacgcagtgctacaggcattacttacagggagtgggcacctggagctaagtcagcagcattagttggagatttcaacaattggaatccaaatgcagatgtaatgactaaggacgcttttggtgtatgggagatcttcttgccaaacaatgccgatggttcgccaccaattcctcatggttctcgagtcaagatccacatggatactccctctgggatcaaggactcgattcctgcttggatcaaattctctgtacaggctcctggtgaaattccatacaatggaatatactatgatcccccagaggaggaaaagtatgtcttcaaacatccacagccaaaacgaccacagtcaattagaatatatgagtcacacattggaatgagtagcccggagccaaaaatcaacacatatgcgaactttagagatgatgtactacctcgcattaaaaaacttggctataatgctgtccagattatggctatccaagaacattcttattatgctagttttgggtaccatgttactaatttctttgcacctagcagtcggtttggtactccagaagatctcaagtctctgatagacagagcccatgaactaggcctgcttgttctgatggatattgtacatagccattcctcaaataatacattggatggcctgaacatgtttgatggaactgatggtcattacttccatcctggttcacggggttatcattggatgtgggattctcgcctttttaactatggaagctgggaagtactaaggtacctactttcaaatgcaagatggtggctggatgaatataagtttgatgggtttcgatttgatggcgtcacatcaatgatgtacactcatcatggactgcaggtatcttttaccggaaattacagtgagtattttggtttagcaactgatgttgaggctgtggtttacatgatgcttgttaatgatctcattcacgggctcttccctgaagctgtttcaattggtgaagatgtgagtggaatgccaacattctgccttccgacgcaagatggtgggattggctttaactaccgcttgcatatggctgttgcagacaagtggattgagcttcttaagaaacaagatgaagattggagaatgggtgatatagtccacacactgacaaacagaaggtggctggaaaaatgtgtggtttatgctgaaagtcatgaccaggccttggttggtgataagacactagcattttggttgatggacaaggatatgtatgacttcatggctttagacaggccatctactcctctaatagatcgtggtatagcattacacaaaatgattcggcttattactatgggccttggtggtgaagggtatttgaattttatggggaatgaattcggacatcctgagtggatcgattttccaaggggtgagcaacatcttcctaatggcaaaatagttcctgggaataacaacagttatgataaatgcagacgtagatttgacttgggtgatgcagattatctaagatatcatggaatgcaagaatttgatcgagctatgcagcatctagaagagagatatggtttcatgacttctgagcaccaatatatttcacggaaaaatgaaggtgacagagttataatctttgaaagagacaacctggtctttgtcttcaattttcactggaccaacagttattcagattacaaggttggctgtttaaagccagggaaatataagattgtcttggattcagatgataccttgtttggtggcttcaataggctcaatcatactgctgagtacttcacctctgaagggtggtatgatgaccggcctcgatctttcctcgtttatgcaccttctagaacagcagtggtgtatgcccttgcggatggagttgaatcagagccaattgaactgtcagatggagtagaatcagagccaattgagctgtcagttggagttgaatcagagccaattgagctgtcagttgaagaagctgaatcagagccaattgagcggtcagttgaagaagttgaatcagagacaactcaacagtcagttgaagttgaatcagagacaactcaacagtcagttgaagttgaatcagagacaactcaatagtcagttgaagttgaaccatgatgacaagtttttctggaatgaatatatcaatttcataatggcatcagtgcaatcaagtcaaaaccagccaaccaacttaaggtgattagagcaggctctgaaactgcaaggcggagcccttgtgttaacttaatctttagtgcggcagcaaaccaacgttgaagtgtttgtacccattgcttgctaggtcaattatgtatagcacgtcaagttttttgtttttacttggggtttaataggcacaagttgcgtggcgtgtgaatgtgaaacaacaaatgtactgtcctcagatcctccgtttctgtggacatataaatcctttttacccataagtgcacaaaccttaattaaaccctggaaagttttgcgggaggccttatatatgatttctcctttcagaattaaaagttgagtcatagcaatagggccgtgctgatgaaataattgttttgtacacggtgaaaatagtattgccttactataaaatataaatggtggaacctttgcctccaattgcaaaaaaaaaaaaaaaaggaattc

SEQ ID NO: 148699 - protein, 922 aa, Pisum sativum
MVYTISGIRFPVLPSLHKSTLRCDRRASSHSFFLKNNSSSFSRTSLYAKFSRDSETKSSTIAESDKVLIPEDQDNSVSLADQLENPDITSEDAQNLEDLTMKDGNKYNIDESTSSYREVGDEKGSVTSSSLVDVNTDTQAKKTSVHSDKKVKVDKPKIIPPPGTGQKIYEIDPLLQAHRQHLDFRYGQYKRIREEIDKYEGGLDAFSRGYEKFGFTRSATGITYREWAPGAKSAALVGDFNNWNPNADVMTKDAFGVWEIFLPNNADGSPPIPHGSRVKIHMDTPSGIKDSIPAWIKFSVQAPGEIPYNGIYYDPPEEEKYVFKHPQPKRPQSIRIYESHIGMSSPEPKINTYANFRDDVLPRIKKLGYNAVQIMAIQEHSYYASFGYHVTNFFAPSSRFGTPEDLKSLIDRAHELGLLVLMDIVHSHSSNNTLDGLNMFDGTDGHYFHPGSRGYHWMWDSRLFNYGSWEVLRYLLSNARWWLDEYKFDGFRFDGVTSMMYTHHGLQVSFTGNYSEYFGLATDVEAVVYMMLVNDLIHGLFPEAVSIGEDVSGMPTFCLPTQDGGIGFNYRLHMAVADKWIELLKKQDEDWRMGDIVHTLTNRRWLEKCVVYAESHDQALVGDKTLAFWLMDKDMYDFMALDRPSTPLIDRGIALHKMIRLITMGLGGEGYLNFMGNEFGHPEWIDFPRGEQHLPNGKIVPGNNNSYDKCRRRFDLGDADYLRYHGMQEFDRAMQHLEERYGFMTSEHQYISRKNEGDRVIIFERDNLVFVFNFHWTNSYSDYKVGCLKPGKYKIVLDSDDTLFGGFNRLNHTAEYFTSEGWYDDRPRSFLVYAPSRTAVVYALADGVESEPIELSDGVESEPIELSVGVESEPIELSVEEAESEPIERSVEEVESETTQQSVEVESETTQQSVEVESETTQ

SEQ ID NO: 148700 - DNA, 2517 bp, Malus domestica
  CDS (1)..(2517)
atgatgatgttggcaccgactggtttggttcttcgtcatcccactcacactcctctatcatttacctttacgagcaccaacgacgagtacccatccagactcgggcttggactcaggggcaaagagcagcaagcagtgcggttgttgaggttcggaacatctcaaaactcatcatcgcttcttcgcagacgtggttccccctcaacaacaacagcaagtggatgttccaaggcagagcctacttccaaaagtaaagctgttttcatagacgacagccccataataacagacaccgaccaaggcatggaaaaccttggaatcttgagcatcgatcaatccttgcaaccatacaaggaccacttcaactatagaatcaacagatacctggatcagagaaggcttattgagacatacgaaggaggtctacaggaatttgctcaaggttatttgaaatttggatttaacagagaagaaggtggaattgtgtaccgtgaatgggcccctgctgctcaggaggcacaacttattggggactttaatggatgggatggctccaagcacaagatggacaagaaccaatttggggtttggagtatcaagatacccgattctggtgaaaattcagccattcctcacaattcaagggttaaatttcggttcaagcatggaggtggagtttgggttgatcgcatccctgcttggattcaatatgccaccgtggacccagcaaggtttgcagcaccatatgatggtgtctactgggatccaccaccatcagaaaggtttcagttcaagtatcctcgtcctccaaaacccaaggctccacgaatatatgaggcacatgttggaatgagtagctcagaaccccgcatcagttcatatagagaatttgctgatgacgttctaccgcgtatccaagcaaataactataacacagtccagttgatggccgtgatggagcattcctattatgcatcatttggttatcatgtgacaaacttctttgccgtcagcagtagatctggaacacctgaggaccttaaatatctaattgacaaagcccattccctaggtttgcgggtattgatggatgttattcacagccatgcaagtaacaacattactgatggcctcaatggctttgaagttggtcaaagctcacaagagtcctacttccacacaggagatagaggctatcataagttatgggatagccgacttttcaactatgctaattgggaagttctccgcttccttttatccaacttgaggtggtggctggaggagtttaaatttgatggttttcgatttgatggagtaacttcaatgttatatcatcaccacgggataaacatggcattttcaggggattatcatgagtattttagtgaggcaacagatgttgatgctgttgtttatttgatgcttgccaactatctgatccataaagttttgccagatgcaactgtaattgccgaagatgtttctggtatgcccggacttggtcggcctgtctctgaaggtggcattggctttgattaccggctggcaatggccatccctgacaaatggattgactatgtgaaaaacaagagtgacgaagagtggtcaatgaaggaaatttcatggaacttgacaaataggaggtacactgagaagtgtatctcctacgctgaaagtcatgaccaggcaattgtgggtgacaagacaattgcattctttttgatggatagagaaatgtattctggcatgtcttgtttagttgatgcttctcctaccattgagcgaggggttgcgcttcacaagatgatacatttcttgactatggcattaggaggcgaggggtatctcaattttatgggaaatgagtttggccatcctgaatggattgactttccaagagaaggcaacgggtggagttatgagaagtgcagacgccagtggaacctggtggatacagatcatttgagatataagtttatgaatgcctttgacaaagctatgaatttgcttgatgagaagttttcattcctttcgtcaacaaagcagatagtgagcagcacaaatgaagaagacaaggttattgtctttgagcgcggggatttagtttttgtgttcaattttcatccaagaaacacatacgaagggtataaagttgggtgtgacttacctgggaagtacagagttgcactagatagtgatgcttgggagtttggtggccatggaagagtgggccacaatgtagaccacttcacattcccagaaggaataccgggggttcctgaaacaaatttcaacaaccgtcccaactccttcaaaatactctcaccggctcaaacatgtgtggtttattatcgagtggatgaaagtgaggaggcagatgcggaggagacattaatagaagaggaagttggggttgggcaggagaactttgaagaacaaactggtcccataaatgaggacaatgctgttggtccaagagcacaagagagtgaccaagggtcatcgtcggactga

SEQ ID NO: 148701 - protein, 838 aa, Malus domestica
MMMLAPTGLVLRHPTHTPLSFTFTSTNDEYPSRLGLGLRGKEQQAVRLLRFGTSQNSSSLLRRRGSPSTTTASGCSKAEPTSKSKAVFIDDSPIITDTDQGMENLGILSIDQSLQPYKDHFNYRINRYLDQRRLIETYEGGLQEFAQGYLKFGFNREEGGIVYREWAPAAQEAQLIGDFNGWDGSKHKMDKNQFGVWSIKIPDSGENSAIPHNSRVKFRFKHGGGVWVDRIPAWIQYATVDPARFAAPYDGVYWDPPPSERFQFKYPRPPKPKAPRIYEAHVGMSSSEPRISSYREFADDVLPRIQANNYNTVQLMAVMEHSYYASFGYHVTNFFAVSSRSGTPEDLKYLIDKAHSLGLRVLMDVIHSHASNNITDGLNGFEVGQSSQESYFHTGDRGYHKLWDSRLFNYANWEVLRFLLSNLRWWLEEFKFDGFRFDGVTSMLYHHHGINMAFSGDYHEYFSEATDVDAVVYLMLANYLIHKVLPDATVIAEDVSGMPGLGRPVSEGGIGFDYRLAMAIPDKWIDYVKNKSDEEWSMKEISWNLTNRRYTEKCISYAESHDQAIVGDKTIAFFLMDREMYSGMSCLVDASPTIERGVALHKMIHFLTMALGGEGYLNFMGNEFGHPEWIDFPREGNGWSYEKCRRQWNLVDTDHLRYKFMNAFDKAMNLLDEKFSFLSSTKQIVSSTNEEDKVIVFERGDLVFVFNFHPRNTYEGYKVGCDLPGKYRVALDSDAWEFGGHGRVGHNVDHFTFPEGIPGVPETNFNNRPNSFKILSPAQTCVVYYRVDESEEADAEETLIEEEVGVGQENFEEQTGPINEDNAVGPRAQESDQGSSSD

SEQ ID NO: 148702 - DNA, 2070 bp, Culex pipiens pallens
  CDS (1)..(2070)
atgtcgcagcaactcccggtcgatccggccaaccccggcatcgagaagctgctggaccttgatggctatctgcggcttcacgagacggaaatctgccggagaaataatgagctcaagaactggattgcccgcttcgagcagatggagggtggactggaggagttcacccagggatacaagtactacgggctgcacatcggggcggacaacagtgttacagctcgcgagtgggcacccggagcgaagcagctgtatctgaccggggatttcaacaactggcaatgggaggccaccccgtacaagcagctgccgtacggcaagtgggaactgaagattcccccgaaccaggacggttcctgcccaatcaagcatctgtctgagatcaaggtgatcgtgcgcaagcaggacggccagctggtcgatcgcctctcgccgtgggctaaatacgtggtcccgccaccaaagtcgctgggcgtcaactaccagcagcgcgtttggcatcctccggctcacgaaaagtacatgttccgccaccgcaagccggcacggccccgtgccatgcgcatctacgagtgccacgtgggcattgcgacggaggagttgggcgtcggtacgtacaagaactttgccgacaatgtgctgccgcggatcaagcacgtcgggtacaacacgatccaggtgatggccatcatggagcacgcgtactacgccagttttgggtatcagattacgagcttctacgcggcgtcgagccggttcgggacgccggaggagttgaagtacatggtggacaaggcgcacgagctgggcatgtttgtgctgctggatgtggttcattcgcatgccagtaagaacacgcaggacggtttgaaccagtttgacgggacgaatgcctgttatttccacgatggatcccgtggagagcactcgctgtgggacagccgcttgttcaactattcagaatttgaagttttacgttttctgctgtcgaacctgcgttggtggcgtgacgagtacggctttgatgggtatcgcttcgacggagttacgtccatgttgtatcattcgcgtggtattggcgaaggtttctcctgggattacaacgagtactttgggctgaacgtggacacggaggcgttgatctatctgggcattgcaaactttttcttacacaagttggatccgaacgtggttaccatcgcgggggacgttagtggcatgccgacgctgtgtcgtcccacggccgagtgtggcatcggattcgatgcacgcctgggaatggcaatcccggataagtggattgagttgctgaagggaacgtcggatgaagcgtggaacatcggaaatcttgtgcatacgctgacgaatcgccggtacaaggaaactacggtcgcttacgccgagtcccacgatcaggccctggtgggtgataaaacgatcgccttctggctgatggacaaggagatgtacacccacatgtcgataatgtctgacgcgagcttgatcatcgatcgtggcttgtcactgcacaagatgattcgtctgattacgcacagtttgggcggcgaagcgtacttgaactttatgggcaacgagtttggccatccggagtggctggactttccgcgtatcggcaacaacgaatcattccactacgcccgccgtcaatggcacttgatcgatgatcaaaatctcaagtatcgcttcttgaatgagtttgatcgtgtcatgaacatgaccgaggagcagcaccactggctgaactgcaacccggcgtacgtaagctgcaagcacgaggacgacaaaacgatcgcggccgagcggaacaatctgctgttcgtgttcaactcccactgcaacaagagcttcaccgattaccgcaccggggtggaacggcccggcaagtacaaggtgattctgagcaccgacgacaaggagtttggtgggttcgaccggatcgacaaaaacgtggagcatcttacattcccggagggctggaacggtcgccggaactctatgcacgtgtatattccgtcgcgtgttgccatcgtgctagccccggtggattag

SEQ ID NO: 148703 - protein, 689 aa, Culex pipiens pallens
MSQQLPVDPANPGIEKLLDLDGYLRLHETEICRRNNELKNWIARFEQMEGGLEEFTQGYKYYGLHIGADNSVTAREWAPGAKQLYLTGDFNNWQWEATPYKQLPYGKWELKIPPNQDGSCPIKHLSEIKVIVRKQDGQLVDRLSPWAKYVVPPPKSLGVNYQQRVWHPPAHEKYMFRHRKPARPRAMRIYECHVGIATEELGVGTYKNFADNVLPRIKHVGYNTIQVMAIMEHAYYASFGYQITSFYAASSRFGTPEELKYMVDKAHELGMFVLLDVVHSHASKNTQDGLNQFDGTNACYFHDGSRGEHSLWDSRLFNYSEFEVLRFLLSNLRWWRDEYGFDGYRFDGVTSMLYHSRGIGEGFSWDYNEYFGLNVDTEALIYLGIANFFLHKLDPNVVTIAGDVSGMPTLCRPTAECGIGFDARLGMAIPDKWIELLKGTSDEAWNIGNLVHTLTNRRYKETTVAYAESHDQALVGDKTIAFWLMDKEMYTHMSIMSDASLIIDRGLSLHKMIRLITHSLGGEAYLNFMGNEFGHPEWLDFPRIGNNESFHYARRQWHLIDDQNLKYRFLNEFDRVMNMTEEQHHWLNCNPAYVSCKHEDDKTIAAERNNLLFVFNSHCNKSFTDYRTGVERPGKYKVILSTDDKEFGGFDRIDKNVEHLTFPEGWNGRRNSMHVYIPSRVAIVLAPVD

SEQ ID NO: 148704 - DNA, 2208 bp, Vigna radiata
  CDS (1)..(2208)
atgtttaactgtctgtgccttaatccgttcatttccgtctcttcaaccgttgcctgcacctctcacactgtaagaagcaggcagcgtcttgcaccacaaaagtcagttgatcttgctcttggctatcggaatccacttggatatgggtttggttttggattgagaagatcactgcacgagatggtgagctctcgtttcaagggtgtagctgttatgactgatgacaaatcaacaatatcatccactgaggaatacttagaaaacattggcatcttttctattgatccgtccctaaagccatataaagatcacttcaaatatagactgaagagatacgtagatcagaaaaagcttattgaagaatatgaaggaggtcttgaggaatttgccaaaggttatttgaaatttggatttaacagagaagaaggtggaattgtgtaccgcgagtgggcacctgctgctcaggaagcacaaattattggagactttaatggatgggatggttccaaccaccaaatggaaaaaaatcagtttggtgtctggagtattaagatccctgatgctgatggaaatccagctataccacacagttcgagagtgaagtttagattccgccatggggatggagtttgggttgatcgcatacctgcttggatcaaatatgccactgttgatcctaacagatttgcagcaccatatgatggtgtctactgggatccaccactttcagagagatatgagtttaaatatccacgtccaccaaagccgaaggccccacggatatatgaggctcatgtggggatgagtagctctgaacctcgcataaactcttacagggaatttgcagatgagattttgccccgtattcgagcaaataactataatacagtccagctgatggccgttatggaacattcttattatgcatcgtttggatatcatgtaacaaatttttttgctgtgagcagtagatctggaacccctgaagatcttaaatatctgatagataaggctcatagcctaggattgcaggttttgatggatgttatccatagtcatgccagtaataacatcaccgatggactcaatggctttgatgttggccaaacttcacaagattcttacttccatgctggagatagaggttatcacaagttgtgggatagtagactatttaactatgccaactgggaagttcttcgtttccttttatctaatttaaggtggtggctcgaggagtttaaatttgatggatttcgatttgatggagtaacatcaatgctgtatcatcaccatggaatcaacattgcttttacaggggattataatgaatattttagcgaagcaacagatgtggatgctgttgtctatctgatgctggctaattctctgatccacagtattttgccagatgcaactgtaattgctgaagatgtttctggcatgccaggaattggtcaacaagtttctgacggtggaattggttttgactatcgtctagccatggctatccctgataaatggattgattacttgaagaacaagaatgagtacacatggtcaatgaaggaaatctcttggagtttgacaaataggagatacactgagaaatgtgtttcctatgctgaaagccatgaccaggccatcgttggtgataagactgttgcgtttctcctaatggatgaggaaatgtattctggcatgtcttgcttggttgatccttctcctattgttgagcgaggcattgctcttcagaagatgatacacttcataaccatggcattaggtggagagggctaccttaatttcatgggcaatgagtttggccatccggagtggattgatttcccaagagaaggcaatggatggagttatgagaagtgcaggcgtcagtggaatctggtggatacagatcacctgagatacaagttcatgaatgcatttgatagggcaatgaacttgcttgatgataaattttcgttccttgcatcaagtaaacaaatagtgagcagtgcagatgatgaagacaaggttatagtctttgagcgaggagatctgatatttgtattcaattttcatccagagaatacatatgaagggtataaagttggatgtgacttacctgggaaatatagagttgcattggatagtgatgcttgggaatttggaggtcatggaagagtaaggagccctaatctctgggggtaa

SEQ ID NO: 148705 - protein, 735 aa, Vigna radiata
MFNCLCLNPFISVSSTVACTSHTVRSRQRLAPQKSVDLALGYRNPLGYGFGFGLRRSLHEMVSSRFKGVAVMTDDKSTISSTEEYLENIGIFSIDPSLKPYKDHFKYRLKRYVDQKKLIEEYEGGLEEFAKGYLKFGFNREEGGIVYREWAPAAQEAQIIGDFNGWDGSNHQMEKNQFGVWSIKIPDADGNPAIPHSSRVKFRFRHGDGVWVDRIPAWIKYATVDPNRFAAPYDGVYWDPPLSERYEFKYPRPPKPKAPRIYEAHVGMSSSEPRINSYREFADEILPRIRANNYNTVQLMAVMEHSYYASFGYHVTNFFAVSSRSGTPEDLKYLIDKAHSLGLQVLMDVIHSHASNNITDGLNGFDVGQTSQDSYFHAGDRGYHKLWDSRLFNYANWEVLRFLLSNLRWWLEEFKFDGFRFDGVTSMLYHHHGINIAFTGDYNEYFSEATDVDAVVYLMLANSLIHSILPDATVIAEDVSGMPGIGQQVSDGGIGFDYRLAMAIPDKWIDYLKNKNEYTWSMKEISWSLTNRRYTEKCVSYAESHDQAIVGDKTVAFLLMDEEMYSGMSCLVDPSPIVERGIALQKMIHFITMALGGEGYLNFMGNEFGHPEWIDFPREGNGWSYEKCRRQWNLVDTDHLRYKFMNAFDRAMNLLDDKFSFLASSKQIVSSADDEDKVIVFERGDLIFVFNFHPENTYEGYKVGCDLPGKYRVALDSDAWEFGGHGRVRSPNLWG

SEQ ID NO: 148706 - DNA, 2571 bp, Vigna radiata
  CDS (1)..(2571)
atggtttacaccatctcgggaattcgatttccggttgttccttcgctgaacgtctccagcctccgtggcgatcgcagggcagcgtctcttcctgtttttctcagaaagaacgacttctctcggaaaatccttgccgtaaaatcttctcacgattctgattccccgtcttctgcaattgctgaatctgataaggttcttattcctcaagatcaagataactctgcatccttgacagatcaacttgaaactcctgttataacctcagaggatgcacataatttagaggatttaacaatggaagatgaggataaatacagcattagtgaagcagataccagttacagacagattgaaggtgagctaggttctgtggtttctgttggcaagaaagtaaatataccaagtgatgaagctaaacctaagaccattccccgacctggtgctggacagaaaatatatgagattgatccatctttgctagcccaccgtgagcatcttgatttccgtttcggacaatacaaaagattgcacgatgaaattaataagtatgaaggtggtctggatacattttctcgtggctatgaaaaatttggcttcatacgcagtgctacaggcgttacttacagagagtgggcacctggagctaagtcagcagcattaattggagacttcaacaattggaattcaaatgcagatgtaatgactcggaatgagtttggtgtttgggagatttttttgccaaacaatgtggatggttcaccaccaattcctcatggttctcgggtcaagatccgcatggatactccctctggagtcaaggactcgattcctgcttggatcaagttttctgtacaggctcctggtgaaattccatatagcggaatatactatgatcccccagaagaggaaaaatatgtattcaaacatccacagccaaagagaccaaaatcacttagaatatacgagtcacatgttggaatgagtagtccggagccaatgatcaacacatatgccaattttagagatgatgtactacctcgcattaaaaagcttggctacaatgctgtccagattatggccattcaagaacattcttattatgccagctttgggtaccatgtcacaaatttctttgcacctagcagccgatttggaactccagaggaacttaaatctctgatagacaaagcccatgaactaggtctgcttgttctgatggatattgtacacagccatgcctcaaataatactttggatggcctaaacatgtttgatggaactgatagtcattacttccatcctgggtcacggggttatcattggatgtgggattctcgtcttttcaattatggaagctgggaagtactaaggtatctactttcaaatgcaagatggtggctggatgaatacaagtttgacggatttcgatttgatggtgttacatcaatgatgtacactcatcatgggttgcaggtagcattcactggaaattacagtgagtactttggtatggcaactgatgttgatgctgtggtttacctgatgctggctaatgatctcattcatgggctcttccccgaggctgttaccattggtgaagatgtgagtggaatgccaacattctgccttcctacacaagatggtggtgttggttttgattatcgcctgcaaatggccattgcagacaagtggattgagattctcaagaagcaagatgaggactggaaaatgggcgatattgtccacacactaacaaacagaagatggctggaaaaatgtgtagcttatgctgagagtcatgatcaggccttggttggtgacaagacaattgcattttggttgatggacaaggatatgtatgacttcatggcgttagacaggccatctacacctcgtatagatcgtggtatagcattacacaaaatgattaggcttattaccatgggacttggtggtgaagggtatttgaattttatggggaatgagtttggccatcctgagtggattgattttccaaggggtgaacaacaacttcctaatggctcagtaattccagggaacaactacagttatgataaatgcaggcgaagatttgacttgggagatgcggactatttaagatatcgaggaatgcaagaatttgatcgagccatgcagcttttagaagaaaagtttggattcatgactgctgagcaccaatatatttcacggaaaaatgaaggtgacaaagttataatctttgaaaggggcaacctcgtctttgtcttcaattttcattggcataacagttattcagattacagagttggctgctcaacccctgggaaatataagattgtcttggattcagatgatgccttgtttggtggcttcaataggctcaaccactctgctgagtacttcactaatgaaggatggtatgatgacagacctcgatcctttcttgtctatgcaccttctaggacagcagcagtttatgcccttgcagatgatgatctggaaccagccctttcagacgaagctgaaccagtccttgcagatgaagctgaaccagagccagttgatccttga

SEQ ID NO: 148707 - protein, 856 aa, Vigna radiata
MVYTISGIRFPVVPSLNVSSLRGDRRAASLPVFLRKNDFSRKILAVKSSHDSDSPSSAIAESDKVLIPQDQDNSASLTDQLETPVITSEDAHNLEDLTMEDEDKYSISEADTSYRQIEGELGSVVSVGKKVNIPSDEAKPKTIPRPGAGQKIYEIDPSLLAHREHLDFRFGQYKRLHDEINKYEGGLDTFSRGYEKFGFIRSATGVTYREWAPGAKSAALIGDFNNWNSNADVMTRNEFGVWEIFLPNNVDGSPPIPHGSRVKIRMDTPSGVKDSIPAWIKFSVQAPGEIPYSGIYYDPPEEEKYVFKHPQPKRPKSLRIYESHVGMSSPEPMINTYANFRDDVLPRIKKLGYNAVQIMAIQEHSYYASFGYHVTNFFAPSSRFGTPEELKSLIDKAHELGLLVLMDIVHSHASNNTLDGLNMFDGTDSHYFHPGSRGYHWMWDSRLFNYGSWEVLRYLLSNARWWLDEYKFDGFRFDGVTSMMYTHHGLQVAFTGNYSEYFGMATDVDAVVYLMLANDLIHGLFPEAVTIGEDVSGMPTFCLPTQDGGVGFDYRLQMAIADKWIEILKKQDEDWKMGDIVHTLTNRRWLEKCVAYAESHDQALVGDKTIAFWLMDKDMYDFMALDRPSTPRIDRGIALHKMIRLITMGLGGEGYLNFMGNEFGHPEWIDFPRGEQQLPNGSVIPGNNYSYDKCRRRFDLGDADYLRYRGMQEFDRAMQLLEEKFGFMTAEHQYISRKNEGDKVIIFERGNLVFVFNFHWHNSYSDYRVGCSTPGKYKIVLDSDDALFGGFNRLNHSAEYFTNEGWYDDRPRSFLVYAPSRTAAVYALADDDLEPALSDEAEPVLADEAEPEPVDP

SEQ ID NO: 148708 - DNA, 2459 bp, Ostreococcus tauri; identical to SEQ ID NO: 148686
  CDS (1)..(2454)

SEQ ID NO: 148709 - protein, 817 aa, Ostreococcus tauri
MRHIHALSTRRARFVDPPVRLTRARAVDDADAHARSTHPRAMHPSASSTVRARVTRTGGRTTRARRVFHAASPSTGAAPACPPKRSATRPRASSETEVETSTTTARSMEAADGSEAVALDEQLAPHVEHLRYRYATFRERKSAIEAAEGSLDAFSRGYERFGFTTDASGEITFREWAPAASHVALIGDFNDWNGDATPLRRSEFGTWEVTLPKGAIAHGSRVKVRVYNDQGQFDRIPAWIRRATVEPGVMGAGYDGVYWAPEEKYEFKNAKPKKPVASRIYEAHVGMSSNDPKINSYREFADDVLPRVAAGGYNTVQLMAVMEHAYYGSFGYHVTNPFAVSSRSGTPEDLKYLVDKAHGLGVRVLLDVVHSHASSNTNDGIAGFDLGQRDVDSYFGTGEAGYHWLWDSRLYKYDNWEVMRYLLSNLRYWVDEYNFDGFRFDGVTSMLYHHHGLQMEFSGDYEQYFSTSTNVDGVVYLMLANELLHSLYPEIEVIAEDVSGMPTLCLPVDKGGVGFDARLAMSIPDFWVKYLKTKPDEQWSTFEMVSTLCNRRYTEKAIAYVESHDQSIVGDKTTAFWLMDAEMYDGMSTLNEPSVVIERGIALHKMLRLVTASLGGEGYLTFMGNEFGHPEWVDFPREGNGWSHDYCRRRWDLADADHLRYQHLLNFDKGMLALDDQYSYIAAAHQHVSTADDNRQILVFERGPLVFVFNFHPHQTYEGLEIGVPEPGKYQLAFDTDAREFGGKSRCGFSVDHFTSPDGPESWVGPYEQPPRAAKMLVLSPARSAQVYFKVPEPAPSAEPSVSDIVREIDADAGAAR

SEQ ID NO: 148710 - DNA, 2664 bp, Sorghum bicolor
  CDS (54)..(2465)
tttagcattgccactggtcagctcgatccgatccggctgcggcggaggcgaagatggcggcgttcgcggtctctggagcggcgctcggtggggccgtaagggctccccgactcaccggcggcgaggaggggagtctggtctcccggcgcaccggccccttcttaactcgtgcagggggtgctagagttggaggttccgggacgcacggggccatgcgcgcggcggccgcgtcgtccaggaaggcggtcgtggttgctgaggacgagaacgacggcctcgcatcgaaggctgactcggctcagttccagtcggatgaactggaggtaccagacgttactgaagagacgatgcgcgatgccggcgtggctgatgctcaagccttgaacagagttcgagtggtcccaccaccgagcgatggacaaaaaatattccagattgaccccatgctgcaaggctataagtaccatcttgagtatcggtacagcctctataggagaatccgttcagacattgatgagcatgaaggaggctcggaagccttctcccgtagttatgagaagtttggatttaatcgcagcgcggaaggtatcacctatcgagaatgggctcctggagcactttctgcagcattggtgggcgacttcaacaactgggatccaaatgcagaccttatgagcaaaaatgagtttggtgtttgggagatttttctgcctaacaatgcagatggtacatcacctattcctcatggaactcgtgtaaaggtgagaatggatactccatcagggataaaggattcaattcctgcctggatcaagtactcagtacaggctccaggagaaataccatacgatgggctttattatgatcctcctgaagaggtaaagtatgtgttcaagcatcctaaacctaaacgaccaaaatcattgaggatatatgaaacacatgttggaatgagtagcccggaaccgaagataaacacatatgcaaactttagggatgaggtcctcccaagaataaagaaacttggatacaatgcagtgcaaataatggcaatccaagagcactcatattatggaagctttggataccatgtaactaatttttttgcaccaagtagtcgttttggtactccagaagatttgaagtctatgattgatagagcacatgagcttggtttgctagttctcatggatgtggtccatagtcatgcgtcaagtaatactctggatgggttgaatggttttgatggtacggatacacattattttcatagtggtccacgaggccatcactggatgtgggattctcgcttattcaactatgggaactgggaagttttaagatttcttctctccaatgctagatggtggcttgaggaatataagtttgatggtttccgctttgatggtgtgacctccatgatgtacactcaccacggattacaagtaacatttacggggagcttcaatgagtattttggctttgccaccgatgtagatgcagtggtttacttgatgctcgtaaatgatctaattcatggactttatcctgaggctgtaaccattggtgaagatgttagtggaatgccctcatttgcccttcctgttcaagatggtggggtaggttttgactatcggatgcacatggctgtggctgacaaatggattgaatttctcaagcaaagtgatgaagcttggaagatgggtgatattgtgcacacactaacaaatagaaggtggttggagaagtgtgtaacttatgctgaaagtcatgatcaagcattagtcggtgacaagactattgcattttggttgatggacaaggatatgtatgatttcatggcccttgatagacctgcaactcctaccattgatcgtgggatagcattacataagatgattagacttatcacaatgggtttaggaggagagggctatcttaatttcatgggaaatgagtttggacatcctgaatggatagattttccaagaggtccacaaagacttccaagtggtaagttcattccagggaataataacagttatgacaaatgccgtcgaagatttgacctgggtgatgcggactatcttaggtatcgtggtatgcaagagtttgatcaggcaatgcaacatcttgagcaaaaatatggattcatgacatccgatcaccagtatatttctcggaaacatgaggaggataagatgattgtgtttgaaaagggagatttggtatttgtgttcaacttccactgtaacaacagctattttgactaccgtattggttgtcgaaaacctgggatgtataaggtggtcttggactcggacgctggactatttggtggatttggcaggatccatcacgcagcagagcacttcactaccgactgttcacatgataacaggccccattcgttctctgtttatacaccaagcagaacctgcgtcgtctatgctccagtggagtgatagcaaggtactggttgctgggcggcatgtgtggggctgtcgatgtgagggaaaaaaaaaacattctgccaacaccggcagatgcatgcatggctacaataaggttctgaaaattcaatcgttgctggaaagcccagacatcccgctgcgttgtcatctctatatatttaagaccttcaaggtgtcaattaaacataga

SEQ ID NO: 148711 - protein, 803 aa, Sorghum bicolor
MAAFAVSGAALGGAVRAPRLTGGEEGSLVSRRTGPFLTRAGGARVGGSGTHGAMRAAAASSRKAVVVAEDENDGLASKADSAQFQSDELEVPDVTEETMRDAGVADAQALNRVRVVPPPSDGQKIFQIDPMLQGYKYHLEYRYSLYRRIRSDIDEHEGGSEAFSRSYEKFGFNRSAEGITYREWAPGALSAALVGDFNNWDPNADLMSKNEFGVWEIFLPNNADGTSPIPHGTRVKVRMDTPSGIKDSIPAWIKYSVQAPGEIPYDGLYYDPPEEVKYVFKHPKPKRPKSLRIYETHVGMSSPEPKINTYANFRDEVLPRIKKLGYNAVQIMAIQEHSYYGSFGYHVTNFFAPSSRFGTPEDLKSMIDRAHELGLLVLMDVVHSHASSNTLDGLNGFDGTDTHYFHSGPRGHHWMWDSRLFNYGNWEVLRFLLSNARWWLEEYKFDGFRFDGVTSMMYTHHGLQVTFTGSFNEYFGFATDVDAVVYLMLVNDLIHGLYPEAVTIGEDVSGMPSFALPVQDGGVGFDYRMHMAVADKWIEFLKQSDEAWKMGDIVHTLTNRRWLEKCVTYAESHDQALVGDKTIAFWLMDKDMYDFMALDRPATPTIDRGIALHKMIRLITMGLGGEGYLNFMGNEFGHPEWIDFPRGPQRLPSGKFIPGNNNSYDKCRRRFDLGDADYLRYRGMQEFDQAMQHLEQKYGFMTSDHQYISRKHEEDKMIVFEKGDLVFVFNFHCNNSYFDYRIGCRKPGMYKVVLDSDAGLFGGFGRIHHAAEHFTTDCSHDNRPHSFSVYTPSRTCVVYAPVE

SEQ ID NO: 148712 - DNA, 2490 bp, Zea mays
  CDS (19)..(2490)
gactcacacgccgtcacaatgctgtgcctcgtgtcgccctcttcctcgccgactccgcttccgccgccgcggcgctctcgctcgcatgctgatcgggcggcaccgccggggatcgcgggtggcggcaatgtgcgcctgagtgtgttgtctgtccagtgcaaggctcgccggtcaggggtgcggaaggtcaagagcaaattcgccactgcagctactgtgcaagaagataaaactatggcaactgccaaaggcgatgtcgaccatctccccatatacgacctggaccccaagctggagatattcaaggaccatttcaggtaccggatgaaaagattcctagagcagaaaggatcaattgaagaaaatgagggaagtcttgaatctttttctaaaggctatttgaaatttgggattaatacaaatgaggatggaactgtatatcgtgaatgggcacctgctgcgcaggaggcagagcttattggtgacttcaatgactggaatggtgcaaaccataagatggagaaggataaatttggtgtttggtcgatcaaaattgaccatgtcaaagggaaacctgccatccctcacaattccaaggttaaatttcgctttctacatggtggagtatgggttgatcgtattccagcattgattcgttatgcgactgttgatgcctctaaatttggagctccctatgatggtgttcattgggatcctcctgcttctgaaaggtacacatttaagcatcctcggccttcaaagcctgctgctccacgtatctatgaagcccatgtaggtatgagtggtgaaaagccagcagtaagcacatatagggaatttgcagacaatgtgttgccacgcatacgagcaaataactacaacacagttcagttgatggcagttatggagcattcgtactatgcttctttcgggtaccatgtgacaaatttctttgcggttagcagcagatcaggcacaccagaggacctcaaatatcttgttgataaggcacacagtttgggtttgcgagttctgatggatgttgtccatagccatgcaagtaataatgtcacagatggtttaaatggctatgatgttggacaaagcacccaagagtcctattttcatgcgggagatagaggttatcataaactttgggatagtcggctgttcaactatgctaactgggaggtattaaggtttcttctttctaacctgagatattggttggatgaattcatgtttgatggcttccgatttgatggagttacatcaatgctgtatcatcaccatggtatcaatgtggggtttactggaaactaccaggaatatttcagtttggacacagctgtggatgcagttgtttacatgatgcttgcaaaccatttaatgcacaaactcttgccagaagcaactgttgttgctgaagatgtttcaggcatgccggtcctttgccggccagttgatgaaggtggggttgggtttgactatcgcctggcaatggctatccctgatagatggattgactacctgaagaataaagatgactctgagtggtcgatgggtgaaatagcgcatactttgactaacaggagatatactgaaaaatgcatcgcatatgctgagagccatgatcagtctattgttggcgacaaaactattgcatttctcctgatggacaaggaaatgtacactggcatgtcagacttgcagcctgcttcacctacaattgatcgagggattgcactccaaaagatgattcacttcatcacaatggcccttggaggtgatggctacttgaattttatgggaaatgagtttggtcacccagaatggattgactttccaagagaagggaacaactggagctatgataaatgcagacgacagtggagccttgtggacactgatcacttgcggtacaagtacatgaatgcgtttgaccaagcgatgaatgcgctcgatgagagattttccttcctttcgtcgtcaaagcagatcgtcagcgacatgaacgatgaggaaaaggttattgtctttgaacgtgaagatttagtttttgttttcaatttccatcccaagaaaacttacgagggctacaaagtgggatgcgatttgcctgggaaatacagagtagccctggactctgatgctctggtcttcggtggacatggaagagttggccacgacgtggatcacttcacgtcgcctgaaggggtgccaggggtgcccgaaacgaacttcaacaaccggccgaactcgttcaaagtcctttctccgccccgcacctgtgtggcttattaccgtgtagacgaagcaggggctggacgacgtcttcacgcgaaagcagagacaggaaagacgtctccagcagagagcatcgacgtcaaagcttccagagctagtagcaaagaagacaaggaggcaacggctggtggcaagaagggatggaagtttgcgcggcagccatccgatcaagataccaaatga

SEQ ID NO: 148713 - protein, 823 aa, Zea mays
MLCLVSPSSSPTPLPPPRRSRSHADRAAPPGIAGGGNVRLSVLSVQCKARRSGVRKVKSKFATAATVQEDKTMATAKGDVDHLPIYDLDPKLEIFKDHFRYRMKRFLEQKGSIEENEGSLESFSKGYLKFGINTNEDGTVYREWAPAAQEAELIGDFNDWNGANHKMEKDKFGVWSIKIDHVKGKPAIPHNSKVKFRFLHGGVWVDRIPALIRYATVDASKFGAPYDGVHWDPPASERYTFKHPRPSKPAAPRIYEAHVGMSGEKPAVSTYREFADNVLPRIRANNYNTVQLMAVMEHSYYASFGYHVTNFFAVSSRSGTPEDLKYLVDKAHSLGLRVLMDVVHSHASNNVTDGLNGYDVGQSTQESYFHAGDRGYHKLWDSRLFNYANWEVLRFLLSNLRYWLDEFMFDGFRFDGVTSMLYHHHGINVGFTGNYQEYFSLDTAVDAVVYMMLANHLMHKLLPEATVVAEDVSGMPVLCRPVDEGGVGFDYRLAMAIPDRWIDYLKNKDDSEWSMGEIAHTLTNRRYTEKCIAYAESHDQSIVGDKTIAFLLMDKEMYTGMSDLQPASPTIDRGIALQKMIHFITMALGGDGYLNFMGNEFGHPEWIDFPREGNNWSYDKCRRQWSLVDTDHLRYKYMNAFDQAMNALDERFSFLSSSKQIVSDMNDEEKVIVFEREDLVFVFNFHPKKTYEGYKVGCDLPGKYRVALDSDALVFGGHGRVGHDVDHFTSPEGVPGVPETNFNNRPNSFKVLSPPRTCVAYYRVDEAGAGRRLHAKAETGKTSPAESIDVKASRASSKEDKEATAGGKKGWKFARQPSDQDTK

SEQ ID NO: 148714 - DNA, 3123 bp, Ipomoea batatas
  CDS (112)..(2718)
ctttgagagtgtaaatcagcagattttgtgaaaggagcgaacgatttcgcccgcattcttctctttctggattcaattcattccagaatcggaaattgaaggaagagagatatggtttacaccctctccggcctccgattgcccgctgtcgcgccggtttacaagcatctcggatcgacctcgcacgctgatcggcggaataccaatccctctctctctctgaaaaggaattcgttttcttcatggaagatctttgccagaaatacttcctatgaatccgaaccctcttcttttagagttgcagcatcagagaaggtccttgttcctggtggcgagggcgagggatcatcgtttccaactgatcagttagaggttgctgaggcattatcagaagatacccaagtatcggctgacgtggataatgtgaagatggaagagaacagcaacagtgaaagcaatgtggatttcgtcaaagtagcaagtgattctaaagaaagcgttcaagagcaggatcacacgtcttcactacaatttgaagaagatggtaatgtggaagtttcacaaaaaccagagactttggatgacatcagtgctgaatctgaaatggtgaaaaagagggccattcctccacctggacttggtcagaggatctatgagatagaccctctcttgaaaaattttcgtgaccatcttgattataggttttcgcactataggaaaatccgggaagcaattaaccagtatgagggtggcttggaagtattctctcgtggctatgagaaattaggtttcactcggagtgttacaggtatcacctatcgggagtgggctcctggagccacgtgggcaacactcattggagatttcaacaattggaatccaaatgctgatgttatgactcggaatgaatttggtgtttgggagatctttttgccaaacaatgcagatggctcacctgcaattccacatggctctagagtgaagatacgtatggacactccttcaggcattaaagactctattcccgcttggatcaatttctctgtacaagctcctggtgcaattccttatgatggaatatactatgatcctccagaagaggagaggtacaaatttcaacatccacggccaaaaagaccaaagtcactgagaatatatgaatgtcatattggaatgagtagtccggagcctaaaataaatacatatgcagagtttagagatgatgtacttcctcgtataaagaagcttggctacaatgctctccagataatggccattcaagagcattcttattatgctagctttggctatcatgttacgaatttctttgcaccaagcagtcgttttgggactccagatgatcttaaatctttgattgatagagcccatgaacttggactggttgttctaatggatattgtgcacagtcatgcgtcaaataatactttggatggactgaacatgtttgatggtacagatagttgttatttccactctggaacccggggttatcattggatgtgggattctcgtctcttcaactatggaaactgggaagtactgaggtatctgctctcaaacgcaagatggtggttggatgagtacaagtttgatggcttcagatttgatggtgtgacttcaatgatgtatactcatcatgggttgagtgtaggattcactggaaactacagtgaatattttgggtatgcaaccgatgttgatgctgtggtgtatctgatgctcgtcaatgatctcattcatggtctcttccctgaagccataaccattggtgaagatgttagtggcatgccaacattttgtattcccgtcagagatggaggcgtaggttttgactatcggcttcatatggcaattcccgataaatggattgagattctcaagagaagagatgaggattggcaaatgggtgaaattgttcacacacttactaacagaagatggctggaaaaatgtgtttcttatgctgaaagtcacgaccaagctcttgttggtgataaaactatagcgttctggttgatggacaaggacatgtatgacttcatggctctggatagaccagcaacgccagtaatagaccgtggaatagcattgcataaaatgatcagacttataactatgggattaggaggagaaggatatctaaatttcatggggaacgaatttggtcacccagagtggattgatttccctagaggtgaacaacgccttcctgatggttcagttctccctggaaacaatttcagctatgataaatgccgtcgtagatttgatctgggtgatgcagattatctaagatatcggggcatgcaagaatttgaccaagctatgcatcaccttgaagaaaaatacggcttcatgacggcaaaacaccagtacatatcacgccaggacgaaggagatagggtgatcatttttgaaaggggtgacctggtgtttgtcttcaatttccactggacaaatagttattcagattaccgtgtaggctgcttaaagccaggaaaatataaggtagccctggactccgacagtccgctgtttggaggctttggcagagttcaacccgatgcagaatttttcacattcgaagggtatcacgatgatcgtcctcgttccttcatggtgtacgcacccagtagaactgcagtggtgtacgctctagcgaaggaggaggacgaagcaaaaccagttgaggaatgagcttcgaggtgcactccatggaaggtggacgccattttgatgccaacacgcccatcgtcctctcataccaaaaacgcgctccatgttgaaacacagaagtcgccagccatgaacataacttcgcttgccaactctcctctccattctttcattccaaaccggaccaagaacgcatcagatggagagcgtggtaaggatgaaattaaagctcggataaattagcgaggaagcagtagttagtgtcttctctactctcgtttttatgatttcttgctttccattctgtaaaatctgctctgtattttctgtattgccataacttcttggcatgtatttcccagcagataatatttgttggctataatgctaagattaagaggaaaataaaaactgcatttcattgtc

SEQ ID NO: 148715 - protein, 868 aa, Ipomoea batatas
MVYTLSGLRLPAVAPVYKHLGSTSHADRRNTNPSLSLKRNSFSSWKIFARNTSYESEPSSFRVAASEKVLVPGGEGEGSSFPTDQLEVAEALSEDTQVSADVDNVKMEENSNSESNVDFVKVASDSKESVQEQDHTSSLQFEEDGNVEVSQKPETLDDISAESEMVKKRAIPPPGLGQRIYEIDPLLKNFRDHLDYRFSHYRKIREAINQYEGGLEVFSRGYEKLGFTRSVTGITYREWAPGATWATLIGDFNNWNPNADVMTRNEFGVWEIFLPNNADGSPAIPHGSRVKIRMDTPSGIKDSIPAWINFSVQAPGAIPYDGIYYDPPEEERYKFQHPRPKRPKSLRIYECHIGMSSPEPKINTYAEFRDDVLPRIKKLGYNALQIMAIQEHSYYASFGYHVTNFFAPSSRFGTPDDLKSLIDRAHELGLVVLMDIVHSHASNNTLDGLNMFDGTDSCYFHSGTRGYHWMWDSRLFNYGNWEVLRYLLSNARWWLDEYKFDGFRFDGVTSMMYTHHGLSVGFTGNYSEYFGYATDVDAVVYLMLVNDLIHGLFPEAITIGEDVSGMPTFCIPVRDGGVGFDYRLHMAIPDKWIEILKRRDEDWQMGEIVHTLTNRRWLEKCVSYAESHDQALVGDKTIAFWLMDKDMYDFMALDRPATPVIDRGIALHKMIRLITMGLGGEGYLNFMGNEFGHPEWIDFPRGEQRLPDGSVLPGNNFSYDKCRRRFDLGDADYLRYRGMQEFDQAMHHLEEKYGFMTAKHQYISRQDEGDRVIIFERGDLVFVFNFHWTNSYSDYRVGCLKPGKYKVALDSDSPLFGGFGRVQPDAEFFTFEGYHDDRPRSFMVYAPSRTAVVYALAKEEDEAKPVEE

SEQ ID NO: 148716 - DNA, 2726 bp, Triticum aestivum
  CDS (124)..(2430)
acgttgctcccccttctcatcgcttctcaattaatatctccatcactcggttccgcgctgcatttcggccggcgggttgagtgagatctgggccactgaccgactcactcgctcgctgcggggatggcgacgttcgcggtgtccggcgcgaccctcggtgtggcgcggccgccggcggcggcgcaacctgaagaattacagatacctgaagacatcgaggagcaaacggctgaagtaaacatgacaggggggactgcagaaaaacttgaatcttcagaaccgactcaaggcattgtggaaacaatcactgatggtgtaaccaaaggagttaaggaactagtcgtgggggagaaaccgcgagttgtcccaaaaccaggagatgggcagaaaatatacgagattgacccaacgctgaaagattttcggagccatcttgactaccgatacagcgaatacaggagaattcgtgctgctattgaccaacatgaaggtggattggaagcattttctcgtggttatgaaaagcttggatttacccgcagtgctgaaggtatcacttaccgagaatgggctcctggagcgcattctgcagcattagtaggtgacttcaacaattggaatccgaatgcagatactatgaccagagatgattatggtgtttgggagattttcctccctaacaatgctgatggatccccagctattcctcatggctcacgtgtaaagatacggatggatactccatctggtgtgaaggattcaatttctgcttggatcaagttctctgtgcaggctccaggtgaaataccattcaatggcatatattatgatccacctgaagaggagaagtatgtcttccaacatcctcaacctaaacgaccagagtcactgaggatttatgaatcacacattggaatgagcagcccagaaccgaagataaattcatatgctaattttagggatgaggtgctgccaagaattaaaaggcttggatacaatgcagtgcagataatggcaatccaggagcattcatactatgcgagctttgggtaccatgttactaatttttttgcaccaagtagccgttttggaactccagaggacttaaaatccctgatcgatagagcacatgagcttggtttgcttgttcttatggatattgttcatagtcattcatcaaataatacccttgacggcttgaatggtttcgatggcactgatacacattacttccacggtggtccacgtggccatcattggatgtgggattctcgtctattcaactatgggagttgggaagtattgagattcttactgtcaaacgcgagatggtggcttgaagaatataagtttgatggatttcgatttgatggggtgacctccatgatgtatactcaccatggattacaaatgacatttactgggaactatggcgagtattttggatttgctactgatgttgatgcggtagtttacttgatgctggtcaacgatctaattcatggacttcatcctgatgctgtatccattggtgaagatgtcagtggaatgcccacattttgcatccctgttccagatggtggtgttggttttgactatcgcttgcatatggctgtagcagataaatggattgaactcctcaagcaaagtgacgaatcttggaaaatgggtgatattgtgcacaccctaacaaatagaaggtggcttgagaagtgtgtaacttatgcagaaagtcatgatcaagcactagttggtgacaagactattgcattctggttgatggataaggatatgtatgatttcatggctctggataggccttcaactcctcgcattgatcgtggcatagcattacataaaatgatcaggcttgtcaccatgggtttaggtggtgaaggctatcttaacttcatgggaaatgagtttgggcatcctgaatggatagattttccaagaggtccgcaaactcttccaaccggcaaagttctccctggaaataacaatagttatgataaatgccgccgtagatttgatcttggagatgcagattttcttagatatcatggtatgcaagagttcgatcaggcaatgcagcatcttgaggaaaaatatgggtttatgacatctgagcaccagtatgtttcacggaaacatgaggaagataaggtgatcatcttcgaaagaggagatttggtatttgttttcaacttccactggagcaatagcttttttgactaccgtgttgggtgttccaggcctgggaagtacaaggtggccttagactccgacgatgcactctttggtggattcagcaggcttgatcatgatgtcgactacttcacaaccgaacatccgcatgacaacaggccgcgctctttctcggtgtacactccgagcagaactgcggtcgtgtatgcccttacagagtaagaaccagcagctgcttgttacaaggcaaagagagaactccagagagctcgtggatcgtgagcgaagcgacgggcaacggcgcgaggctgctctaagcgccatgactgggaggggatcgtgcctcttccccagatgccaggaggagcagatggataggtagcttgttggtgagcgctcgaaagaaaatggacgggcctgggtgtttgtcgtgctgcactaccctcctcctatcttgcacattcccggttgtttttgtacatataactaataattgcccgtgcgctcaacgtgaacaa

SEQ ID NO: 148717 - protein, 768 aa, Triticum aestivum
MATFAVSGATLGVARPPAAAQPEELQIPEDIEEQTAEVNMTGGTAEKLESSEPTQGIVETITDGVTKGVKELVVGEKPRVVPKPGDGQKIYEIDPTLKDFRSHLDYRYSEYRRIRAAIDQHEGGLEAFSRGYEKLGFTRSAEGITYREWAPGAHSAALVGDFNNWNPNADTMTRDDYGVWEIFLPNNADGSPAIPHGSRVKIRMDTPSGVKDSISAWIKFSVQAPGEIPFNGIYYDPPEEEKYVFQHPQPKRPESLRIYESHIGMSSPEPKINSYANFRDEVLPRIKRLGYNAVQIMAIQEHSYYASFGYHVTNFFAPSSRFGTPEDLKSLIDRAHELGLLVLMDIVHSHSSNNTLDGLNGFDGTDTHYFHGGPRGHHWMWDSRLFNYGSWEVLRFLLSNARWWLEEYKFDGFRFDGVTSMMYTHHGLQMTFTGNYGEYFGFATDVDAVVYLMLVNDLIHGLHPDAVSIGEDVSGMPTFCIPVPDGGVGFDYRLHMAVADKWIELLKQSDESWKMGDIVHTLTNRRWLEKCVTYAESHDQALVGDKTIAFWLMDKDMYDFMALDRPSTPRIDRGIALHKMIRLVTMGLGGEGYLNFMGNEFGHPEWIDFPRGPQTLPTGKVLPGNNNSYDKCRRRFDLGDADFLRYHGMQEFDQAMQHLEEKYGFMTSEHQYVSRKHEEDKVIIFERGDLVFVFNFHWSNSFFDYRVGCSRPGKYKVALDSDDALFGGFSRLDHDVDYFTTEHPHDNRPRSFSVYTPSRTAVVYALTE

SEQ ID NO: 148718 - DNA, 2460 bp, Aegilops tauschii
  CDS (1)..(2460)
atggcgacgttcgcggtgtccggcgcgactctcggtgtggcgcgggccggcgtcggagtggcgcgggccggctcggagcggaggggcggggcggacttgccgtcgctgctcctcaggaagaaggactcctctcgcgccgtcctgagccgcgcggcctctccagggaaggtcctggtgcctgacggcgagagcgacgacttggcaagtccggcgcaacctgaagaattacagatacctgaagatatcgaggagcaaacggcggaagtgaacatgacaggggggactgcagagaaacttcaatcttcagaaccgactcagggcattgtggaaacaatcactgatggtgtaaccaaaggagttaaggaactagtcgtgggggagaaaccgcgagttgtcccaaaaccaggagatgggcagaaaatatacgagattgacccaacactgaaagattttcggagccatcttgactaccgatacagcgaatacaagagaattcgtgctgctattgaccaacatgaaggtggattggaagcattttctcgtggttatgaaaagcttggatttacccgcagtgctgaaggtatcacttaccgagaatgggctcctggagcgcattctgcagcattagtaggtgacttcaacaattggaatccaaatgcagatactatgaccagagatgattatggtgtttgggagattttcctccctaacaacgctgatggatcctcagctattcctcatggctcacgtgtaaagatacggatggatactccatccggtgtgaaggattcaatttctgcttggatcaagttctctgtgcaggctccaggtgaaatacctttcaatggcatatattatgatccacctgaagaggagaagtatgtcttccaacatcctcaacgtaaacgaccagagtcactaaggatttatgaatcacacattggaatgagcagcccggaaccgaagataaattcatatgctaattttagggatgaggtgttgccaagaattaaaaggcttggatacaatgcagtgcagataatggcaatccaggagcattcatactatgcaagctttgggtaccatgttactaatttttttgcaccaagtagccgttttggaactccagaggacttaaaatccttgatcgatagagcacatgagcttggtttgcttgttcttatggatattgttcatagtcattcgtcaaataatacccttgacggtttgaatggtttcgatggcactgatacacattacttccacggtggtccacgcggccatcattggatgtgggattctcgtctattcaactatgggagttgggaagtattgagattcttactgtcaaacgcgagatggtggcttgaagaatataagtttgatggatttcgatttgatggggtgacctccatgatgtatactcaccatggattacaaatgacatttactgggaactatggcgaatattttggatttgctactgatgttgatgcggtagtttacttgatgctggtcaacgatctaattcatggactttatcctgatgctgtatccattggtgaagatgtcagtggaatgcctacattttgcatccctgttccagatggtggtgttggttttgactaccgcctgcatatggctgtagcagataaatggattgaactcctcaagcaaagtgacgaatcttggaaaatgggcgatattgtgcacaccctaacaaatagaaggtggcttgagaagtgtgtaacttatgcagaaagtcatgatcaagcactagttggtgacaagactattgcattctggttgatggataaggatatgtatgatttcatggctctggataggccttcaactcttcgcattgatcgtggcatagcattacataaaatgatcaggcttgtcaccatgggtttaggtggtgaaggctatcttaacttcatgggaaatgagtttgggcatcctgaatggatagattttccaagaggcccacaaactcttccaaccggcaaagttctccctggaaataacaatagttatgataaatgccgccgtagatttgatcttggagatgcagattttcttagatatcgtggtatgcaagagttcgatcaggcaatgcagcatcttgaggaaaaatatgggtttatgacatctgagcaccagtatgtttcacggaaacatgaggaagataaggtgatcatcctcaaaagaggagatttggtatttgttttcaacttccactggagcaatagcttttttgactaccgtgttgggtgttccaagcctgggaagtacaaggtggccttggactctgacgatgcactctttggtggattcagcaggcttgatcatgatgtcgactacttcacaaccgaacatccgcatgacaacaggccgcgctctttctcggtgtacactccgagcagaactgcggtcgtgtatgcccttacagagtaa

SEQ ID NO: 148719 - protein, 819 aa, Aegilops tauschii
MATFAVSGATLGVARAGVGVARAGSERRGGADLPSLLLRKKDSSRAVLSRAASPGKVLVPDGESDDLASPAQPEELQIPEDIEEQTAEVNMTGGTAEKLQSSEPTQGIVETITDGVTKGVKELVVGEKPRVVPKPGDGQKIYEIDPTLKDFRSHLDYRYSEYKRIRAAIDQHEGGLEAFSRGYEKLGFTRSAEGITYREWAPGAHSAALVGDFNNWNPNADTMTRDDYGVWEIFLPNNADGSSAIPHGSRVKIRMDTPSGVKDSISAWIKFSVQAPGEIPFNGIYYDPPEEEKYVFQHPQRKRPESLRIYESHIGMSSPEPKINSYANFRDEVLPRIKRLGYNAVQIMAIQEHSYYASFGYHVTNFFAPSSRFGTPEDLKSLIDRAHELGLLVLMDIVHSHSSNNTLDGLNGFDGTDTHYFHGGPRGHHWMWDSRLFNYGSWEVLRFLLSNARWWLEEYKFDGFRFDGVTSMMYTHHGLQMTFTGNYGEYFGFATDVDAVVYLMLVNDLIHGLYPDAVSIGEDVSGMPTFCIPVPDGGVGFDYRLHMAVADKWIELLKQSDESWKMGDIVHTLTNRRWLEKCVTYAESHDQALVGDKTIAFWLMDKDMYDFMALDRPSTLRIDRGIALHKMIRLVTMGLGGEGYLNFMGNEFGHPEWIDFPRGPQTLPTGKVLPGNNNSYDKCRRRFDLGDADFLRYRGMQEFDQAMQHLEEKYGFMTSEHQYVSRKHEEDKVIILKRGDLVFVFNFHWSNSFFDYRVGCSKPGKYKVALDSDDALFGGFSRLDHDVDYFTTEHPHDNRPRSFSVYTPSRTAVVYALTE

SEQ ID NO: 148720 - DNA, 2970 bp, Triticum aestivum
  CDS (149)..(2620)
ccagcttccacccccgccgcacacgttgctcccccttctcatcgcttctcaattaatatctccatcactcgggttccgcgctgcatttcggccggcgggttgagtgagatctgggccactgaccgactcactcgctcgctgcgcggggatggcgacgttcgcggtgtccggcgcgaccctcggtgtggcgcggcccgccggcgccggcggcggactgctgccgcgatccggctcggagcggaggggcggggtggacctgccgtcgctgctcctcaggaagaaggactcctctcgcgccgtcctgagccgcgcggcctctccagggaaggtcctggtgcctgacggtgagagcgacgacttggcaagtccggcgcaacctgaagaattacagatacctgaagacatcgaggagcaaacggctgaagtaaacatgacaggggggactgcagaaaaacttgaatcctcagaaccgactcaaggcattgtggaaacaatcactgatggtgtaaccaaaggagttaaggaactagtcgtgggggagaaaccgcgagttgtcccaaaaccaggagatgggcagaaaatatacgagattgacccaacgctgaaagattttcggagccatcttgactaccgatacagcgaatacaggagaattcgtgctgctattgaccaacatgaaggtggattggaagcattttctcgtggttatgaaaagcttggatttacccgcagtgctgaaggtatcacttaccgagaatgggctcctggagcgcattctgcagcattagtaggtgacttcaacaattggaatccgaatgcagatactatgaccagagatgattatggtgtttgggagattttcctccctaacaatgctgatggatccccagctattcctcatggctcacgtgtaaagatacggatggatactccatctggtgtgaaggattcaatttctgcttggatcaagttctctgtgcaggctccaggtgaaataccattcaatggcatatattatgatccacctgaagaggagaagtatgtcttccaacatcctcaacctaaacgaccagagtcactgaggatttatgaatcacacattggaatgagcagcccagaaccgaagataaattcatatgctaattttagggatgaggtgctgccaagaattaaaaggcttggatacaatgcagtgcagataatggcaatccaggagcattcatactatgcgagctttgggtaccatgttactaatttttttgcaccaagtagccgttttggaactccagaggacttaaaatccctgatcgatagagcacatgagcttggtttgcttgttcttatggatattgttcatagtcattcatcaaataatacccttgacggcttgaatggtttcgatggcactgatacacattacttccacggtggtccacgtggccatcattggatgtgggattctcgtctattcaactatgggagttgggaagtattgagattcttactgtcaaacgcgagatggtggcttgaagaatataagtttgatggatttcgatttgatggggtgacctccatgatgtatactcaccatggattacaaatgacatttactgggaactatggcgagtattttggatttgctactgatgttgatgcggtagtttacttgatgctggtcaacgatctaattcatggacttcatcctgatgctgtatccattggtgaagatgtcagtggaatgcccacattttgcatccctgttccagatggtggtgttggttttgactatcgcttgcatatggctgtagcagataaatggattgaactcctcaagcaaagtgacgaatcttggaaaatgggtgatattgtgcacaccctaacaaatagaaggtggcttgagaagtgtgtaacttatgcagaaagtcatgatcaagcactagttggtgacaagactattgcattctggttgatggataaggatatgtatgatttcatggctctggataggccttcaactcctcgcattgatcgtggcatagcattacataaaatgatcaggcttgtcaccatgggtttaggtggtgaaggctatcttaacttcatgggaaatgagtttgggcatcctgaatggatagattttccaagaggtccgcaaactcttccaaccggcaaagttctccctggaaataacaatagttatgataaatgccgccgtagatttgatcttggagatgcagattttcttagatatcatggtatgcaagagttcgatcaggcaatgcagcatcttgaggaaaaatatgggtttatgacatctgagcaccagtatgtttcacggaaacatgaggaagataaggtgatcatcttcgaaagaggagatttggtatttgttttcaacttccactggagcaatagcttttttgactaccgtgttgggtgttccaggcctgggaagtacaaggtggccttagactccgacgatgcactctttggtggattcagcaggcttgatcatgatgtcgactacttcacaaccgaacatccgcatgacaacaggccgcgctctttctcggtgtacactccgagcagaactgcggtcgtgtatgcccttacagagtaagaaccagcagctgcttgttacaaggcaaagagagaactccagagagctcgtggatcgtgagcgaagcgacgggcaacggcgcgaggctgctctaagcgccatgactgggaggggatcgtgcctcttccccagatgccaggaggagcagatggataggtagcttgttggtgagcgctcgaaagaaaatggacgggcctgggtgtttgtcgtgctgcactaccctcctcctatcttgcacattcccggttgtttttgtacatataactaataattgcccgtgcgctcaacgtgaacatataaatattctaataataggttatcccgtgatttacctgcctaaaaaaaaaaaa

SEQ ID NO: 148721 - protein, 823 aa, Triticum aestivum
MATFAVSGATLGVARPAGAGGGLLPRSGSERRGGVDLPSLLLRKKDSSRAVLSRAASPGKVLVPDGESDDLASPAQPEELQIPEDIEEQTAEVNMTGGTAEKLESSEPTQGIVETITDGVTKGVKELVVGEKPRVVPKPGDGQKIYEIDPTLKDFRSHLDYRYSEYRRIRAAIDQHEGGLEAFSRGYEKLGFTRSAEGITYREWAPGAHSAALVGDFNNWNPNADTMTRDDYGVWEIFLPNNADGSPAIPHGSRVKIRMDTPSGVKDSISAWIKFSVQAPGEIPFNGIYYDPPEEEKYVFQHPQPKRPESLRIYESHIGMSSPEPKINSYANFRDEVLPRIKRLGYNAVQIMAIQEHSYYASFGYHVTNFFAPSSRFGTPEDLKSLIDRAHELGLLVLMDIVHSHSSNNTLDGLNGFDGTDTHYFHGGPRGHHWMWDSRLFNYGSWEVLRFLLSNARWWLEEYKFDGFRFDGVTSMMYTHHGLQMTFTGNYGEYFGFATDVDAVVYLMLVNDLIHGLHPDAVSIGEDVSGMPTFCIPVPDGGVGFDYRLHMAVADKWIELLKQSDESWKMGDIVHTLTNRRWLEKCVTYAESHDQALVGDKTIAFWLMDKDMYDFMALDRPSTPRIDRGIALHKMIRLVTMGLGGEGYLNFMGNEFGHPEWIDFPRGPQTLPTGKVLPGNNNSYDKCRRRFDLGDADFLRYHGMQEFDQAMQHLEEKYGFMTSEHQYVSRKHEEDKVIIFERGDLVFVFNFHWSNSFFDYRVGCSRPGKYKVALDSDDALFGGFSRLDHDVDYFTTEHPHDNRPRSFSVYTPSRTAVVYALTE

SEQ ID NO: 148722 - DNA, 2797 bp, Triticum aestivum
  CDS (19)..(2520)
ccgccgccatcgacgaagatgctctgcctcaccgcctcctcctcgccctcgccctcgccctctctcccgccgcgcccctcccgtcccgctgctgaccggcccggaccggggatctcgggcggcggcaatgtgcggctgagcgcggtgcccgcgccgtcttcgcttcgctggtcgtggccgcggaaggccaagagcaagttctctgttcccgtgtctgcgccaagagaatacaccatggcaacagctgaagatggcttcggcgaccttccgatatacgatctggatcccaagttcgccggcttcaaggaccacttcagttacaggatgaaaaagtatcttgaacagaaacattcgatcgagaaatacgaggggggccttgaagagttctctaaaggctacttgaagtttgggatcaacacagaaaatgacgcaactgtgtaccgggaatgggcccctgcagcaaaggatgcacaacttattggtgacttcaacaactggaatggctctgggcacaggatgacaaaggataattttggtgtttggtcaatcaggatttcccatgtcaatgggaaacctgccatcccccataattccaaggttaaatttcgatttcaccgtggagatggactatgggtcgatcgggttcctgcatggattcgttatgcaacttttgatgcctctaaatttggagctccatatgacggtgttcactgggatccaccaactggtgaaaggtatgtgtttaagcatcctcggcctcgaaagcctgacgctccacgtatttacgaggctcatgtggggatgagtggtgaaaagcctgaagtaagcacatacagagaatttgcagacaatgtgttaccgcgcataaaggcaaacaactacaacacagttcagctgatggcaatcatggaacattcatattatgcttcttttggataccatgtgacgaatttcttcgcagttagcagcagatcaggaacaccagaggacctcaaatatcttgttgacaaggcacatagcttagggttgcgtgttctgatggatgttgtccatagccatgcgagcagtaatatgacagatggtctaaatggctatgatgttggacaaaacacacaggagtcctatttccatacaggagaaaggggttatcataaactgtgggatagtcgcctgttcaactatgccaattgggaggtcttacggtatcttctttctaatctgagatattggatggacgaattcatgtttgacggcttccgatttgatggagtaacatccatgctatataatcaccatggtatcaatatgtcattcgctggaaattacaaggaatattttggtttggataccgatgtagatgcagttgtttacataatgcttgcgaaccatttaatgcacaaaatcttgccagaagcaactgttgttgcagaagatgtttcaggcatgccagtgctttgtcggtcagttgatgaaggtggagtagggtttgactatcgccttgctatggctattcctgatagatggattgactacttgaagaacaaagatgaccttgaatggtcaatgagtgcaatagcacatactctgaccaacaggagatatacggaaaagtgcattgcatatgctgagagccacgatcagtctattgttggcgacaagactatggcatttctcttgatggacaaggaaatgtatactggcatgtcagacttgcagcctgcttcacctacaattgatcgtggaattgcacttcaaaagatgattcacttcatcaccatggcccttggaggtgatggctacttgaattttatgggtaatgagtttggccacccagaatggattgactttccaagagaaggcaacaactggagttatgataaatgcagacgccagtggagcctctcagacattgatcacctacgatacaagtacatgaacgcatttgatcaagcaatgaatgcgctcgacgacaagttttccttcctatcgtcatcaaagcagattgtcagcgacatgaatgaggaaaagaagattattgtatttgaacgtggagatctggtcttcgtcttcaactttcatcccagtaaaacttatgatggttacaaagtcggatgtgatttgcctgggaagtacaaggtagctctggactccgatgctctgatgtttggtggacatggaagagtggcccatgacaacgatcacttcacgtcacctgaaggagtaccaggagtacctgaaacaaacttcaacaaccgccctaattcattcaaagtcctgtctccaccccgcacttgtgtggcttactatcgcgtcgaggaaaaagcggaaaagcctaaggatgaaggagctgcttcttggggcaaagctgctcctgggtacatcgatgttgaagccactcgtgtcaaagacgcagcagatggtgaggcgacttctggttccaaaaaggcgtctacaggaggtgactccagcaagaagggaattaactttgtcttcgggtcacctgacaaagataacaaataagcaccatatcaacgcttgatcagaaccgtgtaccgacgtccttgtaatattcctgctattgctagtagtagcaatactgtcaaactgtgcagacttgagattctggcttggactttgctgaggttacctactatatagaaagataaataagaggtgatggtgcgggtcgagtccggctatatgtgccaaatatgcgccatcccgagtcctctgtcataaaggaagtttcgggctttcagcccagaataaaaacagttgtctgtttgcaaaaaaaaaa

SEQ ID NO: 148723 - protein, 833 aa, Triticum aestivum
MLCLTASSSPSPSPSLPPRPSRPAADRPGPGISGGGNVRLSAVPAPSSLRWSWPRKAKSKFSVPVSAPREYTMATAEDGFGDLPIYDLDPKFAGFKDHFSYRMKKYLEQKHSIEKYEGGLEEFSKGYLKFGINTENDATVYREWAPAAKDAQLIGDFNNWNGSGHRMTKDNFGVWSIRISHVNGKPAIPHNSKVKFRFHRGDGLWVDRVPAWIRYATFDASKFGAPYDGVHWDPPTGERYVFKHPRPRKPDAPRIYEAHVGMSGEKPEVSTYREFADNVLPRIKANNYNTVQLMAIMEHSYYASFGYHVTNFFAVSSRSGTPEDLKYLVDKAHSLGLRVLMDVVHSHASSNMTDGLNGYDVGQNTQESYFHTGERGYHKLWDSRLFNYANWEVLRYLLSNLRYWMDEFMFDGFRFDGVTSMLYNHHGINMSFAGNYKEYFGLDTDVDAVVYIMLANHLMHKILPEATVVAEDVSGMPVLCRSVDEGGVGFDYRLAMAIPDRWIDYLKNKDDLEWSMSAIAHTLTNRRYTEKCIAYAESHDQSIVGDKTMAFLLMDKEMYTGMSDLQPASPTIDRGIALQKMIHFITMALGGDGYLNFMGNEFGHPEWIDFPREGNNWSYDKCRRQWSLSDIDHLRYKYMNAFDQAMNALDDKFSFLSSSKQIVSDMNEEKKIIVFERGDLVFVFNFHPSKTYDGYKVGCDLPGKYKVALDSDALMFGGHGRVAHDNDHFTSPEGVPGVPETNFNNRPNSFKVLSPPRTCVAYYRVEEKAEKPKDEGAASWGKAAPGYIDVEATRVKDAADGEATSGSKKASTGGDSSKKGINFVFGSPDKDNK

SEQ ID NO: 148724 - DNA, 2418 bp, Arabidopsis thaliana
  CDS (1)..(2418)
atggtggtgattcacggagtgtctcttactccacgcttcactcttccttctcgacctctcaacactggctttaatgccggcaattccaccctctctttcttcttcaaaaagcaccctctctctcggaagatctttgctgggaaacaatctgcggagtttgattcttcgtcacaagctatctctgcttctgagaaagtcttagtacctgataatcttgatgatgatcccagaggtttttcacagatatttgatctagaaagtcaaacaatggaatatactgaggcagtaagaacagaagaccaaacaatgaacgttgtcaaggagagaggggtgaaaccaagaatagttcccccaccgggtgatggcaagaaaatttatgagatagaccccatgttacgaacttacaacaatcatcttgattaccgttatggacagtataaaagattgcgtgaggaaatagacaagtatgagggtggtcttgaggcattctctcgtggctatgaaaagttaggattttcgcgcagtgatgccggtataacttatagagagtgggcgcctggagctaaggctgcatcacttatcggagatttcaacaactggaattctaatgcagatatcatgactcggaatgaatttggtgtttgggagatctttttgcccaacaacactgatggttcgcctgcaattcctcatggctcacgtgtaaagattcgtatggatactccatctggcattaaagactcaattcctgcttggatcaagttctcggtgcaagctccaggtgaaatcccattcaatggcatatactatgatcctccagaagaggagaagtatgtattcaaacatcctcaaccaaagagacctaagtcgctaaggatttatgaagcacatgttggcatgagtagcacggaaccaatggtcaatacgtatgctaactttagagatgatgttcttccccgcatcaaaaagcttggatataatgctgttcaaattatggccatacaagaacattcatattatgccagctttgggtaccatgtcacaaacttttttgccccaagcagtcgctgtgggaccccagaggaactaaaatcactgatagatagagctcacgagttaggcctggtagttctgatggatatcgttcatagccatgcttcaaaaaacacattggatggactgaacatgtttgatggaactgatgctcactattttcactctggacctcggggataccattggatgtgggattcacgacttttcaattatgggagctgggaagtattacgatatctcctttcaaatgcacggtggtggctagaagaatacaagtttgatggatttagatttgatggtgtaacctcaatgatgtatactcatcatggactctcggttggatttactgggaactacaccgaatactttggattggaaactgatgtggatgctgtgaattatctcatgctggttaatgatatgattcatgggctctaccctgaagcgattaccgttggtgaagatgttagtggtatgccaacattctgtattcctgtccaagatggtggcgttggatttgactaccgtttacacatggccatagctgataagtggatagaaatgctcaagaagagagatgaagactggcaaatgggcgacatcatttacacacttaccaacagaaggtggtcagagaagtgtatctcttatgctgaaagtcacgatcaagctcttgttggtgataaaacaattgccttctggttaatggacaaggatatgtatgatttcatggcagtagacagaccatcaactcctcttatcgatagaggaatagctttgcacaaaatgattaggcttataactatgggattaggcggtgaaggttacttaaattttatgggaaacgaattcggacatccagaatggattgattttcccagaggcgagcagcgtctttctgatggtagcgtgattcctggcaacaatttcagttatgacaaatgccgccgcagatttgatcttggggatgcagattatctcagataccgcggactacaagaatttgatcaggcaatgcaacatcttgaagagaattacggttttatgacttcggagcaccaattcatatcacgaaaagacgaagcagatagagtaatcgtattcgaaagaggtgatctcgtctttgtctttaactttcactggaccagcagctactttgattaccgcattggttgctccaagcctggaaaatataagatcgtattggactcggacgatcctctctttggtggattcaataggctcgatcgcaaggcagagtacttcacttatgatggcttatacgacgaacgaccctgctccttcatggtctatgcaccgtgtagaaccgccgtggtttatgctttagcaaaccacgattag

SEQ ID NO: 148725 - protein, 805 aa, Arabidopsis thaliana
MVVIHGVSLTPRFTLPSRPLNTGFNAGNSTLSFFFKKHPLSRKIFAGKQSAEFDSSSQAISASEKVLVPDNLDDDPRGFSQIFDLESQTMEYTEAVRTEDQTMNVVKERGVKPRIVPPPGDGKKIYEIDPMLRTYNNHLDYRYGQYKRLREEIDKYEGGLEAFSRGYEKLGFSRSDAGITYREWAPGAKAASLIGDFNNWNSNADIMTRNEFGVWEIFLPNNTDGSPAIPHGSRVKIRMDTPSGIKDSIPAWIKFSVQAPGEIPFNGIYYDPPEEEKYVFKHPQPKRPKSLRIYEAHVGMSSTEPMVNTYANFRDDVLPRIKKLGYNAVQIMAIQEHSYYASFGYHVTNFFAPSSRCGTPEELKSLIDRAHELGLVVLMDIVHSHASKNTLDGLNMFDGTDAHYFHSGPRGYHWMWDSRLFNYGSWEVLRYLLSNARWWLEEYKFDGFRFDGVTSMMYTHHGLSVGFTGNYTEYFGLETDVDAVNYLMLVNDMIHGLYPEAITVGEDVSGMPTFCIPVQDGGVGFDYRLHMAIADKWIEMLKKRDEDWQMGDIIYTLTNRRWSEKCISYAESHDQALVGDKTIAFWLMDKDMYDFMAVDRPSTPLIDRGIALHKMIRLITMGLGGEGYLNFMGNEFGHPEWIDFPRGEQRLSDGSVIPGNNFSYDKCRRRFDLGDADYLRYRGLQEFDQAMQHLEENYGFMTSEHQFISRKDEADRVIVFERGDLVFVFNFHWTSSYFDYRIGCSKPGKYKIVLDSDDPLFGGFNRLDRKAEYFTYDGLYDERPCSFMVYAPCRTAVVYALANHD

SEQ ID NO: 148726 - DNA, 2805 bp, Sorghum bicolor
  CDS (14)..(2512)
cgacgccgccgcaatgctgtgcctcgtgtcgccgtcttcctcgccgactccgctcccgccgccgcggcgctctcgttcgcctgctgatcgggcggcgccgccagggatcgcgggtggcagcaatgtgcgcctgagtgtgctgtctgtccagtgcgaggctcgccggtcagggccccggaaggtcaagagcaaattcgccactgcagctattgtgcaagaagataaaactatggcaaccgccaaaggcaacgtcgaccatcttcccatatacgacctggaccccaagttggtgaaattcaaggaccatttcagctaccggatgaaaaaattcctggaccagaaaggctccattgaggaaaatgagggaagtcttgaagaattttctaaaggctatttgaaatttgggatcaatacaagtgaggatggaactgtatatcgcgaatgggcacctgctgcacaggaggcagagcttattggtgacttcaatgagtggaatggtgcaaaccacaagatggagaaggataaatttggtgtttggtcgatcaaaattgaccatgtcaaagggaaacctgctatccctcataattccaaggttaaatttcgctttctacatggtggagtatgggttgatcgtattcctgcatggattcgttatgcgactgctgatgcctctaaatttggagctccctatgatggtgttcattgggatcctcctgcttctgaaaggtacacttttaagcatcctcggccttcaaagcctgctgctccacgtatctatgaagcccatgtgggtatgagtggtgaaaagccagcagtaagcacatatagggaatttgcagacaatgtgttgccacgcatacgagcaaataactacaacaccgttcagttgatggcagttatggaacattcttactatgcttcttttgggtaccatgtgacaaatttctttgcggttagcagcagatcaggcacaccagaggacctaaaatatcttgttgataaggcacacagtttgggtttgcgagttctgatggatgttgttcacagccatgcaagtaataatgtcacagatggtttaaatggttatgatgttggacaaagcacccaagagtcctattttcatatgggagatagaggttatcataaactttgggacagtcggctgttcaactatgctaactgggaggtattgaggtttcttctttctaacctgagatattggctagatgaattcatgtttgatggcttccggtttgatggagttacatcaatgctgtatcatcaccatggtatcaatgtggggtttactggtaattaccaggagtatttcagtttggacacagatgtggatgcagttgtttacatgatgcttgcaaaccatttaatgcacaaactcttgccagaagcaactgttgttgctgaagatgtttcaggcatgccagtcctttgccggtcagttgatgaaggtggagttgggtttgactatcgcctggcaatggctatccctgatagatggattgactacctgaagaataaagatgactctgagtggtcgatgggtgaaatagcgcatactttgactaacaggagatatactgaaaaatgcatcgcatatgctgagagccatgatcagtctatcgttggcgacaaaactatagcatttctcctgatggacaaggaaatgtacactggcatgtcagacttgcagcctgcttcacctacaattgatcgagggattgcactccaaaagatgattcacttcatcacaatggcccttggaggtgatggctacttgaattttatggggaatgagtttggtcacccagaatggattgactttccaagagaagggaacaactggagctatgataaatgcagacgtcagtggagccttgtggacactgatcacttgcggtacaagtacatgaatgcgtttgatcaagcaatgaatgcgctcgatgagagattttccttccttttgtcatccaagcagattgtaagcgacatgaatgatgagaaaaaggttattgtctttgaacgtggagatttggtttttgttttcaattttcatcccaagaaaacttatgacggttacaaagttggatgtgatttgcctgggaaatacagagtagcactggactctgatgctttcgtctttggtggacatggaagagttggccacgacgtggatcacttcacgtcgcctgaagggataccaggggtgcctgaaacaaacttcaacaaccggccaaactcattcaaagtcctttccccaccccgcacttgtgtggcttattatcgtgtagatgaagaggctgaacgtcttcaagcgaaagcagagacaactggttctagaaagacttctccagacatcatcgatgttgatgctacccccgtcaaaacttctacagctactaaagaagacaaggaggcaacatctggtggcaaggaggatgcaagcaagaagggatggaagtttgcacgccagtcatccaataaaaacaccaaatgaagccagaagtccttgatcaggactggactggctgccagcgccctcttaatagtcctgctctactggactagccgctggtgcccttgtaacggtcctttcctgtagctcttagatgactggtgtcatctccgagcaagcactgcttgtatagttttctagatagtagacaagaataattcagggatggattgtgtgtatgtacaggaggagccatggcctgggttcacctggattttgactgggtacatggctaaatgtgccctgtccagaattaaaacttgggggttcttgga

SEQ ID NO: 148727 - protein, 832 aa, Sorghum bicolor
MLCLVSPSSSPTPLPPPRRSRSPADRAAPPGIAGGSNVRLSVLSVQCEARRSGPRKVKSKFATAAIVQEDKTMATAKGNVDHLPIYDLDPKLVKFKDHFSYRMKKFLDQKGSIEENEGSLEEFSKGYLKFGINTSEDGTVYREWAPAAQEAELIGDFNEWNGANHKMEKDKFGVWSIKIDHVKGKPAIPHNSKVKFRFLHGGVWVDRIPAWIRYATADASKFGAPYDGVHWDPPASERYTFKHPRPSKPAAPRIYEAHVGMSGEKPAVSTYREFADNVLPRIRANNYNTVQLMAVMEHSYYASFGYHVTNFFAVSSRSGTPEDLKYLVDKAHSLGLRVLMDVVHSHASNNVTDGLNGYDVGQSTQESYFHMGDRGYHKLWDSRLFNYANWEVLRFLLSNLRYWLDEFMFDGFRFDGVTSMLYHHHGINVGFTGNYQEYFSLDTDVDAVVYMMLANHLMHKLLPEATVVAEDVSGMPVLCRSVDEGGVGFDYRLAMAIPDRWIDYLKNKDDSEWSMGEIAHTLTNRRYTEKCIAYAESHDQSIVGDKTIAFLLMDKEMYTGMSDLQPASPTIDRGIALQKMIHFITMALGGDGYLNFMGNEFGHPEWIDFPREGNNWSYDKCRRQWSLVDTDHLRYKYMNAFDQAMNALDERFSFLLSSKQIVSDMNDEKKVIVFERGDLVFVFNFHPKKTYDGYKVGCDLPGKYRVALDSDAFVFGGHGRVGHDVDHFTSPEGIPGVPETNFNNRPNSFKVLSPPRTCVAYYRVDEEAERLQAKAETTGSRKTSPDIIDVDATPVKTSTATKEDKEATSGGKEDASKKGWKFARQSSNKNTK

SEQ ID NO: 148728 - DNA, 2226 bp, Neurospora crassa
  CDS (1)..(2226)
atgaacgacatctcagacaactcttccaactcgctggccaacggcggcaccgttgccaacagcgacattcccaaggatggcaccggtgtcttgagcattgacccctggctcgagccgttcaaggataccctcaagagccgctattccaaggcccaatcctggatcgataccatcaacaagacagagggcggtttggagaagttcagcaggggtaccgaaatctttggtttcaacgtcgacaaggacaacaccatcacatacagagaatgggctcccaatgccaaacaagcctccctcattggcgaatttaacaactgggataggaacgcccaccgcatgaagaagaacgagttcggcgtctttgagatcacaattcctcccacggccaacgggcaaccagctattccccacaactccaagatcaagatcaccctcgagctccccgacggccaatgggtcgacagattgccagcatggatcaaatatgtcacccaggacctctcagtctcgcccgcatacgaggcgcggttctggaaccctccccaatccgaacgatacacattcaagcacaagaggccctcaaagccggagagccttaggatctacgaggcccacgtcggcatttcctccccggagtgcaaggtggctacctataaggagttcaccaagaccatgcttcctcgcatcaagaacctgggatacaacgccattcagctcatggccatcatggagcacgcctactatgccagtttcggatatcaggtgaacagctttttcgcggcaagcagcagatacggcccgcccgaggatctcaaggagttggtggataccgcccacgccatgggtattgccgtgttgctcgatgtcgtccacagtcacgcctccaagaacgtccttgatggcttgaatgagtttgacggtactgaccaccagtacttccacggcggcggcaggggcaagcatgatctttgggacagcaggcttttcaactacggtcatcacgaggtcatgaggttcttgctcagcaaccttaggttctggatggatgagtacgcctttgatggcttcagatttgatggtgtgacaagtatgctttacctccatcacggtatcggaactggtttctctggtggctaccacgagtacttcggccctgatgttgatgaggaggcggtcgtttacctcatgctcgccaatgagatgcttcaccaactataccccaacgtcattacggttgccgaggatgtatcaggaatgccggctctgtgtctcccactatccttaggaggtgttggcttcgactacagactcgccatggccattcccgacatgtggatcaagatcctgaaggagaagaaggacgaggaatgggatatggccaatattacctggaccttgacaaacaggcgtcacggcgagaagaccattgcttactgtgagagtcacgatcaagcgctcgtcggtgacaagaccctcatgatgcatctctgcgatgccgagttgtacaccaacatgtctatcctcacgcctctaaccccggtcattgaccgcggcatggcactgcacaagatgatccgtctccttacccattccctgggaggtgagggttacctcaacttcgagggcaacgagttcggccaccccgagtggcttgacttcccccgtgagggcaaccagaactctttctggtacgccaggcgccagctcaaccttacggaagatggtcttttgcgttaccagtacctcaacaactttgacaggtcgatgaacctgaccgaggacaagtatggctggttgcacgccccacaggcctacatctctctcaagcacgagggcgataaggttattgtctttgagcgcgccggcttggtctttgtcttcaacttccacccctccaacagctacaccgactaccgcatcggtattgagcaggcgggcacctaccgcatcgttctcgactctgataccaaggagcacggtggcttcaaccgtctcgatccccagactcgcttcttcacttcggaccttccgtggaacaaccgcaagaacagcacccatgtgtacattccggccaggacagcctttcggccgggtgaaggccacaagcgtaggaaagcatcactttgcaagtcttctgcttttgttgtcattgtggcgttgatttgcgtgttgttgaagccagctgctgctaaagtgttggttgagatggttggtgacgacgtatag

SEQ ID NO: 148729 - protein, 741 aa, Neurospora crassa
MNDISDNSSNSLANGGTVANSDIPKDGTGVLSIDPWLEPFKDTLKSRYSKAQSWIDTINKTEGGLEKFSRGTEIFGFNVDKDNTITYREWAPNAKQASLIGEFNNWDRNAHRMKKNEFGVFEITIPPTANGQPAIPHNSKIKITLELPDGQWVDRLPAWIKYVTQDLSVSPAYEARFWNPPQSERYTFKHKRPSKPESLRIYEAHVGISSPECKVATYKEFTKTMLPRIKNLGYNAIQLMAIMEHAYYASFGYQVNSFFAASSRYGPPEDLKELVDTAHAMGIAVLLDVVHSHASKNVLDGLNEFDGTDHQYFHGGGRGKHDLWDSRLFNYGHHEVMRFLLSNLRFWMDEYAFDGFRFDGVTSMLYLHHGIGTGFSGGYHEYFGPDVDEEAVVYLMLANEMLHQLYPNVITVAEDVSGMPALCLPLSLGGVGFDYRLAMAIPDMWIKILKEKKDEEWDMANITWTLTNRRHGEKTIAYCESHDQALVGDKTLMMHLCDAELYTNMSILTPLTPVIDRGMALHKMIRLLTHSLGGEGYLNFEGNEFGHPEWLDFPREGNQNSFWYARRQLNLTEDGLLRYQYLNNFDRSMNLTEDKYGWLHAPQAYISLKHEGDKVIVFERAGLVFVFNFHPSNSYTDYRIGIEQAGTYRIVLDSDTKEHGGFNRLDPQTRFFTSDLPWNNRKNSTHVYIPARTAFRPGEGHKRRKASLCKSSAFVVIVALICVLLKPAAAKVLVEMVGDDV

SEQ ID NO: 148730 - DNA, 3015 bp, Oryza sativa
  CDS (129)..(2654)
cttgactccccccactcctccctcgtgctgctcctcctcgtcgctcggctcgaggcgcggcatttgcggcgggagggatctgcgcgcgagtgcgtgcgggcaggcggcgggggagcacgcaccgggggatggcgtcgttcgcggtgtccggcgcgaggctcggggtcgtgcgggcggggggcggcggcggcggcgggggtggcccggcggcgcgatccggcggggtggacttgccgtcggtgctcttcaggaggaaggactccttctcacgtggcgttgtgagctgcgcgggtgctcctgggaaggtgctggtgcctggcggtgggagcgacgacttgctgtcctctgcggaaccagacgtggaaactcaagagcaacctgaagaatctcagatacctgatgataataaagtaaaaccttttgaggaggaggaagagattccagcagtggcagaagcaagcataaaggttgtggctgaagacaaacttgaatcttcagaagtgattcaagacattgaggaaaatgtgactgagggtgtgatcaaagatgctgatgaaccaactgtggaggataaaccacgagttatcccaccaccaggagatgggcagaagatataccaaattgacccaatgctggaaggatttcggaaccatcttgactaccgatacagtgaatacaagagaatgcgtgcagctattgaccaacatgaaggtggcttggatgcattttctcgtggttacgaaaagcttggattcacccgcagcgctgaaggcattacctaccgagaatgggcacctggagcacagtctgcagcattagtaggtgacttcaacaattggaacccaaatgcagatactatgaccagaaatgagtatggtgtttgggagatttccctgcctaacaatgctgatggatcccctgctattcctcatggctcacgtgtaaagattcggatggatacaccatctggcgtaaaggattcaattcctgcctggattaagtttgctgtgcaggctccaggtgaaataccgtacaacggtatatattatgatccacctgaagaagaaaaatatgtattccaacatcctcaacctaaacgaccaaattcgctgcggatatatgaatcacatattggaatgagtagcccggaaccgaagataaacacatatgctaattttagggatgaggtgctaccaagaattaaaaagcttgggtacaatgctgtacagataatggcaatccaggagcactcttattacgcaagctttgggtatcatgttactaacttctttgcgccaagtagccgtttcggaaccccagaagacttgaaatctctgattgataaagctcacgagcttggtttgcttgtacttatggatattgttcacagtcatgcatcaaacaataccctggatggtttgaatggttttgatggtactgatacacattacttccatggtggaccacggggtcatcactggatgtgggattctcgcctgttcaactatgggagttgggaagttttaagatatttactgtcgaatgcaaggtggtggcttgaagaatacaagtttgatgggtttcgatttgatggggtgacctccatgatgtatactcatcatggtttacaggtggcatttactggcaactatggcgaatattttggatttgctactgatgttgatgcagtagtttacttgatgctggtgaacgatctaattcatgggctttatcctgaggctgtagccattggtgaagatgtcagcgggatgcccacattttgtattcctgttcaagatggtggtgttggttttgactatcgtttgcatatggctgtaccggacaaatggatcgaactcctcaagcaaagtgacgaatattggaaaatgggtgatatcgtgcacaccctaacgaatagaaggtggtcagagaagtgtgttacttatgcagaaagtcatgaccaagcactagttggtgacaagactattgcattctggttgatggataaggatatgtatgattttatggctctagacagaccttcaacacctcgcattgatcgtgggatagcattacataaaatgattaggcttgtcaccatgggcttaggaggcgaaggctatcttaatttcatgggaaatgagtttgggcatcctgaatggatagatttcccaagaggcccgcaaagtcttccaaatggctcggtcctcccaggaaacaactacagttttgataaatgccgtcgtagatttgaccttggagatgcagattatcttagatatcatggtatgcaagagtttgatcaggccatgcagcatcttgaggaaaaatatggattcatgacatctgagcaccagtatatatcgcgcaaacacgaggaggataaggtgatcatcttcgagagaggagatttggtattcgtgttcaacttccactggagtaatagctattttgactatcgcgtcggttgtttaaagcctggaaagtacaagattgtgttggactcagacgatggcctctttggtggattcagtcggcttgatcatgatgctgagtacttcactgctgactggccgcatgacaacagaccatgttcattctcggtgtacaccccaagcagaaccgccgtcgtgtatgcacttacagaggactaatgatcagctctgatcattgggggaacaactcaagggagttggtggtaatgacgccggaatacaactcaagtgaaaggtgaaaagaaaggctgccctgacgatgtgatttgaggggcttgtgtttcatcgccaatgccaggaagatgaggtagaaaagcctactgatgagctcctgttttcgagtgactcgtgaaggaaatagaccagggtgaacggcttttttcagagctataccaaacccatcctatgttgcgcattcgctgtagttttgtacataacgatatcggttggcatttgtatgtttatgaataatctgttcgacagaaatgtttttctccttgtatttagtgctcaaaaaaaa

SEQ ID NO: 148731 - protein, 841 aa, Oryza sativa
MASFAVSGARLGVVRAGGGGGGGGGPAARSGGVDLPSVLFRRKDSFSRGVVSCAGAPGKVLVPGGGSDDLLSSAEPDVETQEQPEESQIPDDNKVKPFEEEEEIPAVAEASIKVVAEDKLESSEVIQDIEENVTEGVIKDADEPTVEDKPRVIPPPGDGQKIYQIDPMLEGFRNHLDYRYSEYKRMRAAIDQHEGGLDAFSRGYEKLGFTRSAEGITYREWAPGAQSAALVGDFNNWNPNADTMTRNEYGVWEISLPNNADGSPAIPHGSRVKIRMDTPSGVKDSIPAWIKFAVQAPGEIPYNGIYYDPPEEEKYVFQHPQPKRPNSLRIYESHIGMSSPEPKINTYANFRDEVLPRIKKLGYNAVQIMAIQEHSYYASFGYHVTNFFAPSSRFGTPEDLKSLIDKAHELGLLVLMDIVHSHASNNTLDGLNGFDGTDTHYFHGGPRGHHWMWDSRLFNYGSWEVLRYLLSNARWWLEEYKFDGFRFDGVTSMMYTHHGLQVAFTGNYGEYFGFATDVDAVVYLMLVNDLIHGLYPEAVAIGEDVSGMPTFCIPVQDGGVGFDYRLHMAVPDKWIELLKQSDEYWKMGDIVHTLTNRRWSEKCVTYAESHDQALVGDKTIAFWLMDKDMYDFMALDRPSTPRIDRGIALHKMIRLVTMGLGGEGYLNFMGNEFGHPEWIDFPRGPQSLPNGSVLPGNNYSFDKCRRRFDLGDADYLRYHGMQEFDQAMQHLEEKYGFMTSEHQYISRKHEEDKVIIFERGDLVFVFNFHWSNSYFDYRVGCLKPGKYKIVLDSDDGLFGGFSRLDHDAEYFTADWPHDNRPCSFSVYTPSRTAVVYALTED

SEQ ID NO: 148732 - DNA, 2687 bp, Triticum aestivum
  CDS (11)..(2434)
atcgacgaagatgctctgcctcaccgccccctcctgctcgccatctctcccgccgcgcccctcccgtcccgctgctgaccggcccggaccggggatttcggccaagagcaagttctctgttcccgtgtctgcgccaagagactacaccatggcaacagctgaagatggtgttggcgaccttccgatatacgatctggatccgaagtttgccggcttcaaggaacacttcagttataggatgaaaaagtaccttgaccagaaacattcgattgagaagcacgagggaggccttgaagagttctctaaaggctatttgaagtttgggatcaacacagaaaatgacgcaactgtgtaccgggaatgggcccctgcagcaatggatgcacaacttattggtgacttcaacaactggaatggctctgggcacaggatgacaaaggataattatggtgtttggtcaatcaggatttcccatgtcaatgggaaacctgccatcccccataattccaaggttaaatttcgatttcaccgtggagatggactatgggtcgatcgggttcctgcatggattcgttatgcaacttttgacgcctctaaatttggagctccatatgacggtgttcactgggatccaccttctggtgaaaggtatgtgtttaagcatcctcggcctcgaaagcctgacgctccacgtatttacgaggctcatgtggggatgagtggtgagaggcctgaagtaagcacatacagagaatttgcagacaatgtgttaccgcgcataaaggcaaacaactacaacacagttcagctgatggcaatcatggaacattccatattatgcttcttttggtaccatgtgacgaatttcttcgcagttagcagcagatcaggaacaccagaggacctcaaatatcttgttgacaaggcacatagcttagggttgcgtgttctgatggatgttgtccatagccatgcgagcagtaatatgacagatggtctaaatggctatgatgttggacaaaacacacaggagtcctatttccatacaggagaaaggggttatcataaactgtgggatagtcgcctgttcaactatgccaattgggaggtcttacggtatcttctttctaatctgagatattggatggacgaattcatgtttgacggcttccgatttgatggagtaacatccatgctatataatcaccatggtatcaatatgtcattcgctggaaattacaaggaatattttggtttggataccgatgtagatgcagttgtttacatgatgcttgcgaaccatttaatgcacaaaatcttgccagaagcaactgttgttgcagaagatgtttcaggcatgccagtgctttgtcggtcagttgatgaaggtggagtagggtttgactatcgccttgctatggctattcctgatagatggattgactacttgaagaacaaagatgaccttgaatggtcaatgagtgcaatagcacatactctgaccaacaggagatatacggaaaagtgcattgcatatgctgagagccacgatcagtctattgttggcgacaagactatggcatttctcttgatggacaaggaaatgtatactggcatgtcagacttgcagcctgcttcacctacaattgatcgtggaattgcacttcaaaagatgattcacttcatcaccatggcccttggaggtgatggctacttgaattttatgggtaatgagtttggccacccagaatggattgactttccaagagaaggcaacaactggagttatgataaatgcagacgccagtggagcctctcagacattgatcacctacgatacaagtacatgaacgcatttgatcaagcaatgaatgcgctcgacgacaagttttccttcctatcgtcatcaaagcagattgtcagcgacatgaatgaggaaaagaagattattgtatttgaacgtggagatctggtcttcgtcttcaattttcatcccagtaaaacttatgatggttacaaagtcggatgtgatttgcctgggaagtacaaggtagctctggactccgatgctctgatgtttggtggacatggaagagtggcccagtacaacgatcacttcacgtcacctgaaggagtaccaggagtacctgaaacaaacttcaacaaccgccctaattcattcaaagtcctgtctccaccccgcacttgtgtggcttactatcgcgtcgaggaaaaagcggaaaagcctaaggatgaaggagctgcttcttggggcaaagctgctcctgggtacatcgatgttgaagccactcgtgtcaaagacgcagcagatggtgaggcgacttctggttccaaaaaggcgtctacaggaggtgactccagcaagaagggaattaactttgtcttcgggtcacctgacaaagataacaaataagcaccatatcaacgcttgatcagaaccgtgtaccgacgtccttgtaatattcctgctattgctagtagtagcaatactgtcaaactgtgcagacttgagattctggcttggactttgctgaggttacctactatatagaaagataaataagaggtgatggtgcgggtcgagtccggctatatgtgccaaatatgcgccatcccgagtcctctgtcataaaggaagtttcgggctttcagcccagaataaaaaa

SEQ ID NO: 148733 - protein, 807 aa, Triticum aestivum
MLCLTAPSCSPSLPPRPSRPAADRPGPGISAKSKFSVPVSAPRDYTMATAEDGVGDLPIYDLDPKFAGFKEHFSYRMKKYLDQKHSIEKHEGGLEEFSKGYLKFGINTENDATVYREWAPAAMDAQLIGDFNNWNGSGHRMTKDNYGVWSIRISHVNGKPAIPHNSKVKFRFHRGDGLWVDRVPAWIRYATFDASKFGAPYDGVHWDPPSGERYVFKHPRPRKPDAPRIYEAHVGMSGERPEVSTYREFADNVLPRIKANNYNTVQLMAIMEHSILCFFWYHVTNFFAVSSRSGTPEDLKYLVDKAHSLGLRVLMDVVHSHASSNMTDGLNGYDVGQNTQESYFHTGERGYHKLWDSRLFNYANWEVLRYLLSNLRYWMDEFMFDGFRFDGVTSMLYNHHGINMSFAGNYKEYFGLDTDVDAVVYMMLANHLMHKILPEATVVAEDVSGMPVLCRSVDEGGVGFDYRLAMAIPDRWIDYLKNKDDLEWSMSAIAHTLTNRRYTEKCIAYAESHDQSIVGDKTMAFLLMDKEMYTGMSDLQPASPTIDRGIALQKMIHFITMALGGDGYLNFMGNEFGHPEWIDFPREGNNWSYDKCRRQWSLSDIDHLRYKYMNAFDQAMNALDDKFSFLSSSKQIVSDMNEEKKIIVFERGDLVFVFNFHPSKTYDGYKVGCDLPGKYKVALDSDALMFGGHGRVAQYNDHFTSPEGVPGVPETNFNNRPNSFKVLSPPRTCVAYYRVEEKAEKPKDEGAASWGKAAPGYIDVEATRVKDAADGEATSGSKKASTGGDSSKKGINFVFGSPDKDNK

SEQ ID NO: 148734 - DNA, 2955 bp, Solanum tuberosum
  CDS (140)..(2755)
gggccttgaactcagcaatttgacactcagttagttacactcctatcacttatcagatctctattttttctcttaattccaaccaggggaatgaataaaaggatagatttgtaaaaaccctaaggagagaagaagaaagatggtgtatatactctctggagttcgttttcctactgttccatcagtgtacaaatctaatggattcagcagtaatggtgatcggaggaatgctaatgtttctgtattcttgaaaaagcactctctttcacggaagatcttggctgaaaagtcttcttacaattccgaattccgaccttctacagttgcagcatcggggaaagtccttgtgcctggaacccagagtgatagctcctcatcctcaacagaccaatttgagttcactgagacatctccagaaaattccccagcatcaactgatgtagatagttcaacaatggaacacgctagccagattaaaactgagaacgatgacgttgagccgtcaagtgatcttacaggaagtgttgaagagctggattttgcttcatcactacaactacaagaaggtggtaaactggaggagtctaaaacattaaatacttctgaagagacaattattgatgaatctgataggatcagagagaggggcatccctccacctggacttggtcagaagatttatgaaatagacccccttttgacaaactatcgtcaacaccttgattacaggtattcacagtacaagaaactgagggaggcaattgacaagtatgagggtggtttggaagctttttctcgtggttatgaaaaaatgggtttcactcgtagtgctacaggtatcacttaccgtgagtgggctcctggtgcccagtcagctgccctcattggagatttcaacaattgggacgcaaatgctgacattatgactcggaatgaatttggtgtctgggagatttttctgccaaataatgtggatggttctcctgcaattcctcatgggtccagagtgaagatacgtatggacactccatcaggtgttaaggattccattcctgcttggatcaactactctttacagcttcctgatgaaattccatataatggaatatattatgatccacccgaagaggagaggtatatcttccaacacccacggccaaagaaaccaaagtcgctgagaatatatgaatctcatattggaatgagtagtccggagcctaaaattaactcatacgtgaattttagagatgaagttcttcctcgcataaaaaagcttgggtacaatgcgctgcgaattatggctattcaagagcattcttattatgctagttttggttatcatgtcacaaatttttttgcaccaagcagccgttttggaacgcccgacgaccttaagtcttcgattgataaagctcatgagctaggaattgttgttctcatggacatcgttcacagccatgcatcaaataatactttagatggactgaacatgtttgacggcaccgatagttgttactttcactctggagctcgtggttatcattggatgtgggattcccgcctctttaactatggaaactgggaggtacttaggtatcttctctcaaatgcgagatggtggttggatgagttcaaatttgatggatttagattcgatggtgtgacatcaatgatgtatactcaccacggattatcggtgggattcactgggaactacgaggaatactttggactcgcaactgatgtggatgctgttgtgtatctgatgctggtcaacgatcttattcataggcttttcccagatgcaattaccattggtgaagatgttagcggaatgccgacattttgtattcccgttcaagatgggggtgttggctttgactatcggctgcatatggcaattgctgataaatggattgagttgctcaagaaacgggatgaggattggagagtgggtgatattgttcatacactgacaaatagaagatggtcggaaaagtgtgtttcatacgctgaaagtcatgatcaagctctagtcggtgataaaactatagcattctggctgatggacaaggatatgtatgattttatggctctggatagaccgtcaacatcattaatagatcgtgggatagcattgcacaagatgattaggcttgtaactatgggattaggaggagaagggtacctaaatttcatgggaaatgaattcggccaccctgagtggattgatttccctagggctgagccacacctttctgatggctcagtaattcccggaaaccaattcagttatgataaatgcagacggagatttgacctgggagatgcagaatatttaagataccatgggttacaagaatttgactgggctatgcagtatcttgaagataaatatgagtttatgacttcagaacaccagttcatatcacgaaaggatgaaggagataggatgattgtatttgaaagaggaaacctagttttcgtctttaattttcactggacaaatagctattcagactatcgcataggctgcctgaagcctggaaaatacaaggttgtcttggactcagatgatccactttttggtggcttcgggagaattgatcataatgccgaatatttcacctctgaaggatcgtatgatgatcgtccttgttcaattatggtgtatgcacctagtagaacagcagtggtctatgcactagtagacaaactagaagtagcagtagtagaagaacccattgaagaatgaacgaacttgtgatcgcgttgaaagatttgaacgttacttggtcatccacatagagcttcttgacatcagtcttggcggaattgcatgtgacaacaaggtttgcagttctttccactattagtagtccaccgatatacgcagagatgaagtgctgaacaaacatatgtaaaatcgatgaatttatgtcgaatgctgggacg

SEQ ID NO: 148735 - protein, 871 aa, Solanum tuberosum
MVYILSGVRFPTVPSVYKSNGFSSNGDRRNANVSVFLKKHSLSRKILAEKSSYNSEFRPSTVAASGKVLVPGTQSDSSSSSTDQFEFTETSPENSPASTDVDSSTMEHASQIKTENDDVEPSSDLTGSVEELDFASSLQLQEGGKLEESKTLNTSEETIIDESDRIRERGIPPPGLGQKIYEIDPLLTNYRQHLDYRYSQYKKLREAIDKYEGGLEAFSRGYEKMGFTRSATGITYREWAPGAQSAALIGDFNNWDANADIMTRNEFGVWEIFLPNNVDGSPAIPHGSRVKIRMDTPSGVKDSIPAWINYSLQLPDEIPYNGIYYDPPEEERYIFQHPRPKKPKSLRIYESHIGMSSPEPKINSYVNFRDEVLPRIKKLGYNALRIMAIQEHSYYASFGYHVTNFFAPSSRFGTPDDLKSSIDKAHELGIVVLMDIVHSHASNNTLDGLNMFDGTDSCYFHSGARGYHWMWDSRLFNYGNWEVLRYLLSNARWWLDEFKFDGFRFDGVTSMMYTHHGLSVGFTGNYEEYFGLATDVDAVVYLMLVNDLIHRLFPDAITIGEDVSGMPTFCIPVQDGGVGFDYRLHMAIADKWIELLKKRDEDWRVGDIVHTLTNRRWSEKCVSYAESHDQALVGDKTIAFWLMDKDMYDFMALDRPSTSLIDRGIALHKMIRLVTMGLGGEGYLNFMGNEFGHPEWIDFPRAEPHLSDGSVIPGNQFSYDKCRRRFDLGDAEYLRYHGLQEFDWAMQYLEDKYEFMTSEHQFISRKDEGDRMIVFERGNLVFVFNFHWTNSYSDYRIGCLKPGKYKVVLDSDDPLFGGFGRIDHNAEYFTSEGSYDDRPCSIMVYAPSRTAVVYALVDKLEVAVVEEPIEE

SEQ ID NO: 148736 - DNA, 2982 bp, Solanum tuberosum
  CDS (140)..(2776)
ggggccttgaactcagcaatttgacactcagttagttacactgccatcacttatcagatctctattttttctcttaattccaaccaaggaatgaataaaaagatagatttgtaaaaaccctaaggagagaagaagaaagatggtgtatacactctctggagttcgttttcctactgttccatcagtgtacaaatctaatggattcagcagtaatggtgatcggaggaatgctaatatttctgtattcttgaaaaaacactctctttcacggaagatcttggctgaaaagtcttcttacaattccgaatcccgaccttctacaattgcagcatcggggaaagtccttgtgcctggaatccagagtgatagctcctcatcctcaacagatcaatttgagttcgctgagacatctccagaaaattccccagcatcaactgatgtagatagttcaacaatggaacacgctagccagattaaaactgagaacgatgacgttgagccgtcaagtgatcttacaggaagtgttgaagagctggattttgcttcatcactacaactacaagaaggtggtaaactggaggagtctaaaacattaaatacttctgaagagacaattattgatgaatctgataggatcagagagaggggcatccctccacctggacttggtcagaagatttatgaaatagacccccttttgacaaactatcgtcaacaccttgattacaggtattcacagtacaagaaactgagggaggcaattgacaagtatgagggtggtttggaagctttttctcgtggttatgaaagaatgggtttcactcgtagtgctacaggtatcacttaccgtgagtgggctcctggtgcccagtcagctgccctcattggggatttcaacaattgggacgcaaatgctgactttatgactcggaatgaatttggtgtctgggagatttttctgccaaataatgtggatggttctcctgcaattcctcatgggtccagagtgaagatacgtatggacactccatcaggtgttaaggattccattcctgcttggatcaactactctttacagcttcctgatgaaattccatataatggaatatattatgatccacccgaagaggagaggtatatcttccaacacccacggccaaagaaaccaaagtcggtgagaatatatgaatctcatattggaatgagtagtccggagcctaaaattaactcatacgtgaattttagagatgaagttcttcctcgcataaaaaagcttgggtacaatgcggtgcaaattatggctattcaagagcattcttattatgctagttttggttatcatgtcacaaatttttttgcaccaagcagccgttttggaacgcccgacgaccttaagtctttgattgataaagctcatgagctaggaattgttgttctcatggacattgttcacagccatgcatcaaataatactttagatggactgaacatgtttgacggcacagatagttgttactttcactctggagctcgtggttatcattggatgtgggatttccgcctctttaactatggaaactgggaggtacttaggtatcttctctcaaatgcgagatggtggttggatgagttcaaatttgatggatttagatttgatggtgtgacatcaatgatgtgtactcaccacggattatcggtgggattcactgggaactacgaggaatactttggactcgcaactgatgtggatgctgttgtgtatctgatgctggtcaacgatcttattcatgggcttttcccagatgcaattaccattggtgaagatgttagcggaatgccgacattttgtgttcccgttcaagatgggggtgttggctttgactatcggctgcatatggcaattgctgataaatggattgagttgctcaagaaacgggatgaggattggagagtgggtgatattgttcatacactgacaaatagaagatggtcggaaaagtgtgtttcatacgctgaaagtcatgatcaagctctagtcggtgataaaactatagcattctggctgatggacaaggatatgtatgattttatggctctggatagaccgtcaacatcattaatagatcgtgggatagcattacacaagatgattaggcttgtaactatgggattaggaggagaagggtacctaaatttcatgggaaatgaattcggccaccctgagtggattgatttccctagggctgaacaacacctctctgatggctcagtaattcccagaaaccaattcagttatgataaatgcagacggagatttgacctgggagatgcagaatatttaagataccgtgggttgcaagaatttgaccgggctatgcagtatcttgaagataaatatgagtttatgacttcagaacaccagttcatatcacgaaaggatgaaggagataggatgattgtatttgaaaaaggaaacctagtttttgtctttaattttcactggacaaaaggctattcagactatcgcataggctgcctgaagcctggaaaatacaaggttgccttggactcagatgatccactttttggtggcttcgggagaattgatcataatgccgaatatttcacctttgaaggatggtatgatgatcgtcctcgttcaattatggtgtatgcacctagtagaacagcagtggtctatgcactagtagacaaagaagaagaagaagaagaagaagtagcagtagtagaagaagtagtagtagaagaagaatgaacgaacttgtgatcgcgttgaaagatttgaacgccacatagagcttcttgacgtatctggcaatattgcattagtcttggcggaatttcatgtgacaacaggtttgcaattctttccactattagtagtgcaacgatatacgcagagatgaagtgctgaacaaaaacatatgtaaaatcgatgaatttatgtcgaatgctgggacg

SEQ ID NO: 148737 - protein, 878 aa, Solanum tuberosum
MVYTLSGVRFPTVPSVYKSNGFSSNGDRRNANISVFLKKHSLSRKILAEKSSYNSESRPSTIAASGKVLVPGIQSDSSSSSTDQFEFAETSPENSPASTDVDSSTMEHASQIKTENDDVEPSSDLTGSVEELDFASSLQLQEGGKLEESKTLNTSEETIIDESDRIRERGIPPPGLGQKIYEIDPLLTNYRQHLDYRYSQYKKLREAIDKYEGGLEAFSRGYERMGFTRSATGITYREWAPGAQSAALIGDFNNWDANADFMTRNEFGVWEIFLPNNVDGSPAIPHGSRVKIRMDTPSGVKDSIPAWINYSLQLPDEIPYNGIYYDPPEEERYIFQHPRPKKPKSVRIYESHIGMSSPEPKINSYVNFRDEVLPRIKKLGYNAVQIMAIQEHSYYASFGYHVTNFFAPSSRFGTPDDLKSLIDKAHELGIVVLMDIVHSHASNNTLDGLNMFDGTDSCYFHSGARGYHWMWDFRLFNYGNWEVLRYLLSNARWWLDEFKFDGFRFDGVTSMMCTHHGLSVGFTGNYEEYFGLATDVDAVVYLMLVNDLIHGLFPDAITIGEDVSGMPTFCVPVQDGGVGFDYRLHMAIADKWIELLKKRDEDWRVGDIVHTLTNRRWSEKCVSYAESHDQALVGDKTIAFWLMDKDMYDFMALDRPSTSLIDRGIALHKMIRLVTMGLGGEGYLNFMGNEFGHPEWIDFPRAEQHLSDGSVIPRNQFSYDKCRRRFDLGDAEYLRYRGLQEFDRAMQYLEDKYEFMTSEHQFISRKDEGDRMIVFEKGNLVFVFNFHWTKGYSDYRIGCLKPGKYKVALDSDDPLFGGFGRIDHNAEYFTFEGWYDDRPRSIMVYAPSRTAVVYALVDKEEEEEEEVAVVEEVVVEEE

SEQ ID NO: 148738 - DNA, 2992 bp, Solanum tuberosum
  CDS (140)..(2788)
ggggccttgaactcagcaatttgacactcagttagttacactcctatcacttatcagatctctattttttctcttaattccaaccaaggaatgaataaaaggatagatttgtaaaaaccctaaggagagaagaagaaagatggtgtatacactctctggagttcgttttcctactgttccatcagtgtacaaatctaatggattcagcagtaatggtgatcggaggaatgctaatgtttctgtattcttgaaaaagcactctctttcacggaagatcttggctgaaaagtcttcttacaattccgaattccgaccttctacagttgcagcatcggggaaagtccttgtgcctggaacccagagtgatagctcctcatcctcaacagaccaatttgagttcactgagacatctccagaaaattccccagcatcaactgatgtagatagttcaacaatggaacacgctagccagattaaaactgagaacgatgacgttgagccgtcaagtgatcttacaggaagtgttgaagagctggattttgcttcatcactacaactacaagaaggtggtaaactggaggagtctaaaacattaaatacttctgaagagacaattattgatgaatctgataggatcagagagaggggcatccctccacctggacttggtcagaagatttatgaaatagacccccttttgacaaactatcgtcaacaccttgattacaggtattcacagtacaagaaactgagggaggcaattgacaagtatgagggtggtttggaagccttttctcgtggttatgaaaaaatgggtttcactcgtagtgctacaggtatcacttaccgtgagtgggctcttggtgcccagtcagctgccctcattggagatttcaacaattgggacgcaaatgctgacattatgactcggaatgaatttggtgtctgggagatttttctgccaaataatgtggatggttctcctgcaattcctcatgggtccagagtgaagatacgtatggacactccatcaggtgttaaggattccattcctgcttggatcaactactctttacagcttcctgatgaaattccatataatggaatacattatgatccacccgaagaggagaggtatatcttccaacacccacggccaaagaaaccaaagtcgctgagaatatatgaatctcatattggaatgagtagtccggagcctaaaattaactcatacgtgaattttagagatgaagttcttcctcgcataaaaaagcttgggtacaatgcgctgcaaattatggctattcaagagcattcttattacgctagttttggttatcatgtcacaaatttttttgcaccaagcagccgttttggaacgcccgacgaccttaagtctttgattgataaagctcatgagctaggaattgttgttctcatggacattgttcacagccatgcatcaaataatactttagatggactgaacatgtttgactgcaccgatagttgttactttcactctggagctcgtggttatcattggatgtgggattcccgcctctttaactatggaaactgggaggtacttaggtatcttctctcaaatgcgagatggtggttggatgcgttcaaatttgatggatttagatttgatggtgtgacatcaatgatgtatattcaccacggattatcggtgggattcactgggaactacgaggaatactttggactcgcaactgatgtggatgctgttgtgtatctgatgctggtcaacgatcttattcatgggcttttcccagatgcaattaccattggtgaagatgttagcggaatgccgacattttgtattcccgtccaagaggggggtgttggctttgactatcggctgcatatggcaattgctgataaacggattgagttgctcaagaaacgggatgaggattggagagtgggtgatattgttcatacactgacaaatagaagatggtcggaaaagtgtgtttcatacgctgaaagtcatgatcaagctctagtcggtgataaaactatagcattctggctgatggacaaggatatgtatgattttatggctctggatagaccgtcaacatcattaatagatcgtgggatagcattgcacaagatgattaggcttgtaactatgggattaggaggagaagggtacctaaatttcatgggaaatgaattcggccaccctgagtggattgatttccctagggctgaacaacacctctctgatggctcagtaatccccggaaaccaattcagttatgataaatgcagacggagatttgacctgggagatgcagaatatttaagataccgtgggttgcaagaatttgaccggcctatgcagtatcttgaagataaatatgagtttatgacttcagaacaccagttcatatcacgaaaggatgaaggagataggatgattgtatttgaaaaaggaaacctagtttttgtctttaattttcactggacaaaaagctattcagactatcgcatagcctgcctgaagcctggaaaatacaaggttgccttggactcagatgatccactttttggtggcttcgggagaattgatcataatgccgaatatttcacctttgaaggatggtatgatgatcgtcctcgttcaattatggtgtatgcaccttgtaaaacagcagtggtctatgcactagtagacaaagaagaagaagaagaagaagaagaagaagaagaagtagcagcagtagaagaagtagtagtagaagaagaatgaacgaacttgtgatcgcgttgaaagatttgaacgctacatagagcttcttgacgtatctggcaatattgcatcagtcttggcggaatttcatgtgacacaaggtttgcaattctttccactattagtagtgcaacgatatacgcagagatgaagtgctgaacaaacatatgtaaaatcgatgaatttatgtcgaatgctgggacg

SEQ ID NO: 148739 - protein, 882 aa, Solanum tuberosum
MVYTLSGVRFPTVPSVYKSNGFSSNGDRRNANVSVFLKKHSLSRKILAEKSSYNSEFRPSTVAASGKVLVPGTQSDSSSSSTDQFEFTETSPENSPASTDVDSSTMEHASQIKTENDDVEPSSDLTGSVEELDFASSLQLQEGGKLEESKTLNTSEETIIDESDRIRERGIPPPGLGQKIYEIDPLLTNYRQHLDYRYSQYKKLREAIDKYEGGLEAFSRGYEKMGFTRSATGITYREWALGAQSAALIGDFNNWDANADIMTRNEFGVWEIFLPNNVDGSPAIPHGSRVKIRMDTPSGVKDSIPAWINYSLQLPDEIPYNGIHYDPPEEERYIFQHPRPKKPKSLRIYESHIGMSSPEPKINSYVNFRDEVLPRIKKLGYNALQIMAIQEHSYYASFGYHVTNFFAPSSRFGTPDDLKSLIDKAHELGIVVLMDIVHSHASNNTLDGLNMFDCTDSCYFHSGARGYHWMWDSRLFNYGNWEVLRYLLSNARWWLDAFKFDGFRFDGVTSMMYIHHGLSVGFTGNYEEYFGLATDVDAVVYLMLVNDLIHGLFPDAITIGEDVSGMPTFCIPVQEGGVGFDYRLHMAIADKRIELLKKRDEDWRVGDIVHTLTNRRWSEKCVSYAESHDQALVGDKTIAFWLMDKDMYDFMALDRPSTSLIDRGIALHKMIRLVTMGLGGEGYLNFMGNEFGHPEWIDFPRAEQHLSDGSVIPGNQFSYDKCRRRFDLGDAEYLRYRGLQEFDRPMQYLEDKYEFMTSEHQFISRKDEGDRMIVFEKGNLVFVFNFHWTKSYSDYRIACLKPGKYKVALDSDDPLFGGFGRIDHNAEYFTFEGWYDDRPRSIMVYAPCKTAVVYALVDKEEEEEEEEEEEVAAVEEVVVEEE

SEQ ID NO: 148740 - DNA, 2598 bp, Triticum aestivum
  CDS (1)..(2598)
atgctctgcctcaccgcctcctcctcgccctcgccctcgccctctctcccgccgcgcccctcccgtcccgctgctgaccggcccggaccggggatctcggtgagtcactcgggatcttcatttcttttcttttctttcgtttccggcctccgttctgccagccggaggttccctgatgcgatgccgcgcgcgcagggcggcggcaatgtgcggctgagcgcggtgcccgcgccgtcttcgcttcgctggtcgtggccgcggaaggccaagagcaagttctctgttcccgtgtctgcgccaagagactacaccatggcaacagctgaagatggcttcggcgaccttccgatatacgatctggatcccaagttcgccggcttcaaggaccacttcagttacaggatgaaaaagtatcttgaacagaaacattcgatcgagaaatacgaggggggccttgaagagttctctaaaggctacttgaagtttgggatcaacacagaaaatgacgcaactgtgtaccgggaatgggcccctgcagcaaaggatgcacaacttattggtgacttcaacaactggaatggctctgggcacaggatgacaaaggataattttggtgtttggtcaatcaggatttcccatgtcaatgggaaacctgccatcccccataattccaaggttaaatttcgatttcaccgtggagatggactatgggtcgatcgggttcctgcatggattcgttatgcaacttttgatgcctctaaatttggagctccatatgacggtgttcactgggatccaccaactggtgaaaggtatgtgtttaagcatcctcggcctcgaaagcctgacgctccacgtatttacgaggctcatgtggggatgagtggtgaaaagcctgaagtaagcacatacagagaatttgcagacaatgtgttaccgcgcataaaggcaaacaactacaacacagttcagctgatggcaatcatggaacattcatattatgcttcttttggataccatgtgacgaatttcttcgcagttagcagcagatcaggaacaccagaggacctcaaatatcttgttgacaaggcacatagcttagggttgcgtgttctgatggatgttgtccatagccatgcgagcagtaatatgacagatggtctaaatggctatgatgttggacaaaacacacaggagtcctatttccatacaggagaaaggggttatcataaactgtgggatagtcgcctgttcaactatgccaattgggaggtcttacggtatcttctttctaatctgagatattggatggacgaattcatgtttgacggcttccgatttgatggagtaacatccatgctatataatcaccatggtatcaatatgtcattcgctggaaattacaaggaatattttggtttggataccgatgtagatgcagttgtttacatgatgcttgcgaaccatttaatgcacaaaatcttgccagaagcaactgttgttgcagaagatgtttcaggcatgccagtgctttgtcggtcagttgatgaaggtggagtagggtttgactatcgccttgctatggctattcctgatagatggattgactacttgaagaacaaagatgaccttgaatggtcaatgagtgcaatagcacatactctgaccaacaggagatatacggaaaagtgcattgcatatgctgagagccacgatcagtctattgttggcgacaagactatggcatttctcttgatggacaaggaaatgtatactggcatgtcagacttgcagcctgcttcacctacaattgatcgtggaattgcacttcaaaagatgattcacttcatcaccatggcccttggaggtgatggctacttgaattttatgggtaatgagtttggccacccagaatggattgactttccaagagaaggcaacaactggagttatgataaatgcagacgccagtggagcctctcagacattgatcacctacgatacaagtacatgaacgcatttgatcaagcaatgaatgcgctcgacgacaagttttccttcctatcgtcatcaaagcagattgtcagcgacatgaatgaggaaaagaagattattgtatttgaacgtggagatctggtcttcgtcttcaattttcatcccagtaaaacttatgatggttacaaagtcggatgtgatttgcctgggaagtacaaggtagctctggactccgatgctctgatgtttggtggacatggaagagtggcccatgacaacgatcacttcacgtcacctgaaggagtaccaggagtacctgaaacaaacttcaacaaccgccctaattcattcaaagtcctgtctccaccccgcacttgtgtggcttactatcgcgtcgaggaaaaagcggaaaagcctaaggatgaaggagctgcttcttggggcaaagctgctcctgggtacatcgatgttgaagccactcgtgtcaaagacgcagcagatggtgaggcgacttctggttccaaaaaggcgtctacaggaggtgactccagcaagaagggaattaactttgtcttcgggtcacctgacaaagataacaaataa

SEQ ID NO: 148741 - protein, 865 aa, Triticum aestivum
MLCLTASSSPSPSPSLPPRPSRPAADRPGPGISVSHSGSSFLFFSFVSGLRSASRRFPDAMPRAQGGGNVRLSAVPAPSSLRWSWPRKAKSKFSVPVSAPRDYTMATAEDGFGDLPIYDLDPKFAGFKDHFSYRMKKYLEQKHSIEKYEGGLEEFSKGYLKFGINTENDATVYREWAPAAKDAQLIGDFNNWNGSGHRMTKDNFGVWSIRISHVNGKPAIPHNSKVKFRFHRGDGLWVDRVPAWIRYATFDASKFGAPYDGVHWDPPTGERYVFKHPRPRKPDAPRIYEAHVGMSGEKPEVSTYREFADNVLPRIKANNYNTVQLMAIMEHSYYASFGYHVTNFFAVSSRSGTPEDLKYLVDKAHSLGLRVLMDVVHSHASSNMTDGLNGYDVGQNTQESYFHTGERGYHKLWDSRLFNYANWEVLRYLLSNLRYWMDEFMFDGFRFDGVTSMLYNHHGINMSFAGNYKEYFGLDTDVDAVVYMMLANHLMHKILPEATVVAEDVSGMPVLCRSVDEGGVGFDYRLAMAIPDRWIDYLKNKDDLEWSMSAIAHTLTNRRYTEKCIAYAESHDQSIVGDKTMAFLLMDKEMYTGMSDLQPASPTIDRGIALQKMIHFITMALGGDGYLNFMGNEFGHPEWIDFPREGNNWSYDKCRRQWSLSDIDHLRYKYMNAFDQAMNALDDKFSFLSSSKQIVSDMNEEKKIIVFERGDLVFVFNFHPSKTYDGYKVGCDLPGKYKVALDSDALMFGGHGRVAHDNDHFTSPEGVPGVPETNFNNRPNSFKVLSPPRTCVAYYRVEEKAEKPKDEGAASWGKAAPGYIDVEATRVKDAADGEATSGSKKASTGGDSSKKGINFVFGSPDKDNK

SEQ ID NO: 148742 - DNA, 2433 bp, Triticum aestivum
  CDS (1)..(2433)
atgctctgcctcaccgcctcctcctcgccctcgccctcgccctctctcccgccgcgcccctcccgtcccgctgctgaccggcccggaccggggatctcggccaagagcaagttctctgttcccgtgtctgcgccaagagactacaccatggcaacagctgaagatggcttcggcgaccttccgatatacgatctggatcccaagttcgccggcttcaaggaccacttcagttacaggatgaaaaagtatcttgaacagaaacattcgatcgagaaatacgaggggggccttgaagagttctctaaaggctacttgaagtttgggatcaacacagaaaatgacgcaactgtgtaccgggaatgggcccctgcagcaaaggatgcacaacttattggtgacttcaacaactggaatggctctgggcacaggatgacaaaggataattttggtgtttggtcaatcaggatttcccatgtcaatgggaaacctgccatcccccataattccaaggttaaatttcgatttcaccgtggagatggactatgggtcgatcgggttcctgcatggattcgttatgcaacttttgatgcctctaaatttggagctccatatgacggtgttcactgggatccaccaactggtgaaaggtatgtgtttaagcatcctcggcctcgaaagcctgacgctccacgtatttacgaggctcatgtggggatgagtggtgaaaagcctgaagtaagcacatacagagaatttgcagacaatgtgttaccgcgcataaaggcaaacaactacaacacagttcagctgatggcaatcatggaacattcatattatgcttcttttggataccatgtgacgaatttcttcgcagttagcagcagatcaggaacaccagaggacctcaaatatcttgttgacaaggcacatagcttagggttgcgtgttctgatggatgttgtccatagccatgcgagcagtaatatgacagatggtctaaatggctatgatgttggacaaaacacacaggagtcctatttccatacaggagaaaggggttatcataaactgtgggatagtcgcctgttcaactatgccaattgggaggtcttacggtatcttctttctaatctgagatattggatggacgaattcatgtttgacggcttccgatttgatggagtaacatccatgctatataatcaccatggtatcaatatgtcattcgctggaaattacaaggaatattttggtttggataccgatgtagatgcagttgtttacatgatgcttgcgaaccatttaatgcacaaaatcttgccagaagcaactgttgttgcagaagatgtttcaggcatgccagtgctttgtcggtcagttgatgaaggtggagtagggtttgactatcgccttgctatggctattcctgatagatggattgactacttgaagaacaaagatgaccttgaatggtcaatgagtgcaatagcacatactctgaccaacaggagatatacggaaaagtgcattgcatatgctgagagccacgatcagtctattgttggcgacaagactatggcatttctcttgatggacaaggaaatgtatactggcatgtcagacttgcagcctgcttcacctacaattgatcgtggaattgcacttcaaaagatgattcacttcatcaccatggcccttggaggtgatggctacttgaattttatgggtaatgagtttggccacccagaatggattgactttccaagagaaggcaacaactggagttatgataaatgcagacgccagtggagcctctcagacattgatcacctacgatacaagtacatgaacgcatttgatcaagcaatgaatgcgctcgacgacaagttttccttcctatcgtcatcaaagcagattgtcagcgacatgaatgaggaaaagaagattattgtatttgaacgtggagatctggtcttcgtcttcaattttcatcccagtaaaacttatgatggttacaaagtcggatgtgatttgcctgggaagtacaaggtagctctggactccgatgctctgatgtttggtggacatggaagagtggcccatgacaacgatcacttcacgtcacctgaaggagtaccaggagtacctgaaacaaacttcaacaaccgccctaattcattcaaagtcctgtctccaccccgcacttgtgtggcttactatcgcgtcgaggaaaaagcggaaaagcctaaggatgaaggagctgcttcttggggcaaagctgctcctgggtacatcgatgttgaagccactcgtgtcaaagacgcagcagatggtgaggcgacttctggttccaaaaaggcgtctacaggaggtgactccagcaagaagggaattaactttgtcttcgggtcacctgacaaagataacaaataa

SEQ ID NO: 148743 - protein, 810 aa, Triticum aestivum
MLCLTASSSPSPSPSLPPRPSRPAADRPGPGISAKSKFSVPVSAPRDYTMATAEDGFGDLPIYDLDPKFAGFKDHFSYRMKKYLEQKHSIEKYEGGLEEFSKGYLKFGINTENDATVYREWAPAAKDAQLIGDFNNWNGSGHRMTKDNFGVWSIRISHVNGKPAIPHNSKVKFRFHRGDGLWVDRVPAWIRYATFDASKFGAPYDGVHWDPPTGERYVFKHPRPRKPDAPRIYEAHVGMSGEKPEVSTYREFADNVLPRIKANNYNTVQLMAIMEHSYYASFGYHVTNFFAVSSRSGTPEDLKYLVDKAHSLGLRVLMDVVHSHASSNMTDGLNGYDVGQNTQESYFHTGERGYHKLWDSRLFNYANWEVLRYLLSNLRYWMDEFMFDGFRFDGVTSMLYNHHGINMSFAGNYKEYFGLDTDVDAVVYMMLANHLMHKILPEATVVAEDVSGMPVLCRSVDEGGVGFDYRLAMAIPDRWIDYLKNKDDLEWSMSAIAHTLTNRRYTEKCIAYAESHDQSIVGDKTMAFLLMDKEMYTGMSDLQPASPTIDRGIALQKMIHFITMALGGDGYLNFMGNEFGHPEWIDFPREGNNWSYDKCRRQWSLSDIDHLRYKYMNAFDQAMNALDDKFSFLSSSKQIVSDMNEEKKIIVFERGDLVFVFNFHPSKTYDGYKVGCDLPGKYKVALDSDALMFGGHGRVAHDNDHFTSPEGVPGVPETNFNNRPNSFKVLSPPRTCVAYYRVEEKAEKPKDEGAASWGKAAPGYIDVEATRVKDAADGEATSGSKKASTGGDSSKKGINFVFGSPDKDNK

SEQ ID NO: 148744 - DNA, 2732 bp, Phaseolus vulgaris
  CDS (62)..(2605)
tgcttgaagctcaagtcgaacttcgcttacttgatcgaagaccgtgtttggatctcgggagatgtttaactgtctgtgccttaatccgttcatttccgtctcttcaaccattgcctgcaccattcacactgtgagaagcaggcagcatcttgcaccacaaaagtcagttgatcttgctgttggctatcggaatccacttggatatgggttcggatctggattgagaagatcactgcacgagatggtcagctctcgtttcaagggtgtagctgttatgacagatgacaaatcaacaatatcatccactgaggaatacttagaaaacattggcatcttttctattgatccgtccctaaagccatataaagatcacttcaaatatagactgaagagatatgtagagcagaaaaagcttattgaagaatatgaaggaggtcttgaggaatttgccaaaggttatttgaaatttggatttaacagagaagaaggtggaattgtgtaccgtgagtgggcacctgctgctcaggaagcacaaattattggagactttaatggatgggatggttcaaaccaccagatggaaaaagatcagtttggtgtctggagtattaagatccctgatgttgatggaaatccagctataccacacagttcaagagtgaagtttagattccgccatggggatggagtttgggttgatcgcatccctgcttggataaaatatgccactgttgatccaaccagatttgcagccccatatgatggtgtctactgggatccacccctttcagagagatatcagtttaaatatccacgtccaccgaagccaaaggccccgcggatatatgaggctcatgtggggatgagtagctctgaacctcgcataaactcttaccgggaatttgcagatgagattttgccccgtattcgagcaaataactataacacagtccagctgatggccgggatggaacattcttattatgcatcatttggatatcatgtgacaaacttttatgctgtgagcagtagatctggaactcctgaagatcttaaatatctgatagataaggcccatagcctaggtttgcaggttttgatggatgttatacacagtcatgctagtaataatattactgatggactcaatggctttgatgttggccaaacttcgcaagattcttacttccatactggagatagaggttatcataagttgtgggacagtagactctttaactatgctaactgggaagttcttcgtttccttttatctaatttaaggtggtggcttgaggagtttgaatttgatggatttcgatttgatggaataacatcaatgctgtatcatcaccatggaatcaacattgcttttacaggggattataatgaatattttagtgaagcaacagatgtggatgctgttgtctatctgatgctggctaattgtctgatccacagtattttgcctgatgcaactgtaattgctgaagatgtttctggcatgcctggaattggtcatcaagtttctggtggtggaattggttttgactatcgtctagccatggctatccctgataaatggattgattacttgaagaacaagaatgagtactcatggtcaatgaaggaaatctcttggagtttaacaaataggagatacactgagaaatgtgtttcctatgctgagagccatgaccaggccatcgttggggataagactgttgcatttctcctgatggatgaagaaatgtattctggcatgtcttgcttggttgatgcttctcctattgttgagcgagggattgctcttcagaagatgatacacttcataaccatggcattgggtggagagggctaccttaatttcatgggcaatgagtttggccatccggagtggattgatttcccaagagaaggcaatggatggagttatgagaagtgcaggcgacagtggaatctggtggatacagatcacttgagatacaagttcatgaatgcatttgacagggcaatgaacttgcttgatgataaattttcatttctcaaatcaacaaaacaaatagtgagcagcgcacatgatgaagacaaggttatagtctttgagcgaggagatctgatatttgtattcaattttcatccagagaatacatatgaagggtataaagttggatgtgacttgcctggaaaatatagagttgcattggatagtgatgcttggaaatttggaggtcatggaagagtggggcacggtgtagaccacttcacgtctccagaaggcataccaggagtccctgaaacaaattttaataatcgccctaattcattcaaggtcctctcccctgctcgtacttgcgtggtatactatagagtggatgaaaaccaagaaggcagcaatgacagtttggttgggctagaagacacttttgctgcagcagatgtagcaaaaattcctgataaatctgcttctatagagagtgaatatagcaataatttggatggggtgaaagagacatcaacttcagcccaaatttctgtggaaagtgaagttatcaatttggataaggtgggaatagtggcagcttctttggatagggaaatttaatcgagggggaaattagggttttactggcttcctgagcatggaattcagtgaactgcaattaagcaggtctttggaggttataaataaacttgatatgaattttgtacaaaaaaaaaaaaaaaaaaaa

SEQ ID NO: 148745 - protein, 847 aa, Phaseolus vulgaris
MFNCLCLNPFISVSSTIACTIHTVRSRQHLAPQKSVDLAVGYRNPLGYGFGSGLRRSLHEMVSSRFKGVAVMTDDKSTISSTEEYLENIGIFSIDPSLKPYKDHFKYRLKRYVEQKKLIEEYEGGLEEFAKGYLKFGFNREEGGIVYREWAPAAQEAQIIGDFNGWDGSNHQMEKDQFGVWSIKIPDVDGNPAIPHSSRVKFRFRHGDGVWVDRIPAWIKYATVDPTRFAAPYDGVYWDPPLSERYQFKYPRPPKPKAPRIYEAHVGMSSSEPRINSYREFADEILPRIRANNYNTVQLMAGMEHSYYASFGYHVTNFYAVSSRSGTPEDLKYLIDKAHSLGLQVLMDVIHSHASNNITDGLNGFDVGQTSQDSYFHTGDRGYHKLWDSRLFNYANWEVLRFLLSNLRWWLEEFEFDGFRFDGITSMLYHHHGINIAFTGDYNEYFSEATDVDAVVYLMLANCLIHSILPDATVIAEDVSGMPGIGHQVSGGGIGFDYRLAMAIPDKWIDYLKNKNEYSWSMKEISWSLTNRRYTEKCVSYAESHDQAIVGDKTVAFLLMDEEMYSGMSCLVDASPIVERGIALQKMIHFITMALGGEGYLNFMGNEFGHPEWIDFPREGNGWSYEKCRRQWNLVDTDHLRYKFMNAFDRAMNLLDDKFSFLKSTKQIVSSAHDEDKVIVFERGDLIFVFNFHPENTYEGYKVGCDLPGKYRVALDSDAWKFGGHGRVGHGVDHFTSPEGIPGVPETNFNNRPNSFKVLSPARTCVVYYRVDENQEGSNDSLVGLEDTFAAADVAKIPDKSASIESEYSNNLDGVKETSTSAQISVESEVINLDKVGIVAASLDREI

SEQ ID NO: 148746 - DNA, 3360 bp, Phaseolus vulgaris
  CDS (133)..(2745)
catcaatgtcacgcttctctcggcacctcgaacacagcacactcgaacttttggatctgtttttctgcttctgagagaacattctcatcttctcccctgaatctcaaagactaaaccctaaccgcagcaaagatggtttacaccatctcgggaattcgatttccggctgttctttcgctgcacaactccacactccgtggcgatcgcagggcagcgtctcttccagtttttctcagaaagaacaacttctctcgtaaaatccttgctgtaaaatcttctcatgattctgattccccgtcttctgcaatcgctgaatctgataaggtgcttattcctcaagatcatgataactctgcatctttgacggatcaacttgaaactcctgttataacatcagtggatgcacataacctagaggatctaaccatggaagatgaggataaatacaacataggtgaagcagatagcagttacagacagattgaagatgggctaggttctgttgcatcatcaccagtagatgttgatattccagccaagaagacatcggtatctgttggcaaggaagtaaagataccaagtgttgaagctaaacctaagatcataccccgacctggagctgggcagaaaatatatgagattgatccatctttgctagcctatcgtgaccatcttgatttccgttttggacaatacaaaagattacatgatgaaattaacaagcatgaaggtggcctggatgcattttctcggggctatgaacaatttggcttcctacgcagtgctacaggcattacttatagagagtgggcacctggagctaagtcagcagcattaattggagacttcaacaattggaatccaaatgcagatgtaatgactcggaatgagtttggtgtttgggagattttcttgccaaacaatgtggatggttcaccaccaattcctcatggttctcgggtcaagatccgcatggatactccctctggaatcaaagactccattcctgcatggatcaaattttctgtacaggctcctggtgaaattccatatagtggaatatactatgatcccccagaagaggaaaaatatgtgttcaaacatccacagccaaagaaaccaaaatcacttagaatatacgagtcacatgttggaatgagtagtccggagccaaaaatcaatacatatgccaattttagagatgatgtactacctcgcattaaaaagcttggctataatgctgtccagattatggctatccaagaacattcttattacgccagctttgggtaccatgttacaaatttctttgcacctagtagtcgatttggaaccccagaggatcttaagtctatgatagacaaagcccatgaactaggactgcttgttctgatggatattgtacacagtcattcatcaaataatacattggatgggctaaacatgtttgatggaactgatggtcattacttccatcctgggtcacgaggttatcattggatgtgggattctcgccttttcaattatggaagctgggaagtattaaggtatctactttcaaatgcgagatggtggctggatgaatacaagtttgacggatttcgatttgatggtgttacatcaatgatgtacactcatcatggattgcaggtagcattcactggaaattacagtgagtactttggtttggcaactgatgttgatgctgtggtttacctgatgctggctaatgatctcattcatggactcttccctgaggcagttaccattggtgaagatgtgagtggaatgccaacattctgccttcctacacaagatggtggggttggttttgattatcgcctgcaaatggccattgcagacaagtggattgagattctcaagaagcaagatgaggactggaaaatgggtgatattgtgcacacactaacaaacagaaggtggctggaaaaatgtgtagcttatgctgagagtcatgaccaggccttggttggtgacaagacaattgcattttggttgatggacaaggatatgtatgacttcatgtctttagacaggccagctacacctcgtatagatcgtggtatagcattacacaaaatgattaggcttattaccatgggacttggtggtgaaggatatttaaattttatggggaatgagtttggtcatcctgagtggattgattttccaaggggtgaacaacaacttcctaatggctctgtaattccagggaacaactacagttatgataaatgcaggcgtagatttgacttgggagatgcagactatttaagatatcgagggatgcaagaatttgatcaagccatgcagcatttagaagaaaagtttggtttcatgactactgagcaccaatatatttcacggaaaaatgaaggtgacaaagttataatcttcgaaaggggaaacctcgtctttgtcttcaattttcattggaacaacagctattcagattacagagttggctgcgcaacccctgggaaatataagattgtcttggattcagatgatgccttgtttggtggtttcaatagacttaaccactctgctgagtacttcacttctgaaggatggtatgatgaccgacctagatcctttcttatctatgcaccttctagaacagcagtggtttatgcccttgcagatgatcttgaaccagcctttctagatgaagttgaaccagcccttgcagatgaagttgaaccagagccagttgatccttgatgagaagcttctgggacgaatgctacaagtgcacaatggcagcagtacatctctagtgaacctagccaaccaatgtctggttgtttaaccggcactgaaacaccaaagaagcatacttgaagtggaataagtggagctctagttaatctttagtgaggcaggacactggtctagaaatcttgtacatgtgcattgctaggtaataagttaagatatcactcccatctttctgtttttaccttttaggattcaatgtcatgaaatgcataagtcgcatcaagattgagaaatgtgaatcaacgaagctttcctctgcgaacgaaccttatactcgatgtacgtatgcacatgtcaatcttcatagtgtttactctgttcagagttggaagcttccaaaggacttttacagtgggaaattttgcaggaggcttacataggtgttttactttggggtctttatttcgttaactgtctcctttatatttaaaagttgagattttgcgatgcctaaccgtgtaataaagacatcatactggtcaaaaaagaaaataaaaaagggtcgctcattcactcctttcctggcctattttttaaaaaaaaaaaaaaaaaaaaaaa

SEQ ID NO: 148747 - protein, 870 aa, Phaseolus vulgaris
MVYTISGIRFPAVLSLHNSTLRGDRRAASLPVFLRKNNFSRKILAVKSSHDSDSPSSAIAESDKVLIPQDHDNSASLTDQLETPVITSVDAHNLEDLTMEDEDKYNIGEADSSYRQIEDGLGSVASSPVDVDIPAKKTSVSVGKEVKIPSVEAKPKIIPRPGAGQKIYEIDPSLLAYRDHLDFRFGQYKRLHDEINKHEGGLDAFSRGYEQFGFLRSATGITYREWAPGAKSAALIGDFNNWNPNADVMTRNEFGVWEIFLPNNVDGSPPIPHGSRVKIRMDTPSGIKDSIPAWIKFSVQAPGEIPYSGIYYDPPEEEKYVFKHPQPKKPKSLRIYESHVGMSSPEPKINTYANFRDDVLPRIKKLGYNAVQIMAIQEHSYYASFGYHVTNFFAPSSRFGTPEDLKSMIDKAHELGLLVLMDIVHSHSSNNTLDGLNMFDGTDGHYFHPGSRGYHWMWDSRLFNYGSWEVLRYLLSNARWWLDEYKFDGFRFDGVTSMMYTHHGLQVAFTGNYSEYFGLATDVDAVVYLMLANDLIHGLFPEAVTIGEDVSGMPTFCLPTQDGGVGFDYRLQMAIADKWIEILKKQDEDWKMGDIVHTLTNRRWLEKCVAYAESHDQALVGDKTIAFWLMDKDMYDFMSLDRPATPRIDRGIALHKMIRLITMGLGGEGYLNFMGNEFGHPEWIDFPRGEQQLPNGSVIPGNNYSYDKCRRRFDLGDADYLRYRGMQEFDQAMQHLEEKFGFMTTEHQYISRKNEGDKVIIFERGNLVFVFNFHWNNSYSDYRVGCATPGKYKIVLDSDDALFGGFNRLNHSAEYFTSEGWYDDRPRSFLIYAPSRTAVVYALADDLEPAFLDEVEPALADEVEPEPVDP

SEQ ID NO: 148748 - DNA, 2780 bp, Hordeum vulgare
  CDS (7)..(2496)
ggcgagatggcggcgccggcgttcgcagtttccgcggcggggatcgcccggccatcggctcgtcgatccagcggggcagagccgagatcgctgctcttcggccgcaacaagggcacccgtttcccccgtgccgtcggcgtcggaggttctgggtggcgcgtggtcatgcgcgcgggcggcccgtccggggaggtgatgatccctgacggcggtagtggcggaagcggaacaccgccttccatcgagggttccgttcagttcgagtctgatgatctggaggttccattcatcgacgatgaaccaagcctgcacgatggaggtgaagatactattcggtcttcagagacatatcaggttactgaagaaattgatgctgaaggcgtgagcagaatggacaaagaatcatccacggtgaagaaaatacgcattgtgccacaacccggaaatggacagcaaatatacgacattgacccaatgctccgagactttaagtaccatcttgagtatcgatacagcctatataggagaatacgttcagacattgatgaatacgatggaggcatggatgtattttcccgcggctacgagaagtttggatttgttcgcagcgctgaaggtatcacttaccgagaatgggctcctggagcagattctgcagcattagttggcgacttcaacaattgggatccaactgcagaccatatgagcaaaaatgacttgggtatttgggagatttttctgccaaacaatgcagatggttcgccgccaattcctcatggctcacgggtgaaggtgcggatggatactccatctgggacaaaggattcaattcctgcttggatcaagtactccgtgcagactccaggagatataccatacaatggaatatattatgaccctcctgaagaggagaagtatgtattcaagcatcctcaacctaaacgaccaaaatcattgcggatatatgaaacacatgttggcatgagtagcccggaaccaaagatcaacacatatgcaaacttcagagatgaggtgcttccaagaattaaaagacttggatacaatgcagttcaaataatggcaatccaagagcattcatactatggaagctttgggtaccatgttaccaatttctttgcaccaagtagccgttttgggtccccagaagatttaaaatccttgattgatagagctcacgagcttggtttgcttgtcctgatggatgttgttcacagtcacgcatcaagtaataccttggacggtttgaatggttttgatggcacggatacacattactttcatggcggctcacggggccatcactggatgtgggattctcgtgtgttcaactacgggaataaggaagttataaggtttctactttccaatgcaagatggtggctagaggaatataagttcgatggtttccgattcgacggcgcgacctccatgatgtatacccaccatggattacaagtaacctttacagggagctaccatgaatattttggctttgccacggatgtagatgcagttgtttacttgatgctggtgaatgatctaattcacgcgctttatcctgaagccgttactattggtgaagatgttagtggaatgcctacatttgcccttcctgttcaagttggtggggttggttttgactatcgcttacatatggccgttgccgataaatggattgaacttctcaaaggaagcgatgaaggttgggagatgggtaatattgtgcacacactaacaaatagaaggtggttggaaaagtgtgttacttatgctgaaagtcatgatcaagcacttgttggagacaagactattgcattctggttgatggacaaggatatgtatgatttcatggctctgaacggaccttcgacacctaatattgatcgcggaatagcactgcataaaatgattagacttatcacaatggctttaggaggagagggttatcttaactttatgggaaatgagttcgggcatcctgaatggatagactttccaagaggcccacaagtacttccaactggtaagttcatcccaggaaataacaacagttacgacaaatgccgtcgaagatttgacctgggtgatgcagaatttctcaggtatcatggtatgcagcaatttgatcaggcaatgcagcatcttgaggaaaaatatggctttatgacatcagaccaccagtacgtatctcggaaacacgaggaagataaggtgatcgtgtttgaaaaaggggacttggtatttgtgttcaacttccactggagtaatagctatttcgactaccgggtcggttgcttaaagcctgggaagtacaaggtggtgttagactcagacgctggactctttggtggatttggtaggatccatcacactggagagcacttcactaatggctgccaacatgacaacaggccccattcgttctcagtgtacactcctagcagaacctgtgttgtctatgctccaatgaactaacagcaaagtgcagcatgcgcatgcgcgctgttgttgcttagtagcaacataaatcgtatggtcaatacaaccaggtgcaaggtttaataaggttttttttttttttttttttttttttttttttttttttttttttttgcttcaaccagtcctggatagacaagacaacatgatgttgtgctgtgtgctcccaatccccagggcgttgtgaggaaaacatgctcatctgtgttaccattttatgaatcagcaacgatacttctcccaaaaaaaaaaaaaaaaaa

SEQ ID NO: 148749 - protein, 829 aa, Hordeum vulgare
MAAPAFAVSAAGIARPSARRSSGAEPRSLLFGRNKGTRFPRAVGVGGSGWRVVMRAGGPSGEVMIPDGGSGGSGTPPSIEGSVQFESDDLEVPFIDDEPSLHDGGEDTIRSSETYQVTEEIDAEGVSRMDKESSTVKKIRIVPQPGNGQQIYDIDPMLRDFKYHLEYRYSLYRRIRSDIDEYDGGMDVFSRGYEKFGFVRSAEGITYREWAPGADSAALVGDFNNWDPTADHMSKNDLGIWEIFLPNNADGSPPIPHGSRVKVRMDTPSGTKDSIPAWIKYSVQTPGDIPYNGIYYDPPEEEKYVFKHPQPKRPKSLRIYETHVGMSSPEPKINTYANFRDEVLPRIKRLGYNAVQIMAIQEHSYYGSFGYHVTNFFAPSSRFGSPEDLKSLIDRAHELGLLVLMDVVHSHASSNTLDGLNGFDGTDTHYFHGGSRGHHWMWDSRVFNYGNKEVIRFLLSNARWWLEEYKFDGFRFDGATSMMYTHHGLQVTFTGSYHEYFGFATDVDAVVYLMLVNDLIHALYPEAVTIGEDVSGMPTFALPVQVGGVGFDYRLHMAVADKWIELLKGSDEGWEMGNIVHTLTNRRWLEKCVTYAESHDQALVGDKTIAFWLMDKDMYDFMALNGPSTPNIDRGIALHKMIRLITMALGGEGYLNFMGNEFGHPEWIDFPRGPQVLPTGKFIPGNNNSYDKCRRRFDLGDAEFLRYHGMQQFDQAMQHLEEKYGFMTSDHQYVSRKHEEDKVIVFEKGDLVFVFNFHWSNSYFDYRVGCLKPGKYKVVLDSDAGLFGGFGRIHHTGEHFTNGCQHDNRPHSFSVYTPSRTCVVYAPMN

SEQ ID NO: 148750 - DNA, 2554 bp, Hordeum vulgare
  CDS (7)..(2211)
ggcgagatggcggaagtaaacatgacagggggggctgcagaaaaacttgaatcttcagaaccgactcagggtattgcggaaacaatcactgatggtgtaaccaaaggagttaaagaactagtcgttggggagaaaccgcaagttgtcccaaaaccaggagatgggcaaaaaatatacgagattgacccaacgctgaaagattttcggagccatcttgactaccgatacagcgaatacaagagaattcgtgctgctattgaccaacatgaaggtggattggaagttttttctcgtggttatgaaaagcttggatttacccgcagtgctaaaggtatcacttaccgagaatgggctcctggagcgcattctgcagcattagtaggtgacttcaacaattggaacccaaatgcagatactatgaccagagatgattatggtgtttgggagattttcctccctaacaatgctgatggatcccctgctattcctcatggctcacgtgtaaagatacggatggatactccatctggtgtgaaggattcaatttctgcttggatcaagttctctgtgcaggctccaggtgaaataccattcaatggcatatattatgatccacctgaagaggagaagtatgtcttccaacatcctcaacctaaacgaccagagtcactaaggatatatgaatcacacattggaatgagcagcccggaaccgaagataaattcatatgctaattttagggatgaggtgctgccaagaattaaaaggcttggatacaatgcagtgcagataatggcaatccaggagcattcatactatgcgagctttgggtaccatgttactaatttttttgcaccaagtagccgttttggaactccagaggacttaaaatccttgatcgatagagcacatgagcttggtttgcttgttcttatggatattgttcatagtcattcgtcaaataatacccttgacggtttgaatggtttcgatggcactgatacacattacttccacggtggtccacgtggccatcattggatgtgggattctcgtctgttcaactatgggagttgggaagtattaagattcttactgtcaaacgcgagatggtggcttgaagaatataagtttgatggatttcgatttgatggggtgacttccatgatgtatactcaccatggattacaaatgacatttactgggaactatggcgagtattttggattcgccactgatgttgatgcggtggtttacttaatgctggtcaacgatctaattcatggactttatccggatgctgtatccattggtgaagatgtcagcggaatgcctacattttgcatccctgtcccagatggtggtgttggttttgactatcgcctgcatatggctgtagcagataaatggattgaactcctcaagcaaagtgacgaatcttggaaaatgggcgatattgtgcacaccctaacaaatagaaggtggcttgagaagtgtgtcacttatgcagaaagtcatgatcaagcactagttggtgacaagactattgcattctggttgatggataaggatatgtatgatttcatggctctggatagaccttcaacccctcgcattgatcgtggcatagcattacataaaatgatcaggcttgtcaccatgggtttaggtggcgaaggctatcttaatttcatgggaaatgagtttgggcatcctgaatggatagattttccaagaggtccgcaaactcttccaaccggcaaagttctccctggaaataacaatagttatgataaatgccgccgtagatttgatcttggagatgcagattttcttagatatcgtggtatgcaagagttcgatcaggcaatgcagcatcttgaggaaaaatatgggtttatgacatctgagcaccagtatgtttctcggaaacatgaggaagataaggtgatcatcttcgaaagaggagatttggtatttgttttcaacttccactggagcaatagcaaaaaagactaccgtgttgggtgttccaagcctgggaagtacaaggtggccttagactctgatgatgcactctttggtggattcagcaggcttgatcatgatgtcgactacttcacaaccgaacatccgcatgacaacaggccacgctctttctcggtgtacactccgagcagaactgcggtcgtgtatgcccttacagagtaagaaccagcagctgtttgttacaaggcaaaaagagaactccagtgagctcgtggattgtgagcgaagcgacgggcaacggtccgagactgttctaaccgccgtgattgggaggggatcgtgcctcttccccagatgctaggaggatcagatggataggtagcttgctggcgagccctcgttttcaagtgacctgcgaaagaaaatggacgggcctgggtgacattttgtagtgctgcactgaaccatcctatctctcacattcccggttgtttatgtacatataaactaataattgcccgtgcgcttcaacttggacaaaaaaaaaaaaaaaaaaaaaaaaaaa

SEQ ID NO: 148751 - protein, 734 aa, Hordeum vulgare
MAEVNMTGGAAEKLESSEPTQGIAETITDGVTKGVKELVVGEKPQVVPKPGDGQKIYEIDPTLKDFRSHLDYRYSEYKRIRAAIDQHEGGLEVFSRGYEKLGFTRSAKGITYREWAPGAHSAALVGDFNNWNPNADTMTRDDYGVWEIFLPNNADGSPAIPHGSRVKIRMDTPSGVKDSISAWIKFSVQAPGEIPFNGIYYDPPEEEKYVFQHPQPKRPESLRIYESHIGMSSPEPKINSYANFRDEVLPRIKRLGYNAVQIMAIQEHSYYASFGYHVTNFFAPSSRFGTPEDLKSLIDRAHELGLLVLMDIVHSHSSNNTLDGLNGFDGTDTHYFHGGPRGHHWMWDSRLFNYGSWEVLRFLLSNARWWLEEYKFDGFRFDGVTSMMYTHHGLQMTFTGNYGEYFGFATDVDAVVYLMLVNDLIHGLYPDAVSIGEDVSGMPTFCIPVPDGGVGFDYRLHMAVADKWIELLKQSDESWKMGDIVHTLTNRRWLEKCVTYAESHDQALVGDKTIAFWLMDKDMYDFMALDRPSTPRIDRGIALHKMIRLVTMGLGGEGYLNFMGNEFGHPEWIDFPRGPQTLPTGKVLPGNNNSYDKCRRRFDLGDADFLRYRGMQEFDQAMQHLEEKYGFMTSEHQYVSRKHEEDKVIIFERGDLVFVFNFHWSNSKKDYRVGCSKPGKYKVALDSDDALFGGFSRLDHDVDYFTTEHPHDNRPRSFSVYTPSRTAVVYALTE

SEQ ID NO: 148752 - DNA, 1995 bp, Clostridium perfringens
  CDS (1)..(1995): transl_table=11
atggggggaaaagagatgagaaattgtaaagaacttaagcatgagaaaaatggtaacgttaccgaaaaagtggggaaaaacaaaggaaaaagcaaaaaagtgtctaaagatgaaagcttattaagctttgatttgtttttagagggaaaagaacattcagcttataagtttatgggagctcattttataactgaaaatagaaaaaggggtgtaagatttactacttgggctccaagggctagcaaaatatatgttataggtgattttaataattgggaattaaaagaagaatactccatgaaaaaaattaatgaaagaggaatatggagtttatttcttcctaaattagaagagggtataaagtataaatttgcagtagtaaatgaatgtggaaataatacagtatataaggctgacccatatgcatttaaatcagaattaagacctaatacagcctctgtacttactaaaattaagagttttagatggggagataagagatggcttaataaaagagaaaaagaaggtttagataataaacctatgaatatatatgaacttcatttagggtcttggaagagaaaagatggagagtttatgacctatgaagaaataagtgaagtgctagtagaatatataaaagagatgggatatacccatgttgagttcatgcctataaatgaacatcccttagatgcttcttggggatatcaaggagtagggtattactcagttacaagtagatatggagatttaaatggattaaagactcttataaataaacttcataaaaataatattggagtattactagattgggtacctagccatttttgtaaggatgagcatggattatttatgtttgatggatcaccaacctatgaatatgaggcttggtggaaggctaataatgaaggatggggaacttgtaattttgatttaggaagaccagaggttaaatcctttttattttctaatgctatgtactggataaatgaatttcatgtagatggattaagagtagatgcggtatctaatatgctttatttagattatggaagagaatatggagaatgggagccaaatatctatggaggaaatggaaaccttgaagctattgcctttttaaaagaactaaatacaattataaaaaaagaaggaaaaggagcaattacagtagctgaagaatcaacctcatgggaaggaattactaaacctgttgaagaggatggattaggatttgattataaatggaatatgggatggatgaatgataccttaagttatattgagttagatccaatatatagaaagtatcatcacaataaaatgaacttttcaatgatgtacaattattcagaaaagtttattctaccaatttcacatgatgaggttgttcatggtaagaaatctcttataaataaaatgtggggagatgattggaaaaagtatgcaggactaagagtttatgcttcttttatgatgggacacccagggaaaaaattaatgtttatgggctgtgaatttggtcagttcgttgaatggagagaatgggaagaacttcaatggaatgttattgaagaatttgatatacacagaaaaaccaaggagtattttaaagcattaaataaattttatttagagaatagttctttatggtcacttgattatgaagaagaaggctttaaatggattgatgctgataattcagaagaaagtgtactttcatttataagaattggaaagaataaaaaggaaaaattaatatttatatgtaattttactccagaggtttattatgattttaaagtaggggttccagaacttggagaatatgttgaagcctttaattcagatgccttagaatttggaggggcaggaaatattgtgggagatagtattttaaaagccacagaggaaagttttaaagattttgattattcaataagtgttaaggtacctccattaggaactttagttttgaaagtaaaataa

SEQ ID NO: 148753 - protein, 664 aa, Clostridium perfringens
MGGKEMRNCKELKHEKNGNVTEKVGKNKGKSKKVSKDESLLSFDLFLEGKEHSAYKFMGAHFITENRKRGVRFTTWAPRASKIYVIGDFNNWELKEEYSMKKINERGIWSLFLPKLEEGIKYKFAVVNECGNNTVYKADPYAFKSELRPNTASVLTKIKSFRWGDKRWLNKREKEGLDNKPMNIYELHLGSWKRKDGEFMTYEEISEVLVEYIKEMGYTHVEFMPINEHPLDASWGYQGVGYYSVTSRYGDLNGLKTLINKLHKNNIGVLLDWVPSHFCKDEHGLFMFDGSPTYEYEAWWKANNEGWGTCNFDLGRPEVKSFLFSNAMYWINEFHVDGLRVDAVSNMLYLDYGREYGEWEPNIYGGNGNLEAIAFLKELNTIIKKEGKGAITVAEESTSWEGITKPVEEDGLGFDYKWNMGWMNDTLSYIELDPIYRKYHHNKMNFSMMYNYSEKFILPISHDEVVHGKKSLINKMWGDDWKKYAGLRVYASFMMGHPGKKLMFMGCEFGQFVEWREWEELQWNVIEEFDIHRKTKEYFKALNKFYLENSSLWSLDYEEEGFKWIDADNSEESVLSFIRIGKNKKEKLIFICNFTPEVYYDFKVGVPELGEYVEAFNSDALEFGGAGNIVGDSILKATEESFKDFDYSISVKVPPLGTLVLKVK

SEQ ID NO: 148754 - DNA, 1893 bp, Aquifex aeolicus
  CDS (1)..(1893): transl_table=11
atgaagaagttcagtctcatcagtgattacgacgtttacctctttaaggagggaacgcacacgagactttacgataaacttggctcccacgttatagaactaaacgggaaaaggtataccttctttgcggtttgggcaccccacgcggattacgtatcacttataggcgattttaacgaatgggataaaggttctactcccatggtaaagagggaggacggctccggaatatgggaggttttacttgaaggagacctgactggttcaaagtacaagtactttataaagaacgggaattacgaagttgataagtccgatcccttcgcatttttctgtgagcaaccccccggaaacgcttccgtagtgtggaagctcaattacaggtggaacgactccgaatacatgaaaaagaggaaaagagtaaactcacacgactcgcctatatccatatacgaagttcacgtgggttcttggaggagagttccagaagagggaaacagatttttgagctatagggaacttgccgaatacctcccatactacgtaaaagagatgggatttactcacgttgagttcttacccgttatggaacatcccttttacggctcttggggctaccagataacgggctacttcgctccgacttccagatacggaactcctcaggactttatgtacttaatagacaaacttcatcaagaagggataggtgtgatactagactgggttccctctcactttcccaccgatgcccacgggctcgcatactttgacgggactcacctttacgagtacgaggactggagaaagaggtggcatcccgactggaacagctttgtttttgattacggaaaaccggaagttcgctcctttctcctgagttctgcccacttctggctcgacaagtaccacgcagacggtctcagagtggatgcagttgcttcaatgctttacctagattactctaggaaagaatgggttccaaacatatacggagggaaagaaaacctcgaggctatagaattcctcaggaagtttaacgaaagcgtttacagaaattttccagacgtccagacaatagcggaggaatcaacagcctggcctatggtgtccagacctacatacgtggggggactgggatttggaatgaagtggaatatgggttggatgaacgacacactcttttacttttcaaaggatcccatctacaggaagtaccaccatgaagtcctcactttcagtatatggtacgctttttccgagaacttcgtccttccactatcccacgatgaagttgttcacggaaagggttctctgatagggaagatgccaggagattactggcagaagtttgcaaaccttagagcccttttcggatacatgtgggcacacccagggaaaaaactcctctttatggggggagagttcggacagtttaaggaatgggatcacgaaacgagtctcgactggcacctcttggaatacccttctcacagaggtattcagagattagttaaggacttaaacgaagtttacaggagggaaaaggctttgcacgaaacggatttttcacctgagggctttgagtgggtagacttccacgactgggaaaagagcgttatatccttcttgagaaaggacaaaagcggtaaggaaattatactcgtagtttgcaacttcacacccgttccgagatacgattacagggtaggtgtaccgaaaggcggatactggagggagataatgaataccgatgcaaaggagtactggggctccggaatgggaaatctgggtggaaaagaggctgataaaatcccgtggcacggaagaaaattctcactttcacttaccctgcctcccctttccgtgatctatttaaagcacgaaggatga

SEQ ID NO: 148755 - protein, 630 aa, Aquifex aeolicus
MKKFSLISDYDVYLFKEGTHTRLYDKLGSHVIELNGKRYTFFAVWAPHADYVSLIGDFNEWDKGSTPMVKREDGSGIWEVLLEGDLTGSKYKYFIKNGNYEVDKSDPFAFFCEQPPGNASVVWKLNYRWNDSEYMKKRKRVNSHDSPISIYEVHVGSWRRVPEEGNRFLSYRELAEYLPYYVKEMGFTHVEFLPVMEHPFYGSWGYQITGYFAPTSRYGTPQDFMYLIDKLHQEGIGVILDWVPSHFPTDAHGLAYFDGTHLYEYEDWRKRWHPDWNSFVFDYGKPEVRSFLLSSAHFWLDKYHADGLRVDAVASMLYLDYSRKEWVPNIYGGKENLEAIEFLRKFNESVYRNFPDVQTIAEESTAWPMVSRPTYVGGLGFGMKWNMGWMNDTLFYFSKDPIYRKYHHEVLTFSIWYAFSENFVLPLSHDEVVHGKGSLIGKMPGDYWQKFANLRALFGYMWAHPGKKLLFMGGEFGQFKEWDHETSLDWHLLEYPSHRGIQRLVKDLNEVYRREKALHETDFSPEGFEWVDFHDWEKSVISFLRKDKSGKEIILVVCNFTPVPRYDYRVGVPKGGYWREIMNTDAKEYWGSGMGNLGGKEADKIPWHGRKFSLSLTLPPLSVIYLKHEG

SEQ ID NO: 148756 - DNA, 2112 bp, Ashbya gossypii
  CDS (1)..(2112)
atggctggtgtacctgataacgtcaagggcgtggttgagctggacccctggttagctccttacggggacatcctctctgcgagacggttccttgccgacaagtggaggcacgatatcgaacatgcggtgcccggcgggcggcgcagtctagttgagtttgcgcgcgacgcatacaagagctacgggctgcacgcggacgcgcagagcaaaagcataacgtacagggagtgggcgcccaatgcaacccgggcgtttctagtcggcgacttcaacgggtgggatgagacctcgcacgagctccagaacaaggacgagttcggggtgttcacgggtgtgttcggacctggggcggacggcgatttcatgattccgcatgactcacgcgtgaaggtggtgttcgagcttgccgacgggagccggatacaccggttgccagcgtggatcaaaagggcgacgcagcccagcaaggagaccgcgaaggagtgggggccgtcgtacgaggcgcggttctggaaccctgccagcccctacaaattcaagcacgaaaggccgcgcctggacccgaacgtggagtctctgagaatatacgaggcacacgtgggcatctcgacgccggagccgcgggttggcagctacagcgagttcaccaaggatgtgctgccgcgcatcagggatctcggatacaacgcgatacagctgatggcgatcatggagcacgcgtactacgcgtcgttcggctaccaggtcacgaacttctttgctgtttcttcgcggtacgggacgccagaggagctcaaggagctcatcgacactgcccacggaatgggcatccaggtgctgcttgacgttgtgcactcccacgcctcgaagaacgtctccgacggactgaacatgttcgatggcaccgactaccagtacttccactccatcagctccggacgcggcgagcacccgctgtgggactcgaggctgttcaactacggcagctttgaggtgcaacggtttttgctggcgaaccttgcattttacatcgatgtctatcagttcgacgggttccgcttcgatggcgtgacctcgatgctttatcatcaccacggcgtcggagagcgcggcgcgttcagtggtgactataacgagtatctctccgaccattcgggcgttgaccacgaggcgctggcgtacctcatgctggccaatgacttgatccatgacatgctgcccgccaacggcgtgaccgttgctgaagacgtgtccggttatccaaccctttgcttgccccggtctgtgggtggctgtggatttgattaccgcctcgccatggcgctgccagatatgtggattaagctgctaaaggagagcaaggacgaggactggagcatgggccacattgtctacacgcttgtcaacaggcgctacaaagaaaaggtcgtcgcgtatgcagagtcgcacgaccaggcgctcgtgggcgataaaacgctcgcgttctggatgatggacgccgcgatgtacaccgacatgacggtgctgaaggagctcacgccggtggtcgaccggggcatcgcgctgcacaagctgatccgcctgatcacgcactcgctcggcggcgaatcctacctgaactttgaagggaatgagtttggtcatcccgagtggctggacttcccgaacgccaacaatggcgacagctaccagtacgcccgccgccagttcaatctggtggacgacggcctcctccgctataagcacctctatgccttcgataaggccatgcaggaggcagagggcaagcacaagtggctgaatactccccaggcctacgtctcgctgaaacatgagacagacaaggtcatctccttcgagcgcaacggcctcgtgttcatcttcaacttccatccgacccagtccttcacggactaccgcatcggagttgacgaggcgggcgcgtaccgtataatcctcaactcggacagagaggagttcggcgggcaccgccgcatagaggaggaaaactccgtattccacaccacagacctcgagtggaacggcagaagaaacttcatccaagtctatctgccctcgagaaccgcgctggttctggcgcgcaacccctga

SEQ ID NO: 148757 - protein, 703 aa, Ashbya gossypii
MAGVPDNVKGVVELDPWLAPYGDILSARRFLADKWRHDIEHAVPGGRRSLVEFARDAYKSYGLHADAQSKSITYREWAPNATRAFLVGDFNGWDETSHELQNKDEFGVFTGVFGPGADGDFMIPHDSRVKVVFELADGSRIHRLPAWIKRATQPSKETAKEWGPSYEARFWNPASPYKFKHERPRLDPNVESLRIYEAHVGISTPEPRVGSYSEFTKDVLPRIRDLGYNAIQLMAIMEHAYYASFGYQVTNFFAVSSRYGTPEELKELIDTAHGMGIQVLLDVVHSHASKNVSDGLNMFDGTDYQYFHSISSGRGEHPLWDSRLFNYGSFEVQRFLLANLAFYIDVYQFDGFRFDGVTSMLYHHHGVGERGAFSGDYNEYLSDHSGVDHEALAYLMLANDLIHDMLPANGVTVAEDVSGYPTLCLPRSVGGCGFDYRLAMALPDMWIKLLKESKDEDWSMGHIVYTLVNRRYKEKVVAYAESHDQALVGDKTLAFWMMDAAMYTDMTVLKELTPVVDRGIALHKLIRLITHSLGGESYLNFEGNEFGHPEWLDFPNANNGDSYQYARRQFNLVDDGLLRYKHLYAFDKAMQEAEGKHKWLNTPQAYVSLKHETDKVISFERNGLVFIFNFHPTQSFTDYRIGVDEAGAYRIILNSDREEFGGHRRIEEENSVFHTTDLEWNGRRNFIQVYLPSRTALVLARNP

SEQ ID NO: 148758 - DNA, 2317 bp, Aspergillus oryzae
  CDS (112)..(2181)
gtcgaccacgcgtccgcccacgcgtccgaattatctcgttttgcgtcgtcggtcctcggtaacaaggttttgtacctgattgagccttatcagttcctgccagctgccggaatgggtacctcccaagctgtggatagctccccgccggatggtacaggtgtcatacagctggacccttggctggagccttttcgtgatgctttgaagcagaggtttagtttcatcgaaggctgggtgaaggccatcaatgagacagaaggaggtcttgaaacgttcagcaagggttacgagaggtttggcctcaacgttcaatccaatggtgacattatatacagagaatgggctccaaatgctgtgcaagcacaattggtcggagaattcaacaattgggatgtgacggcccacccaatgacaaagaatggctttggcgtctgggaggttacggtgccagcagttaacggcgctccagctattccccacgatagcaaaatcaagatatccatggtcatccccagtggagagcgaatctatcggatcccagcgtggatcaagcgtgtggtgcaagacctcagtgtgtcacctacatatgaggcggtcttctggaatcctccaaccgaaaaacaatataagtttcagtattcccgccctaagaggcctgaaagtctacggatctatgaggcacatgtgggaatttcatcaccagaaactaaagtcgcaacttacaaagagttcacttccaacatgctccctcggattaaatatctggggtacaatgcaattcaactaatggccatcatggagcacgcttactacgccagcttcggataccaagtcaataacttcttcgcagcgagcagccgctatggtacgcctgaagacctgaaggagctcgtcgataaagcccacagcatgggactagtggtgctcctcgatgtcgtccacagccatgcgtcgaagaacgtgcttgatggattgaacatgttcgacggtacagaccacctatacttccacggcggtgggaagggtcgacatgagttgtgggacagtcgcctatttaactacggccatcatgaggttctgcgcttccttttgagcaacttacgcttttggatggaagagtatggctttgatggtttccgcttcgatggtgtcacaagcatgctttacacccatcatgggattggaacaggcttttctggggggtaccatgagtacttcggttcttctgtcgatgaagaaggtgtgatgtatctaactcttgctaacgaaatgctccataacctctatcccaattgtatcacagtagcggaagacgtctctgggatgccggcactctgtctaccacactccctgggcggagttggctttgactaccgcctcgccatggccgtcccagacatgtatatcaagctcttgaaagagaagaaggacgacgagtgggacataggaaacctatccttcacgctgacgaacagacgccatggcgagaagacgattgcctacgcagaaagccacgatcaagcgcttgttggcgataaaaccctcatgatgtggctatgcgacaaagaaatgtacacacacatgtccgtgctaacagaattcacacccatcatcgaacgaggcatggccttgcataagttgatccgattagtcacacatggtctcggaggtgaaggctacctcaacttcgaaggcaacgagttcggacacccggaatggcttgacttcccccgagatggaaacaataactccttctggtatgcacgacgtcagctaaatctgaccgaagaccatcttctgcggtataaattcctcaatgatttcgaccgtgcgatgcaattgacagaagaaaaatacggatggctccattcgccacaggcatatgtcagcctaaagaacgaaaccgacaaggtcctcgtctttgagcgggctggtcttctctggattttcaacttccacccaaccaatagcttcaccgactaccgtgttggggtcgagcaatcaggcacgtaccgtatcgtcctcgacaccgatgacccagcattcggtggtctgaaccgcaatcttaaggagacacggttttttaccaccgatttatcgtggaatggccggagcaacttcctccaagtctacatccctaccaggaccgcactagtcctggccttagaggaaacgctgtagatacctcgtgtcattctgcaaacacaccctcgacgccaagctataatccacatcaagtgtttttatcttgttctcagctttataattctttactacaatttatctgtttatttttagacctcaaaaaaaaaaaaaa

SEQ ID NO: 148759 - protein, 689 aa, Aspergillus oryzae
MGTSQAVDSSPPDGTGVIQLDPWLEPFRDALKQRFSFIEGWVKAINETEGGLETFSKGYERFGLNVQSNGDIIYREWAPNAVQAQLVGEFNNWDVTAHPMTKNGFGVWEVTVPAVNGAPAIPHDSKIKISMVIPSGERIYRIPAWIKRVVQDLSVSPTYEAVFWNPPTEKQYKFQYSRPKRPESLRIYEAHVGISSPETKVATYKEFTSNMLPRIKYLGYNAIQLMAIMEHAYYASFGYQVNNFFAASSRYGTPEDLKELVDKAHSMGLVVLLDVVHSHASKNVLDGLNMFDGTDHLYFHGGGKGRHELWDSRLFNYGHHEVLRFLLSNLRFWMEEYGFDGFRFDGVTSMLYTHHGIGTGFSGGYHEYFGSSVDEEGVMYLTLANEMLHNLYPNCITVAEDVSGMPALCLPHSLGGVGFDYRLAMAVPDMYIKLLKEKKDDEWDIGNLSFTLTNRRHGEKTIAYAESHDQALVGDKTLMMWLCDKEMYTHMSVLTEFTPIIERGMALHKLIRLVTHGLGGEGYLNFEGNEFGHPEWLDFPRDGNNNSFWYARRQLNLTEDHLLRYKFLNDFDRAMQLTEEKYGWLHSPQAYVSLKNETDKVLVFERAGLLWIFNFHPTNSFTDYRVGVEQSGTYRIVLDTDDPAFGGLNRNLKETRFFTTDLSWNGRSNFLQVYIPTRTALVLALEETL

SEQ ID NO: 148760 - DNA, 2121 bp, Candida glabrata
  CDS (1)..(2121)
atgagtttgactaagattcctgaaaatgtccagggagcagtttccattgacccatggttagaaccatttgctgatgttctttctgagcgaaggtaccttgctgataaatggctatatgacatcaagcacgccacacctgatggctctgagcaaagtttggttgatttcgcaagaaacgcatataagacctatggtctgcacgccaaccagcaaactaaagaaattgtttacagagaatgggctccaaatgctcaacgtgctttcctagtcggtgagttcaacaactggaacgaagagtctcatgaaatgaagcataaggatgaatttggtgtatttagcatcactctagcacctttggagaacggcgattttgccatccctcatgattccaagatcaaagttatgtttgtcttgccagatggctcaaaagtttacagaattccagcatggattacaagagccactcaaccaagcaaagaaaccgctcagaaatacggtccaacatatgagggtagattctggaacccacctaactcttaccagtttaaacaccaaagacctaagttcaatttggctaacgactcaattaaaatttatgaagctcacattggtatctcttctccagagccaaaagttgcctcctacaaagaattcactcaaaacgttctacctagaattaagcatctaggttacgatgctatccaattgatggctattatggagcacgcttactatgcttcgtttggttaccaagttaccaacttctttgctatcagttctcgttatggtaccccagaagatttgaaagagttaatcgatactgcccatagcatgggtatcttggttctactagatgtcattcacagtcacgcatctaagaatagtgaagatggtttgaacatgttcgatggttctgaccaccaatacttccattccttgacttctggtagaggtgagcatccattatgggattcccgtttattcaattatggtagctttgaagtgcaaagattcttgcttgccaacttggcttactacattgacgtttaccaattcgatggtttcagatttgatggtgtcacctctatgctttacttacaccatggtgtcggtgctggtggtgctttcagcggtgactacaacgagtatttgtcccgtgacagatctggtgttgaccatgaagccctggcttacttgatgttggcaaatgacctagtccatgacttgctaccggaatccgctgttactattgctgaagatgtttctggttatccaactctgtgtctaccaagaactgcaggcggtggtggttttgactacagattggctatggctctcccagatatgtggatcaagcttctaaagaccaaacaagatgatgactgggatatgggtcacattgttcacacattgactaacagacgtcatggtgaaaaggttgttgcctactgtgaatcccacgatcaagctctagtcggtgacaagactcttgccttctggctaatggatgctgccatgtacaccgacatgaccgttttgaaggagccaacattggttattgaccgtggtattgctctacacaaaatgattagattaatcacccactctctaggtggtgaggcttatctaaacttcgagggtaacgagttcggccatcctgaatggttagacttcccaagagttggtaacaatgacagttaccattatgcaagaagacaattcaacttggttgatgatgatttattgcgttacaggcatttgaacgagtttgatgctgcaatgcaaaactgtgaatccaaacaccaatggttgaatactcctcaagcatatgtctctttgaagcacgaggttgacaaagttatcgccttcgaaagaaatggccatttgtttgttttcaacttccatccaactcaaagtttcactgactacagaattggtgtcgatgttgctggtacttacaaaattgtactaaatactgatagagcagaatttggtggccacaatagaattgatgaggctcaagaatttttcaccactgacttggaatggaacaacagaaggaacttcatccaagtatacattccaagcaggactgctatcgttttgacccgtcaaatgtag

SEQ ID NO: 148761 - protein, 706 aa, Candida glabrata
MSLTKIPENVQGAVSIDPWLEPFADVLSERRYLADKWLYDIKHATPDGSEQSLVDFARNAYKTYGLHANQQTKEIVYREWAPNAQRAFLVGEFNNWNEESHEMKHKDEFGVFSITLAPLENGDFAIPHDSKIKVMFVLPDGSKVYRIPAWITRATQPSKETAQKYGPTYEGRFWNPPNSYQFKHQRPKFNLANDSIKIYEAHIGISSPEPKVASYKEFTQNVLPRIKHLGYDAIQLMAIMEHAYYASFGYQVTNFFAISSRYGTPEDLKELIDTAHSMGILVLLDVIHSHASKNSEDGLNMFDGSDHQYFHSLTSGRGEHPLWDSRLFNYGSFEVQRFLLANLAYYIDVYQFDGFRFDGVTSMLYLHHGVGAGGAFSGDYNEYLSRDRSGVDHEALAYLMLANDLVHDLLPESAVTIAEDVSGYPTLCLPRTAGGGGFDYRLAMALPDMWIKLLKTKQDDDWDMGHIVHTLTNRRHGEKVVAYCESHDQALVGDKTLAFWLMDAAMYTDMTVLKEPTLVIDRGIALHKMIRLITHSLGGEAYLNFEGNEFGHPEWLDFPRVGNNDSYHYARRQFNLVDDDLLRYRHLNEFDAAMQNCESKHQWLNTPQAYVSLKHEVDKVIAFERNGHLFVFNFHPTQSFTDYRIGVDVAGTYKIVLNTDRAEFGGHNRIDEAQEFFTTDLEWNNRRNFIQVYIPSRTAIVLTRQM

SEQ ID NO: 148762 - DNA, 1980 bp, Clostridium perfringens
  CDS (1)..(1980): transl_table=11
atgagaaattgtaaagaacttaagcatgagaaaaatggtaacgttaccgaaaaaataggaaaaaacaaaggaaaaagcaaaaaagtgtctaaagatgaaagtttattaagctttgatttgtttttagagggaaaagaacattcagcttataagtttatgggggctcattttgtaactgaaaatagaaaaaggggtgtaagatttactacttgggctccaaggtctagcaaaatatatgttataggtgattttaataattgggaattaaaagaagaatactccatgaaaaaaattaatgaaagaggaatatggagtttatttcttcctaaattagaagagggtataaagtataaatttgcagtagtaaatgaatgtggaaataatacagtatataaggctgacccatatgcatttaaatcagaattaagacctaatacagcctctgtacttactaaaattaagagttttagatggggagataagagatggcttaataaaagagaaaaagaaggtttagataataaacctatgaatatatatgaacttcatttagggtcttggaagagaaaagatggagagtttatgacctatgaagaaataagcgaagtactagtagaatatgtaaaagagatgggatacacccatgttgagttcatgcctataaatgaacatcccttagatgcttcttggggatatcaaggcgtagggtattactcagttacaagtagatatggagatttaaatggattaaaggctcttataaataaacttcataaaaataatattggagtattactagattgggtacctagccatttttgcaaggatgagcatggattatttatgtttgatggatcaccaacctatgaatatggagcttggtggaaggctaataatgaaggatggggaacatgtaattttgatttaggaagaccagaggttaaatcctttttattttccaatgctatgtactggataaatgaatttcatatagatggattaagagtagatgcggtttctaatatgctttatttagattatggaagagaatatggagaatgggaaccaaatatctatggaggaaatggaaaccttgaagctattgcatttttaaaagaactaaatacaattataaaaaaagaaggaaaaggagcaattacagtagctgaagaatcaacttcatgggaaggaattactaaaccggttgaagaggatggattaggatttgattataaatggaacatgggatggatgaatgatactttaagttatattgagttagatccaatatacagaaagtatcatcataataaaatgaatttttcaatgatgtacaattattcagaaaagtttattctaccaatttcacatgatgaggttgttcatggcaagaaatctcttataaataaaatgtggggagatgattggaagaagtatgctggtctaagactttatgcttcatttatgatgggacacccagggaaaaaattaatgtttatgggatgtgaatttggtcagttcgttgaatggagagaatgggaggagcttcaatggaatattattgaagaatttgatatacacaaaaaaactcaggagtattttaaagcattaaatcatttttatttagagaatagttctttatggtcccttgattatgaagaagaaggctttaaatggattgatgctgataattcagaagaaagtgtactttcatttataagaattggaaagaataaaaaggaaaaattaatatttatatgtaattttactccagaggtttattatgattttaaagtaggggttccagaacttggagaatatgttgaggtctttaattcagattccttagaatttggaggggcaggaaatattatgggagatagtattttaaaagccacagaggaaagttttaaagattttgattattcaataattgttaaggtacctccattaggaactttagttttaaaagtaaaataa

SEQ ID NO: 148763 - protein, 659 aa, Clostridium perfringens
MRNCKELKHEKNGNVTEKIGKNKGKSKKVSKDESLLSFDLFLEGKEHSAYKFMGAHFVTENRKRGVRFTTWAPRSSKIYVIGDFNNWELKEEYSMKKINERGIWSLFLPKLEEGIKYKFAVVNECGNNTVYKADPYAFKSELRPNTASVLTKIKSFRWGDKRWLNKREKEGLDNKPMNIYELHLGSWKRKDGEFMTYEEISEVLVEYVKEMGYTHVEFMPINEHPLDASWGYQGVGYYSVTSRYGDLNGLKALINKLHKNNIGVLLDWVPSHFCKDEHGLFMFDGSPTYEYGAWWKANNEGWGTCNFDLGRPEVKSFLFSNAMYWINEFHIDGLRVDAVSNMLYLDYGREYGEWEPNIYGGNGNLEAIAFLKELNTIIKKEGKGAITVAEESTSWEGITKPVEEDGLGFDYKWNMGWMNDTLSYIELDPIYRKYHHNKMNFSMMYNYSEKFILPISHDEVVHGKKSLINKMWGDDWKKYAGLRLYASFMMGHPGKKLMFMGCEFGQFVEWREWEELQWNIIEEFDIHKKTQEYFKALNHFYLENSSLWSLDYEEEGFKWIDADNSEESVLSFIRIGKNKKEKLIFICNFTPEVYYDFKVGVPELGEYVEVFNSDSLEFGGAGNIMGDSILKATEESFKDFDYSIIVKVPPLGTLVLKVK

SEQ ID NO: 148764 - DNA, 2204 bp, Cryptococcus neoformans
  CDS (63)..(2111)
cttctcatctctcaagtcttcagttaatcttacattccatagatttattcacttcaatcaccatgacagctgtttcgttatcagatggcacagccgtgttgaagactgatccttggttggaaccgttttctggcgccctccgtgaacgatatgccgcttatcaaaagcaacgtaccattattgaagagcacgaaggcggtctcgccgaattctcaaaaggctataaatctatgggcttccagattgataaaaatgggggtgtaaggtatcgggaatgggcctctaacgcgacagaagcgagactcattggcgaattcaacaactggtcccatacggccaatcctatgacaaagtctcctttcggtgtatgggaatgttacgtacctccagtttcacccggcgtctgcgccattccccatgattccatggtcaagatatcaatgacactcccaggaggtgaatctattgacaggattcctacctggattactcgagtcacccaagatcttaacatatctcctatatatgacggacgcttctggaacccgccaaaggagcaacagtaccaattcaaacatgggcattctactcggccggtagagggattgaaaatttacgaggcccacgtggggatttctagccccaatatgagagttaccacatacaaggagttcgaggtggatgtcctaccgaagataaaacagcttggctataattgtattcagatgatggctattatggagcacgcatactacgcctcattcggctatcaagtcaccaatttctttgctgcttcgtctcgcttcggtacaccggaagaactgaaatctctcgttgacaaggcacacgaattgggtcttaccgtacttcttgatgtggttcattcccatgctagtaaaaacattcttgatggtatcaatatgtatgatggttctgaccacctttacttccatgaaggtggcagaggcagacatgatcaatgggattctcgcctcttcaattatggccaacatgaagtgctccgctttttgctttctaatctccgattctggatggacatatacatgtttgatggcttcaggttcgatggtgtcaccagtatgatgtacaaacatcatggtattggttcaggtttctcaggaggatatcatgaatactttggggattcagtagaccttgaggccatggtatacctcatgctggcaaatgccatgctgcacgagacttatcctcatgttgtcaccatagcggaggacgtctccgggatgcccaccctttgccgtccagttgcagagggtggtgttggatttgattatcgactttccatggccatccctgacatgtggatcaagcttctcaaagaatacaccgatgatcaatgggagatgggccagattgtccacaacctcactaatcgaaggcacttggagaaaagtgttgcatacgctgaaagtcatgatcaggctttggttggagacaagactttagccttctggttgatggataaggagatgtatgactttatgtctgatctttcccctttgactcccattatcgacaggggcttagctcttcataaaatgataagattcattgtccatacacttggaggagaggcgtatctcaattttgaagggaatgagtttggacaccctgaatggatggatttcccacgagaaggcaatggcaactcctttgcccatgctcgtcgccagttcaaccttgtggatgacaagttgttgcgttacaaatatctgtatgagtttgatgtcgctatgaactggctggaggacaaatacaagtggctcaactcccctcaagcttatgtttctctcaaacatgaaggagacaagatgattgtgtttgagagagccggactgctattcattttcaatttccatcccacacaatcattcacggactatcgagttggtgtagatactgcaggagagtacaaggtcatcttaacaagtgatgagactagattcggcggacacaatcgcattgatatgggtgggaggtatttcacgacacccatggaatggaatgggcggaagaattggcttcaagtctattcgccttcgaggactgtactcgttcttgggctttaattggatactagccagaaaaaaatgttaccacgaagacgcataatcatctgtatgttaccgaagtttgaaagcaatgaaataattctgtctctg

SEQ ID NO: 148765 - protein, 682 aa, Cryptococcus neoformans
MTAVSLSDGTAVLKTDPWLEPFSGALRERYAAYQKQRTIIEEHEGGLAEFSKGYKSMGFQIDKNGGVRYREWASNATEARLIGEFNNWSHTANPMTKSPFGVWECYVPPVSPGVCAIPHDSMVKISMTLPGGESIDRIPTWITRVTQDLNISPIYDGRFWNPPKEQQYQFKHGHSTRPVEGLKIYEAHVGISSPNMRVTTYKEFEVDVLPKIKQLGYNCIQMMAIMEHAYYASFGYQVTNFFAASSRFGTPEELKSLVDKAHELGLTVLLDVVHSHASKNILDGINMYDGSDHLYFHEGGRGRHDQWDSRLFNYGQHEVLRFLLSNLRFWMDIYMFDGFRFDGVTSMMYKHHGIGSGFSGGYHEYFGDSVDLEAMVYLMLANAMLHETYPHVVTIAEDVSGMPTLCRPVAEGGVGFDYRLSMAIPDMWIKLLKEYTDDQWEMGQIVHNLTNRRHLEKSVAYAESHDQALVGDKTLAFWLMDKEMYDFMSDLSPLTPIIDRGLALHKMIRFIVHTLGGEAYLNFEGNEFGHPEWMDFPREGNGNSFAHARRQFNLVDDKLLRYKYLYEFDVAMNWLEDKYKWLNSPQAYVSLKHEGDKMIVFERAGLLFIFNFHPTQSFTDYRVGVDTAGEYKVILTSDETRFGGHNRIDMGGRYFTTPMEWNGRKNWLQVYSPSRTVLVLGL

SEQ ID NO: 148766 - DNA, 2136 bp, Debaryomyces hansenii
  CDS (1)..(2136)
atgtcgttatctacaggttccacaggttcagagagaagtaatcaatccttgattaagggcgcattagatttagacccttggttagaacccttctctggacaattgatacaccgtcaattaaacttgagaaaatggtacgatgaattcaaacagaatgaaggtagtttaactaactttgcatctgcgtatgaaaagtatggtttgcatgctaattgggatactaaggaagtgttcattaacgaatatattccaaatgtggtagaggtttcgttggtaggggattttaataattgggacactaacacccataaattgaaaccagtaaatgattttggactttggtcattgacaatcaagccaacagagaacaatgaatttgctgtcccgcatgactccagatataagatttcgatggtcaccgcaagtggagagcgaatctacagattatgtccatggttgaaaagggctacaccttctactgaaaacaacttgtatgagggaaggttttggaatccacagccgactgaaacatataaattcaagcatgagagaccaagacttgaaagcaaggatggtataaaaatttacgaagctcatgtgggtatttctaccccggaaccaaaagttgggtcatataagaacttcacaactaaggtgttgcctgttatccataagttaggatataacactattcaattaatggcggttatggagcatgcttattatgcgtcgttcggttatcaggtcactaatttttttgcaatttcttctcgttttggcacgccagaagatttgaaagaattaattgacgaagcccatagattgggtattagagttttgctagatgtggttcattcccatagttctaaaaatgttgaagatggtttgaatatgtttaatggtacggatcactatttattccatggtggcactaagggttcgcatgaattatgggattctagattattcaattactctaactacgaaaccttgagattcttgttgtcaaacttgaggttttatattgatgtctttaaatttgatggattcagatttgatggcgtcacaagtatgttatacaaacatcatggcttgagttttggatttagtggtgattacaatgaatatttcaattctgagtgggtcgataatgacgcaataacatatttaatgttgggccataaattattagatgagatcagtgtaagagaaaacaactacaaatttgtctccattgctgaagatgttagtggtatgccaacattgtgcttaccgatcggtcagggtggtattggatttgactacaggttatctatggctattccagatatgtggattaagattattaaacatttgagtgatgaagaatgggatatgggaagccttgtgcataccttaactaatagaagacatggtgaaaggtgtattagttattgtgaatcccatgatcaagcattagtgggtgataagaccattgctttttggttaatggataaagaaatgtacaccaatatgtcaacattgactcctttcacgccagttatcgatagaggtattgcgttgcataaaatgattaggttaattactttctctttagggggagaaggttatttaaatttcgaaggcaatgagtttggccaccctgaatggttagactttccaagaaaaggaaacggcgaatcatatgcttatgccagaagacaattcaatttaattgaagatgatttattgcgttacaagtttttgtttgcttttgatggtgcaatgcaacatttagataccaagtatggtatattgttgtcttcgcaagcctatgtatctttgaaaaatgaaaatgataaggttattgtctttgaaagaaacggcttattattcatttttaattttcatcctaccaattcttatgctgattacaagattggggtagaaaccccaggtgtctaccaaatagttttaaactcggacagtcttagtttcggaggtcatggtagaattgaagaaacaaacaaagaaacgggtgaaaaattacaattcttcactaacaatgaaagatggaatgatagatctaatgcattattttgttatattccatcaagaacggcaattgtccttcaagtcaaggaaaaagtcgtttag

SEQ ID NO: 148767 - protein, 711 aa, Debaryomyces hansenii
MSLSTGSTGSERSNQSLIKGALDLDPWLEPFSGQLIHRQLNLRKWYDEFKQNEGSLTNFASAYEKYGLHANWDTKEVFINEYIPNVVEVSLVGDFNNWDTNTHKLKPVNDFGLWSLTIKPTENNEFAVPHDSRYKISMVTASGERIYRLCPWLKRATPSTENNLYEGRFWNPQPTETYKFKHERPRLESKDGIKIYEAHVGISTPEPKVGSYKNFTTKVLPVIHKLGYNTIQLMAVMEHAYYASFGYQVTNFFAISSRFGTPEDLKELIDEAHRLGIRVLLDVVHSHSSKNVEDGLNMFNGTDHYLFHGGTKGSHELWDSRLFNYSNYETLRFLLSNLRFYIDVFKFDGFRFDGVTSMLYKHHGLSFGFSGDYNEYFNSEWVDNDAITYLMLGHKLLDEISVRENNYKFVSIAEDVSGMPTLCLPIGQGGIGFDYRLSMAIPDMWIKIIKHLSDEEWDMGSLVHTLTNRRHGERCISYCESHDQALVGDKTIAFWLMDKEMYTNMSTLTPFTPVIDRGIALHKMIRLITFSLGGEGYLNFEGNEFGHPEWLDFPRKGNGESYAYARRQFNLIEDDLLRYKFLFAFDGAMQHLDTKYGILLSSQAYVSLKNENDKVIVFERNGLLFIFNFHPTNSYADYKIGVETPGVYQIVLNSDSLSFGGHGRIEETNKETGEKLQFFTNNERWNDRSNALFCYIPSRTAIVLQVKEKVV

SEQ ID NO: 148768 - DNA, 1866 bp, Dechloromonas aromatica
  CDS (1)..(1866): transl_table=11
atgcagcatgccgacgcactttatctgttcaacgaaggccgaaacaatcaggcttatcgattgctcggcgctcacgccgatatttccggcaccaccttccgggtctgggcaccaaacgccagccgggtttcggtggttggcgatttcaacggttggcatggcgatgtgcaccaactgcatccgctgggcgaatccggcgtttgggaaattgctgtcgccgaggcgcatactggcaacctttatcgcttcgaaatcaccaatcgccacaccggcgacaagctgatcaagagcgacccctatggccgtggcttcgaactgcgcccgggctcggcagcctatgtcgtgccaccgtcgatgcacgtctggggcgacgccgactggctgcagcaacgcgccggctgggactggcagcaggccccggtcaatatctacgaagtgcatcccggttcgtggatgcgccaccccgacggcaagccctatctttggggagagctggctgagcgactgattccctacgcgctggcgcagggctacacccacctcgaactgctgccgatcaccgagcatccgctcgacgagtcctggggctaccagacgaccggctatttcgcaccgacctcgcgctacggctcggccgacgagctacgtgccttcgtagacgcctgccaccaggcaggtctgggcgtgctgcttgactgggtgcccggccatttcccgcaggacgactgggccctggcccgcttcgacggcacggcgctttacgaacacgaagacccgcgcctcggcctgcatgccgactgggggacgcatatcttcaactacggtcggcacgaggtgcgcagtttcctgatgtcgtcggcccactggtggctgtccgaattccatttcgatggcctgcgcgtcgacgccgtggcctcgatgctttatctcgactattcacgcaaacatggcgaatggctgcccaacaagttcggcgggcgggaaaacctggaagccatcgacttcctgaaacagctcaatgccatggtgcacggcgatttccccggggcactgaccattgcggaagaatcgacggcctggccgatggtttcccggccgacctatgtcggcggccttggtttctcgatgaaatggaacatgggctggatgaacgacagtctgcgctattttcatcgcgacccgatctaccgccgctggcaccacagcgaactgaccttcgggcagatttacgcctacagcgaaaactacgtgctgcctttctcgcatgacgaagtggtgcacggcaaaggctcgctactcggcaagatgcctggcgatacctggcaacgctacgccaacctgcgcctgctgctcgcctggcaggtcctgacgccgggcaagaagctgatgttcatggggtgtgagttcggccagcaaggcgaatggtccgaaggtcgcgaactcgactggggctcgctggccaatccggaaaatgctgccgcacaacgcctgtcagccgatctcaatcgcctgtatcgcgacttgccggcgctgcacacccaggatttcagcgccctcggcttcgagtggatcgactgcaacgacagcgagcactcggtgctgtcgtggctgcgttggggcaaggatggcagctttgtcgtcgtcgtcttcaacttcacgcccgtgccgcaacccgcctatcgtctcggcgttcccgaggcgggcacctatgtcgaactgctcaataccgattccgccttctacggcggcagcaacctcggtaacggcggtgcgctaactgcaaccaaaggtgagtggatgggccgtccggccaatctggaagtgaccatcccgccactgggggcggtggtcttgcggcgcgagtga

SEQ ID NO: 148769 - protein, 621 aa, Dechloromonas aromatica
MQHADALYLFNEGRNNQAYRLLGAHADISGTTFRVWAPNASRVSVVGDFNGWHGDVHQLHPLGESGVWEIAVAEAHTGNLYRFEITNRHTGDKLIKSDPYGRGFELRPGSAAYVVPPSMHVWGDADWLQQRAGWDWQQAPVNIYEVHPGSWMRHPDGKPYLWGELAERLIPYALAQGYTHLELLPITEHPLDESWGYQTTGYFAPTSRYGSADELRAFVDACHQAGLGVLLDWVPGHFPQDDWALARFDGTALYEHEDPRLGLHADWGTHIFNYGRHEVRSFLMSSAHWWLSEFHFDGLRVDAVASMLYLDYSRKHGEWLPNKFGGRENLEAIDFLKQLNAMVHGDFPGALTIAEESTAWPMVSRPTYVGGLGFSMKWNMGWMNDSLRYFHRDPIYRRWHHSELTFGQIYAYSENYVLPFSHDEVVHGKGSLLGKMPGDTWQRYANLRLLLAWQVLTPGKKLMFMGCEFGQQGEWSEGRELDWGSLANPENAAAQRLSADLNRLYRDLPALHTQDFSALGFEWIDCNDSEHSVLSWLRWGKDGSFVVVVFNFTPVPQPAYRLGVPEAGTYVELLNTDSAFYGGSNLGNGGALTATKGEWMGRPANLEVTIPPLGAVVLRRE

SEQ ID NO: 148770 - DNA, 2061 bp, Emericella nidulans
  CDS (1)..(2061)
atgacttccacagctccatctgacggcactggtatcatcgatcttgatccgtggttagagccttttcgggaggctatcaagcgccgattcgattatgttgatgaggtggagggaggtctcgataagttcagcaagggctatgagaaattcggcttcaatgagagctggatcaagaccgttgtcagcgagacgggcgacatcacctacagggaatgggctccaaacgccatagaagcggcgctggtgggtgacttcaacaattgggataccaaggcgaatccaatgacgagagacaacttcggtgtttgggagattgcccttcctgcgaagaatggcacgccggtcataccgcatgatagtaaggttaaggttaagataactatggtcacccgcagcggagaacgtatatatcgtattcccgcatggatcaagcgtgttgtgcaagatctgaatgtatcgcctatctacgaatctgtcttttggaacccaccaaaggcagagcggtataactttcagcatgcgcgccctaagaaacccgaaagcctacggatctatgaagctcacgtcggtatctcgtccccggataccagagtagcaacatacaaggagttcacagccaacatgctccctcggattaagtacctaggctacaacgcaatccagctcatggccattatggaacatgcctactatgccagcttcgggtaccaggttaacaatttcttcgcagcgagtagtcgctacggtaagcccgaggatctgaaggaactggttgacacggcacatagtatgggcttggtagttctcctcgacgtggtgcacagccacgcatcgaagaacgtcgatgacggactgaacatgtttgatggcagtgaccatttatatttccattccgggtcaaaaggtcagcacgagctatgggacagccgactgtttaactacggaaaccatgaagttctgcggttcctccttagcaatcttcgcttttggatggaggaatacggctttgacggttttcgatttgatggtgtcaccagcatgttatatacccatcacggtattgggactggcttttcaggcggataccacgaatacttcggtccagcagttgacgacgatggcgttatgtacctagccctagcaaacgaaatgctgcaccgtctttacccagattgcataaccgtggcagaggatgtttcgggaatgccagcgttatgcctaccacacggccttggtggagtcggattcgactatcgtctcgcgatggccattccagatatgtatatcaagcttctaaaagagaagtcagacaacgattgggacattggcaatctcgccttcacgttgacaaaccgacgccatggcgagaagaccattgcatacgcagaaagccacgaccaagctctcgtcggcgacaaatctctcatgatgtggctctgcgataaagaaatgtacacacacatgtccgtcctgacagagttcacccccgtcatcgaacgcggcatggcactccacaaaatgatccggcttgtcacacacgcccttggtggcgaaggctacctcaatttcgaaggtaacgaattcgggcacccggaatggctcgactttccccgcgccggcaacaacaactccttctggtacgcacgtcgccaactaaacctgaccgaagatcaccttctacgctacagattccttaacgagttcgaccgcgccatgcagttgacagaatccaagtacggctggctccatgcgccccaggcttatatttctctcaagcacgaaggagataaagtgcttgtctttgagcgggcggatttgctatggattttcaatttccatcctacggagagttttaccgattatagggtcggtgtagaacaagctgggacttatcgggttgtgcttgacactgatgaccaggcgtttgggggcttgggaaggatcgatcaggggactagattctttacaaccgatatggaatggaatgggaggaggaattacttgcaggtttatattccgactaggactgctctggccctagcattggaagagacgctgtaa

SEQ ID NO: 148771 - protein, 686 aa, Emericella nidulans
MTSTAPSDGTGIIDLDPWLEPFREAIKRRFDYVDEVEGGLDKFSKGYEKFGFNESWIKTVVSETGDITYREWAPNAIEAALVGDFNNWDTKANPMTRDNFGVWEIALPAKNGTPVIPHDSKVKVKITMVTRSGERIYRIPAWIKRVVQDLNVSPIYESVFWNPPKAERYNFQHARPKKPESLRIYEAHVGISSPDTRVATYKEFTANMLPRIKYLGYNAIQLMAIMEHAYYASFGYQVNNFFAASSRYGKPEDLKELVDTAHSMGLVVLLDVVHSHASKNVDDGLNMFDGSDHLYFHSGSKGQHELWDSRLFNYGNHEVLRFLLSNLRFWMEEYGFDGFRFDGVTSMLYTHHGIGTGFSGGYHEYFGPAVDDDGVMYLALANEMLHRLYPDCITVAEDVSGMPALCLPHGLGGVGFDYRLAMAIPDMYIKLLKEKSDNDWDIGNLAFTLTNRRHGEKTIAYAESHDQALVGDKSLMMWLCDKEMYTHMSVLTEFTPVIERGMALHKMIRLVTHALGGEGYLNFEGNEFGHPEWLDFPRAGNNNSFWYARRQLNLTEDHLLRYRFLNEFDRAMQLTESKYGWLHAPQAYISLKHEGDKVLVFERADLLWIFNFHPTESFTDYRVGVEQAGTYRVVLDTDDQAFGGLGRIDQGTRFFTTDMEWNGRRNYLQVYIPTRTALALALEETL

SEQ ID NO: 148772 - DNA, 2354 bp, Glomus intraradices
  CDS (157)..(2208)
attcttttcaattctttttatatacgcccacgtacattaatttgtatccattttaacttttttgtatatctatatcccatttttttttatatataaatagttacgttaagctttaattaagaacaaactctttttcttactttccaattaactaaaatgtcccctacagaaatgataagtcaagaaaattatgagcctggtatttgtaaaattgatccttggttaaaaccttttgctcccgcaattaaacgcagacttgaatcatataaaaaatgggtaaaagaaatcaaccaaaatgaaggtggttatgataaattttcgcgtggatacgaacgttttggtctcaatgtactaccaaatggcgatattatataccgcgaatgggcacctaatgccgttgctgcaagtttgattggcgaatttaatgattgggataggtctaaacatccaatgaagaaggattcttttggtgtttgggaagttcatatccctgccaaaaatggtattcctactattcctcacaatactaaaataaaaatctccatgactacaccagaaggcgaatgtatcgatcgtcttccagcctggataaaacgagttacacaagatttaaatgtaagtcttgcatatgatgccatcttttggaacccacctcaaaaatatcaatggaaaaataactccccaaaaaaaccaacaagtttaagaatttatgaagcccatgtgggaatttctacaaatgaagggcgtgttggaacttataatgaattcacggataacgtgttgaagcgtatcaaagacctgggttataatgctattcaattgatggctatcatggaacatgcatattatgcatccttcggatatcaagtgacaagtttctttggtgtatccagtcgttacggtacgcctgaagagttgatgcgactcattgatactgcccatggcatgggtttgtatgtgctattagacgttgttcattctcatgcatgcaagaacgtgctagatgggttgaacatgtttgacgggtcggatcattgttacttccatgaaggaggaaaaggccgacatgacctttgggatagtcgattgttcaattatggtcattgggaggtacttcgatttttactttcaaatcttcgcttctttatggaagaatatagatttgatggatttagatttgatggagtcactagtatgatgtatcatcatcatggcatcgggacgggattttccggtggttatcacgaatattttggcgatactgtggatgaaggaggagtcgtttatttaatgttggcaaatgacatgcttcacaagctttatccccgtataattacagtctcagaagacgtatctggaatgcctggtctctgtctaccagtagaagagggagggattggctttgattaccgattagccatggccattcccgatatgtggattaaattattgaaagaacaacgtgatgatgattgggacatgggtaatatttgttggacattgactaacagaagacatatggaaaaaactattgcctacgctgaatctcacgatcaagctcttgtaggcgacaaaaacacttgccttctggttaatggacaaggaatgtacacgcatatgtcggacatgactccacttactccaatcattgaccgtggtttggccttacataaaatgattcgattgcttacacatggccttggcggtgaaggttatctaaactttgaaggaaatgaatttggacatccggaatggttggactttcccagagctggaaacaataattcgttccattatgctagaagacaatggaatgtagtagacgatgatttgttaagatataaatatttaaatgagtttgataaagcaatgcaacatttagaggaacaatatggatggttaagttcgccacaggcatatatttctctaaaacataatgaaaataaattagtagcctttgagagaggaaatttactttggatttttaattttctcccaactcaatcttttgctgattataaaattggaactgaatgggcgggaaaatattcgattgcccttaatactgatcgcaagatatttgggggtcatgataggattgatgaaagtatatcatatcattcacaaccacatgaatgggacggaagaaagaattatattcaggtatatattccgtgtagagttgctcccgttttgtctcattgttaaataatgaaatttatgcgataggattattttttgatgggttatcttaaaacctcttaatcaaaaattattaaattattaaaataaaacttcagaacatttatttaagaattttgctagaaaaaaaaaaaaaaaaaaaaaaaaaaaaa

SEQ ID NO: 148773 - protein, 683 aa, Glomus intraradices
MSPTEMISQENYEPGICKIDPWLKPFAPAIKRRLESYKKWVKEINQNEGGYDKFSRGYERFGLNVLPNGDIIYREWAPNAVAASLIGEFNDWDRSKHPMKKDSFGVWEVHIPAKNGIPTIPHNTKIKISMTTPEGECIDRLPAWIKRVTQDLNVSLAYDAIFWNPPQKYQWKNNSPKKPTSLRIYEAHVGISTNEGRVGTYNEFTDNVLKRIKDLGYNAIQLMAIMEHAYYASFGYQVTSFFGVSSRYGTPEELMRLIDTAHGMGLYVLLDVVHSHACKNVLDGLNMFDGSDHCYFHEGGKGRHDLWDSRLFNYGHWEVLRFLLSNLRFFMEEYRFDGFRFDGVTSMMYHHHGIGTGFSGGYHEYFGDTVDEGGVVYLMLANDMLHKLYPRIITVSEDVSGMPGLCLPVEEGGIGFDYRLAMAIPDMWIKLLKEQRDDDWDMGNICWTLTNRRHMEKTIAYAESHDQALVGDKNTCLLVNGQGMYTHMSDMTPLTPIIDRGLALHKMIRLLTHGLGGEGYLNFEGNEFGHPEWLDFPRAGNNNSFHYARRQWNVVDDDLLRYKYLNEFDKAMQHLEEQYGWLSSPQAYISLKHNENKLVAFERGNLLWIFNFLPTQSFADYKIGTEWAGKYSIALNTDRKIFGGHDRIDESISYHSQPHEWDGRKNYIQVYIPCRVAPVLSHC

SEQ ID NO: 148774 - DNA, 2160 bp, Kluyveromyces lactis
  CDS (1)..(2160)
atgactggtgataataacgatattcctgagaatgtcagaggcgttgttgaaattgactcttggttaactccttttgctaaggttctctctgagagaaggtacttggcagatgagtggagatataagattgaacacagtacgaattcagaaggcagagataccactttggctcaatttgctcgtgatgcttataagagttttgggttgcatgcagatcctggtagtcttgagattcgttataaagaatgggctcccaacgccgtgcgagcctttttaataggtgaattcaactcatggaatgaaaatgctaatgaaatgcaaagagatgagtatggcatttttaccactgttgtgccacctgtcgttgatgatagtgggaataaacaatatggaattccacatgattctaaggtgaaggtatgcttccagttagctgatggttctaggatctatagattgccagcatggattacaagggctacgcaaccagataaagaaaccgcgaagcagtggggcccctcctatgaggccaggttctggaatcctccagttcactactcttttaaaaacaagagaccaggattcatgagagacactgattcgttgcgtatctacgaggcgcacgtaggtatctctactccagaacctaaagttggttcttataaggagtttacccaaaacgttttacctcgtattaaggatttagggtacgatgccattcaattaatggctattatggaacacgcatactatgcttctttcggttaccaggtgaccaatttctttgccgcttcttcccgttttggtacgcctgacgagttgaaagagttggtcgatactgctcatggaatgggaattctagtgctcttggatgtggttcattctcatgcttctaaaaatgttactgatggcctaaaccaattcgacggatccgatcatcaatatttccattctttggcatcttctcgtggtgaacatcctttatgggattctaggctatttaactatgggcattttgaagtacaaagattcctacttgctaatctagcattttacattgatgtgtatcaatttgacgggttcagattcgatggtgtaacatcaatgctatacttgcatcatggtgttggtgaaggtggtgccttcagtggtgattacaatgagtacttatctagtgaaagatcttttgttgatcatgaggccttggcatacttgatgttagctaatgaccttgtcagagaattgttaccagacaacggaatcaccattgcagaagacgtttcagggtatccgactctttgtatgccacgtcatctgggaggcgctggttttgattaccgtctagcaatggcgttacctgatatgtggatcaaacttttgaaagaaagcagagacgaggactgggaaatgggtcatattgttcacaccttggtaaatagaaggcaccgtgaaaaggttgtcgcatatacggaatctcatgatcaggctttggttggtgataagaccttggcattctggttgatggatgcggccatgtataccgatatgacaattttgaaagagtccacgccagttgttgaccgtggtattgctttgcacaagcttattagactaattacccactctttaggtggtgaagcttatttgaactttgaaggtaacgagtttggtcaccctgaatggttggatttccctaacgttaacaacggcgatagttaccattatgctagaaggcagttcaacttggtggatgaccctttgttgagataccaatacttgtatcagtttgataaggctatgcaaactactgaaaagaattataaatggttgaatacaccacaagcgtatgtctctttgaaacacgaagttgacaaggtcatcgcattcgaaagaaatggactcttgttcatcttcaatttccatccgacagaatccttcacagattatcgtattggagttaatgagccaggttgctaccgtatcgtattgaactcagacaagcatgaatacggtggctgggatcgtatcgatgagtcccaatccaagtattttactactgatttgaaatggaacgaaagaaacaatttcatccaggtttacattccaaaccgtaccgcattagttctcgcccttgattcaagagtgaggaatggaaattag

SEQ ID NO: 148775 - protein, 719 aa, Kluyveromyces lactis
MTGDNNDIPENVRGVVEIDSWLTPFAKVLSERRYLADEWRYKIEHSTNSEGRDTTLAQFARDAYKSFGLHADPGSLEIRYKEWAPNAVRAFLIGEFNSWNENANEMQRDEYGIFTTVVPPVVDDSGNKQYGIPHDSKVKVCFQLADGSRIYRLPAWITRATQPDKETAKQWGPSYEARFWNPPVHYSFKNKRPGFMRDTDSLRIYEAHVGISTPEPKVGSYKEFTQNVLPRIKDLGYDAIQLMAIMEHAYYASFGYQVTNFFAASSRFGTPDELKELVDTAHGMGILVLLDVVHSHASKNVTDGLNQFDGSDHQYFHSLASSRGEHPLWDSRLFNYGHFEVQRFLLANLAFYIDVYQFDGFRFDGVTSMLYLHHGVGEGGAFSGDYNEYLSSERSFVDHEALAYLMLANDLVRELLPDNGITIAEDVSGYPTLCMPRHLGGAGFDYRLAMALPDMWIKLLKESRDEDWEMGHIVHTLVNRRHREKVVAYTESHDQALVGDKTLAFWLMDAAMYTDMTILKESTPVVDRGIALHKLIRLITHSLGGEAYLNFEGNEFGHPEWLDFPNVNNGDSYHYARRQFNLVDDPLLRYQYLYQFDKAMQTTEKNYKWLNTPQAYVSLKHEVDKVIAFERNGLLFIFNFHPTESFTDYRIGVNEPGCYRIVLNSDKHEYGGWDRIDESQSKYFTTDLKWNERNNFIQVYIPNRTALVLALDSRVRNGN

SEQ ID NO: 148776 - DNA, 2640 bp, Zea mays
  CDS (6)..(2405)
gcgagatggcgttccgggtttctggggcggtgctcggtggggccgtaagggctccccgactcaccggcggcggggagggtagtctagtcttccggcacaccggcctcttcttaactcggggtgctcgagttggatgttcggggacgcacggggccatgcgcgcggcggccgcggccaggaaggcggtcatggttcctgagggcgagaatgatggcctcgcatcaagggctgactcggctcaattccagtcggatgaactggaggtaccagacatttctgaagagacaacgtgcggtgctggtgtggctgatgctcaagccttgaacagagttcgagtggtccccccaccaagcgatggacaaaaaatattccagattgaccccatgttgcaaggctataagtaccatcttgagtatcggtacagcctctatagaagaatccgttcagacattgatgaacatgaaggaggcttggaagccttctcccgtagttatgagaagtttggatttaatgccagcgcggaaggtatcacatatcgagaatgggctcctggagcattttctgcagcattggtgggtgacgtcaacaactgggatccaaatgcagatcgtatgagcaaaaatgagtttggtgtttgggaaatttttctgcctaacaatgcagatggtacatcacctattcctcatggatctcgtgtaaaggtgagaatggatactccatcagggataaaggattcaattccagcctggatcaagtactcagtgcaggccccaggagaaataccatatgatgggatttattatgatcctcctgaagaggtaaagtatgtgttcaggcatgcgcaacctaaacgaccaaaatcattgcggatatatgaaacacatgtcggaatgagtagcccggaaccgaagataaacacatatgtaaactttagggatgaagtcctcccaagaataaaaaaacttggatacaatgcagtgcaaataatggcaatccaagagcactcatattatggaagctttggataccatgtaactaatttttttgcgccaagtagtcgttttggtaccccagaagatttgaagtctttgattgatagagcacatgagcttggtttgctagttctcatggatgtggttcatagtcatgcgtcaagtaatactctggatgggttgaatggttttgatggtacagatacacattactttcacagtggtccacgtggccatcactggatgtgggattctcgcctatttaactatgggaactgggaagttttaagatttcttctctccaatgctagatggtggctcgaggaatataagtttgatggtttccgttttgatggtgtgacctccatgatgtacactcaccacggattacaagtaacatttacggggaacttcaatgagtattttggctttgccaccgatgtagatgcagtggtttacttgatgctggtaaatgatctaattcatggactttatcctgaggctgtaaccattggtgaagatgttagtggaatgcctacatttgcccttcctgttcacgatggtggggtaggttttgactatcggatgcatatggctgtggctgacaaatggattgaccttctcaagcaaagtgatgaaacttggaagatgggtgatattgtgcacacactgacaaataggaggtggttagagaagtgtgtaacttatgctgaaagtcatgatcaagcattagtcggcgacaagactattgcgttttggttgatggacaaggatatgtatgatttcatggccctcgatagaccttcaactcctaccattgatcgtgggatagcattacataagatgattagacttatcacaatgggtttaggaggagagggctatcttaatttcatgggaaatgagtttggacatcctgaatggatagattttccaagaggtccgcaaagacttccaagtggtaagtttattccagggaataacaacagttatgacaaatgtcgtcgaagatttgacctgggtgatgcagactatcttaggtatcatggtatgcaagagtttgatcaggcaatgcaacatcttgagcaaaaatatgaattcatgacatctgatcaccagtatatttcccggaaacatgaggaggataaggtgattgtgttcgaaaagggagatttggtatttgtgttcaacttccactgcaacaacagctattttgactaccgtattggttgtcgaaagcctggggtgtataaggtggtcttggactccgacgctggactatttggtggatttagcaggatccatcacgcagccgagcacttcaccgccgactgttcgcatgataataggccatattcattctcggtttatacaccaagcagaacatgtgtcgtctatgctccagtggagtgatagcggggtactcgttgctgcgcggcatgtgtggggctgtcgatgtgaggaaaaaccttcttccaaaaccggcagatgcatgcatgcatgctacaataaggttctgatactttaatcgatgctggaaagcccatgcatctcgctgcgttgtcctctctatttatataagaccttcaaggtgtcaattaaacatagagttttcgtttttcgcttaaaaaaaaaaaaaaaaaactca

SEQ ID NO: 148777 - protein, 799 aa, Zea mays
MAFRVSGAVLGGAVRAPRLTGGGEGSLVFRHTGLFLTRGARVGCSGTHGAMRAAAAARKAVMVPEGENDGLASRADSAQFQSDELEVPDISEETTCGAGVADAQALNRVRVVPPPSDGQKIFQIDPMLQGYKYHLEYRYSLYRRIRSDIDEHEGGLEAFSRSYEKFGFNASAEGITYREWAPGAFSAALVGDVNNWDPNADRMSKNEFGVWEIFLPNNADGTSPIPHGSRVKVRMDTPSGIKDSIPAWIKYSVQAPGEIPYDGIYYDPPEEVKYVFRHAQPKRPKSLRIYETHVGMSSPEPKINTYVNFRDEVLPRIKKLGYNAVQIMAIQEHSYYGSFGYHVTNFFAPSSRFGTPEDLKSLIDRAHELGLLVLMDVVHSHASSNTLDGLNGFDGTDTHYFHSGPRGHHWMWDSRLFNYGNWEVLRFLLSNARWWLEEYKFDGFRFDGVTSMMYTHHGLQVTFTGNFNEYFGFATDVDAVVYLMLVNDLIHGLYPEAVTIGEDVSGMPTFALPVHDGGVGFDYRMHMAVADKWIDLLKQSDETWKMGDIVHTLTNRRWLEKCVTYAESHDQALVGDKTIAFWLMDKDMYDFMALDRPSTPTIDRGIALHKMIRLITMGLGGEGYLNFMGNEFGHPEWIDFPRGPQRLPSGKFIPGNNNSYDKCRRRFDLGDADYLRYHGMQEFDQAMQHLEQKYEFMTSDHQYISRKHEEDKVIVFEKGDLVFVFNFHCNNSYFDYRIGCRKPGVYKVVLDSDAGLFGGFSRIHHAAEHFTADCSHDNRPYSFSVYTPSRTCVVYAPVE

SEQ ID NO: 148778 - DNA, 2178 bp, Methylobacillus flagellatus
  CDS (1)..(2178): transl_table=11
atgttgactaaatcaaaacaagatcctcacctcaaccatatcctcaatgcgcgccatcatgaccctttttcgtatctgggtctgcaccaggatggcacgcaatatatcctgcgcctgttccagcccttcgcagcgcgtgcctggctgcaaacggcgtcgggatgggtgccattgcagcgcagccatgaagccggcctgttcgagtggaaaggcaatacgccgccgccggtaccctgccggatacggttggaggaaaacggccatagctgggagacatatgacgcctataccttctggaccacgctgtcgcctgaggagctgtatctgtttggcgaaggccggctgaaacaagcctaccgtactttcggggcgcacctgtgcgagcagcaaggagtggcaggggtgcgcttcgtggtatgggcgcctaatgcagaacgtgtcagcgtcatcggcaacttcaaccactgggatggccgcatgcaccagatgcgtgtgcatggaagcagcggcgtatgggaaatcttcattcccgggctgaccagcagcgacctgtacaaattcgagatccgcaaccggcaaaccggacagatcctggtcaagaccgacccctacggtttcagctttgaacagcggccaggtacggctgccagggtcacggcacacggtcattacgcttggcaggatgcagagtggctggaagatcgggcgcgagccgactggttgcacgcgcccttcaactgctacgaggtccaccttggctcatggcggcgagatgcccatggcgaattcctggggtatcgcgaacttgcccaccagcttgtcccttatatgcaggaaatgggttatacccacatcgaattgctgccggtttccgaacacccgctcaatgaatcatggggttatcagacgaccgggtatttcgcccccaccaaccggtttggcagcccggacgaccttcgctactttgtcgaccaatgccaccaggccgggataggcgtcatcctggactgggtaccggggcattttcccaaggacgattgggcactggcgcgttttgacggctcggcattgtttgagcacgaggacccccggttgggggagcatcaggactgggggacttatattttcaattatggccgcaacgaggtccgcaacttcctgctggccagcgcacattactggctggaggagttccacatggacgggttgcgggtggatgccgtggcctccatgctctacctggactactcgcgcaaagagggcgagtggctgccgaaccggcatggcggacgcgaaaatctggaagccatcgatttcctcaagcagctcaatgtcatggtgcatgaggacttcccgggcgccttgacgatagcggaagagtcgacttcctggcccatggtatcccgcccggtctaccttggcggcctgggcttttccatgaaatggaacatgggctggatgaacgacaccctctcttacatgcagcacgaccccatccatcgacgctttcatcacgacaaactcacattcggccagatttacgcctatagcgagaatttcgtcctgcccttctcccacgatgaagtcgtgcatgggaaacgctccctgctcgacaagatgcctggagatacctggcagaaattcgccaacctgcgcctgctcgccacctaccagatgacagcgtccggcaagaagctcaacttcatgggtaacgaactggcgcaaggacgggagtggaacgtcaacagcagcctggactggcacctccttgacctgcactggcaccaaggcattcaacgcctgcaccgcgatttgtcccacctgtaccgccaagtgcccgcactgcatgagctcgatttcgacgcccatgggtttgaatggatagattgcagcgatagtgaccagtccatcatcaactacctgcggcgggctcgcgacggcagctttgtgctggtgctgctcaacttcaccccagtccttcgcagcggctaccgcgtcgggacccccctggccggacattaccgtgaaatcttcaacagcgacgccggatattacggtgggagtaaccagggtaacggcaacgggcttcaaaccgaggcatatccctggatggggcattcgcactccctcgtcgttaccatcccgcccctgggaggcgtcatcattcaaccgggctaa

SEQ ID NO: 148779 - protein, 725 aa, Methylobacillus flagellatus
MLTKSKQDPHLNHILNARHHDPFSYLGLHQDGTQYILRLFQPFAARAWLQTASGWVPLQRSHEAGLFEWKGNTPPPVPCRIRLEENGHSWETYDAYTFWTTLSPEELYLFGEGRLKQAYRTFGAHLCEQQGVAGVRFVVWAPNAERVSVIGNFNHWDGRMHQMRVHGSSGVWEIFIPGLTSSDLYKFEIRNRQTGQILVKTDPYGFSFEQRPGTAARVTAHGHYAWQDAEWLEDRARADWLHAPFNCYEVHLGSWRRDAHGEFLGYRELAHQLVPYMQEMGYTHIELLPVSEHPLNESWGYQTTGYFAPTNRFGSPDDLRYFVDQCHQAGIGVILDWVPGHFPKDDWALARFDGSALFEHEDPRLGEHQDWGTYIFNYGRNEVRNFLLASAHYWLEEFHMDGLRVDAVASMLYLDYSRKEGEWLPNRHGGRENLEAIDFLKQLNVMVHEDFPGALTIAEESTSWPMVSRPVYLGGLGFSMKWNMGWMNDTLSYMQHDPIHRRFHHDKLTFGQIYAYSENFVLPFSHDEVVHGKRSLLDKMPGDTWQKFANLRLLATYQMTASGKKLNFMGNELAQGREWNVNSSLDWHLLDLHWHQGIQRLHRDLSHLYRQVPALHELDFDAHGFEWIDCSDSDQSIINYLRRARDGSFVLVLLNFTPVLRSGYRVGTPLAGHYREIFNSDAGYYGGSNQGNGNGLQTEAYPWMGHSHSLVVTIPPLGGVIIQPG

SEQ ID NO: 148780 - DNA, 2733 bp, Oryza sativa
  CDS (18)..(2480)
caccgacatccgccgcaatgctgtgtctcacctcctcttcctcctccgcgcccgctccgctccttccctctctcgctgatcgaccgagcccgggaatcgcgggcgggggtggcaatgttcgcctgagcgtggtttcttcgccgcgccggtcgtggcctggaaaggtcaagaccaatttctcagttcctgcgactgcgcgaaaaaacaaaaccatggtgactgttgtggaggaggtcgaccaccttcctatatatgatctggaccctaagttggaggaattcaaggatcacttcaactataggataaaaagatacctcgaccagaaatgcctgattgaaaaacatgaggggggccttgaagaattttctaaaggctatttgaagtttgggattaatacagttgatggtgccacaatatatcgtgaatgggcgcctgctgcacaagaagcacagctcattggtgagttcaataactggaatggtgcaaaacacaagatggagaaggataaatttggcatttggtcaatcaagatttcacatgtcaatgggaagcctgccatccctcacaattccaaggttaaatttcgctttaggcatgggggtggagcatgggttgatcgtattcccgcatggattcgttatgcaacttttgatgcctctaaatttggagctccatatgatggtgtacactgggatcctccagcctgtgaaaggtacgtgtttaagcatcctcgacctccaaaacctgatgctccacgcatctatgaggctcatgtggggatgagtggtgaagagccagaagtaagcacatacagagaatttgcagacaatgtgttaccacgcatacgggcaaataactacaacacagttcagttaatggcaatcatggaacattcctactatgcttcttttgggtatcacgtgacaaattttttcgcagtcagcagcagatcaggaacaccagaggatctgaaatatcttgttgacaaggcacatagtttaggattacgagttctgatggatgttgtccatagccatgcgagtaataatgtgaccgatggtctaaatggctatgacgttggacaaaacactcatgagtcttattttcatacaggagataggggctaccataaactctgggatagtcgtctgttcaactatgccaattgggaggtcttaagatttcttctttctaatttgagatattggatggacgaattcatgtttgatggcttccgatttgatggggttacatcaatgctataccatcaccatggtatcaataagggatttactggaaactacaaggagtatttcagtttggataccgatgtggatgcaattgtttacatgatgctcgcaaaccatttaatgcataaactcttgccggaagcaactattgttgctgaagatgtttcgggcatgccagtgctttgtcggccagttgatgaaggtggagtagggtttgacttccgcctggcaatggccattcctgatagatggattgactacctgaagaacaaagaggaccgcaaatggtcaatgagtgaaatagtgcaaactttgactaacaggagatatacagaaaaatgcattgcctatgccgagagccatgatcagtccattgttggtgacaagactatagcatttctcttgatggacaaggaaatgtacactggcatgtcagacttgcagcctgcttcacctaccatcaaccgtggcattgcactccaaaagatgattcacttcattacgatggcccttggaggtgatggctacttaaattttatgggcaatgagtttggccatccagaatggattgactttccaagagaaggcaacaactggagctatgataaatgcagacgtcagtggagccttgtcgacactgatcaccttcgatacaagtatatgaatgcatttgatcaagcaatgaatgcactcgaggaggaattttccttcctgtcatcatcaaagcagattgttagcgacatgaacgagaaagataaggttattgtctttgaacgtggagatttggtttttgttttcaattttcatcccaacaaaacttacaagggttacaaagtcggatgtgacttgcccgggaagtacagagtagctctggactctgatgctttggtctttggtggccatggaagagttggccatgatgtggatcacttcacgtctcccgagggaatgccaggagtaccagaaacaaatttcaacaaccgccctaactcattcaaagtcctttccccgccccgtacctgtgtggcttactatcgcgttgatgaagatcgtgaagagctcaggaggggtggagcagttgcttctggaaagattgttacagagtatatcgatgttgaagcaacaagtggggagactatctctggtggctggaagggctccgagaaggacgattgtggcaagaaagggatgaagtttgtgtttcggtcttctgacgaagactgcaaatgaagcatcagatttcttgatcaggagcaactgttggtgcccttgtaatctggagatcctggcttgccttggacttggttgtggttctttagcagttgctatgtacctatctatgatatgaactttatgtatagttcgccttaaagaaagaataagcagtgatgatgtggccttaaacctgagctgcacaagcctaatgtaaaaataaagtttcaggctttcatccagaataaaacagctgttcatttaccatctc

SEQ ID NO: 148781 - protein, 820 aa, Oryza sativa
MLCLTSSSSSAPAPLLPSLADRPSPGIAGGGGNVRLSVVSSPRRSWPGKVKTNFSVPATARKNKTMVTVVEEVDHLPIYDLDPKLEEFKDHFNYRIKRYLDQKCLIEKHEGGLEEFSKGYLKFGINTVDGATIYREWAPAAQEAQLIGEFNNWNGAKHKMEKDKFGIWSIKISHVNGKPAIPHNSKVKFRFRHGGGAWVDRIPAWIRYATFDASKFGAPYDGVHWDPPACERYVFKHPRPPKPDAPRIYEAHVGMSGEEPEVSTYREFADNVLPRIRANNYNTVQLMAIMEHSYYASFGYHVTNFFAVSSRSGTPEDLKYLVDKAHSLGLRVLMDVVHSHASNNVTDGLNGYDVGQNTHESYFHTGDRGYHKLWDSRLFNYANWEVLRFLLSNLRYWMDEFMFDGFRFDGVTSMLYHHHGINKGFTGNYKEYFSLDTDVDAIVYMMLANHLMHKLLPEATIVAEDVSGMPVLCRPVDEGGVGFDFRLAMAIPDRWIDYLKNKEDRKWSMSEIVQTLTNRRYTEKCIAYAESHDQSIVGDKTIAFLLMDKEMYTGMSDLQPASPTINRGIALQKMIHFITMALGGDGYLNFMGNEFGHPEWIDFPREGNNWSYDKCRRQWSLVDTDHLRYKYMNAFDQAMNALEEEFSFLSSSKQIVSDMNEKDKVIVFERGDLVFVFNFHPNKTYKGYKVGCDLPGKYRVALDSDALVFGGHGRVGHDVDHFTSPEGMPGVPETNFNNRPNSFKVLSPPRTCVAYYRVDEDREELRRGGAVASGKIVTEYIDVEATSGETISGGWKGSEKDDCGKKGMKFVFRSSDEDCK

SEQ ID NO: 148782 - DNA, 2268 bp, Prochlorococcus marinus
  CDS (1)..(2268): transl_table=11
atgaccgtctctattctattagattctttgaaagacgacggacaaagactttctgaatgcagacatgaaagtccattttcaattcttggccctcaaccatttaaagataaatggatcattcgaatatggatgcctgaggcaagtcaagttgaactggtaacacaacaaactaaaattaagctacaaaatcccaatcatgaatggatatttgagggggttttagaaaaagatccaggtactgactatcaaataaaagtaaatagaggaggaattgaacatgttcaacatgatccttggagtttccgaaaagagtggatgggtgaaattgatagacatcttttcgcggagggaaatcaccatcacatatggcgaaaaatgggtgctcatctcacagaaatagataaaaagaaaggagttatgttttgcttatgggcgcctcatgcaaagagtgtttccgttattggtgatctcaattcatgggatggacgccatcacccaatgcaaaaacgtctaggaggaatttgggaactattcatacctggtctaagtgagggagatttatacaaatatgaaatcaggactgaaaaaggacattgctacgagaaagccgacccttatggttttcaacatgaagtaagaccagcaaaaagctcagttatatcaaaaatcgactcatttcaatggagtgatcagtcttggatatccaatcgtgacaatagagatcctttagagcaaccaatttcggtttatgaaatgcatttaggaagctggatgcatgcttcctcggacgatccatttatcaactcaaacggagagcatagagctccagttccagctgcagatatgaagcctggctcaagattgcttacatataaagaactggcaaataaggtcattccctatgtcaaagaaagaggcttcactcatatcgagcttatgccaatttcagagcacccttttgatgggtcatgggggtatcaagttacaggttggtatgcgcctacaagtagatttggatcaccagatgagtttcgtgccttcgttgattcatgtcataaagaaggaataggaatcattctcgattgggtcccgggccacttccctaaagatcagcatggactagcttattttgatggcagccatctatacgagcattcagatccaagagttggagagcataaagaatggggaacattaattttcaattacagtcgaaatgaagttcgtaattttctagttgcaaatctaattttctggtttgatcaatttcatatagatggcatacgtgttgatgcagttgcctcaatgctttacaaagactatcttcgtccagagggtgaatggatacctaatgaagatggagggaatgaaaattttgaagcagtcagatttctacaacaggctaatcacgttctttttcaacattttccaggtgcactttctattgcagaagaatcaacgacatggactggtgtaaccaaaccaactgacatggatggactcggtttcaatctaaaatggaacatgggttggatgcacgatatgctcgattattttgaaattgacccatggtttagacaattcaatcaaaacaacattactttctccatttgttataactttaccgaaaactttatgcttgctttaagccacgatgaagttgttcacgggaaaagtcatctcttacacaaaatgcctggcgatgactggcagaagtacgctaatacacgagccttacttgcatatatgtggacacatccaggtaaaaaaacaatatttatgggaatggaatttgggcagcgccaagaatggaatgtttgggatgatttgcaatgggatcttctaaattatgaacctcacaaaggaatacagaaattagtagatgatttgaataatttatataaaagagaacctgctttatggagaaatgattttgacgaatacggattccagtggattgattgcgatgataataaaaattcagtaatcagtttcatgagaagagaaaaaactgatggagaatggctagtaatagtggcaaacttcacacctcaaaaccactccaattacagaataggtgtgcctgttgacggattctatgaagaaattttcaatacagatgcgagtcaatatggaggttcaaacctaggtaatatgggagggaaatcaacagatctatacaacatacatggctatgaaaattctatagatctttgccttcctcctcttagcgttctggttctaaagcataaatccaagaagaattaa

SEQ ID NO: 148783 - protein, 755 aa, Prochlorococcus marinus
MTVSILLDSLKDDGQRLSECRHESPFSILGPQPFKDKWIIRIWMPEASQVELVTQQTKIKLQNPNHEWIFEGVLEKDPGTDYQIKVNRGGIEHVQHDPWSFRKEWMGEIDRHLFAEGNHHHIWRKMGAHLTEIDKKKGVMFCLWAPHAKSVSVIGDLNSWDGRHHPMQKRLGGIWELFIPGLSEGDLYKYEIRTEKGHCYEKADPYGFQHEVRPAKSSVISKIDSFQWSDQSWISNRDNRDPLEQPISVYEMHLGSWMHASSDDPFINSNGEHRAPVPAADMKPGSRLLTYKELANKVIPYVKERGFTHIELMPISEHPFDGSWGYQVTGWYAPTSRFGSPDEFRAFVDSCHKEGIGIILDWVPGHFPKDQHGLAYFDGSHLYEHSDPRVGEHKEWGTLIFNYSRNEVRNFLVANLIFWFDQFHIDGIRVDAVASMLYKDYLRPEGEWIPNEDGGNENFEAVRFLQQANHVLFQHFPGALSIAEESTTWTGVTKPTDMDGLGFNLKWNMGWMHDMLDYFEIDPWFRQFNQNNITFSICYNFTENFMLALSHDEVVHGKSHLLHKMPGDDWQKYANTRALLAYMWTHPGKKTIFMGMEFGQRQEWNVWDDLQWDLLNYEPHKGIQKLVDDLNNLYKREPALWRNDFDEYGFQWIDCDDNKNSVISFMRREKTDGEWLVIVANFTPQNHSNYRIGVPVDGFYEEIFNTDASQYGGSNLGNMGGKSTDLYNIHGYENSIDLCLPPLSVLVLKHKSKKN

SEQ ID NO: 148784 - DNA, 3114 bp, Solanum tuberosum
  CDS (121)..(2706)
cccgtctgtaagcatcattagtgatgttgttccagctgaatgggatgattcagatgcaaacgtctggggtgagaacatacaagaaggcagcagctgaagcaaagtaccataatttaatcaatggaaattaatttcaaagttttatcaaaacccattcgaggatcttttccatctttctcacctaaagtttcttcaggggcttctagaaataagatatgttttccttctcaacatagtactggactgaagtttggatctcaggaacggtcttgggatatttcttccaccccaaaatcaagagttagaaaagatgaaaggatgaagcacagttcagctatttccgctgttttgaccgatgacaattcgacaatggcacccctagaggaagatgtcaagactgaaaatattggcctcctaaatttggatccaactttggaaccttatctagatcacttcagacacagaatgaagagatatgtggatcagaaaatgctcattgaaaaatatgagggaccccttgaggaatttgctcaaggttatttaaaatttggattcaacagggaagatggttgcatagtctatcgtgaatgggctcctgctgctcaggaagacgaagttattggcgatttcaatggatggaacggttctaaccacatgatggagaaggaccagtttggtgtttggagtattagaattcctgatgttgacagtaagccagtcattccacacaactccagagttaagtttcgtttcaaacatggtaatggagtgtgggtagatcgtatccctgcttggataaagtatgccactgcagacgccacaaagtttgcagcaccatatgatggtgtctactgggacccaccaccttcagaaaggtaccacttcaaataccctcgccctcccaaaccccgagccccacgaatctatgaagcacatgtcggcatgagcagctctgagccacgtgtaaattcgtatcgtgagtttgcagatgatgttttacctcggattaaggcaaataactataatactgtccagttgatggccataatggaacattcttactatggatcatttggatatcatgttacaaacttttttgctgtgagcagtagatatggaaacccggaggacctaaagtatctgatagataaagcacatagcttgggtttacaggttctggtggatgtagttcacagtcatgcaagcaataatgtcactgatggcctcaatggctttgatattggccaaggttctcaagaatcctactttcatgctggagagcgagggtaccataagttgtgggatagcaggctgttcaactatgccaattgggaggttcttcgtttccttctttccaacttgaggtggtggctagaagagtataactttgacggatttcgatttgatggaataacttctatgctgtatgttcatcatggaatcaatatgggatttacaggaaactataatgagtatttcagcgaggctacagatgttgatgctgtggtctatttaatgttggccaataatctgattcacaagattttcccagatgcaactgttattgccgaagatgtttctggtatgccgggccttggccggcctgtttctgagggaggaattggttttgattaccgcctggcaatggcaatcccagataagtggatagattatttaaagaataagaatgatgaagattggtccatgaaggaagtaacatcgagtttgacaaataggagatatacagagaagtgtatagcatatgcggagagccatgatcagtctattgtcggtgacaagaccattgcatttctcctaatggacaaagagatgtattctggcatgtcttgcttgacagatgcttctcctgttgttgatcgaggaattgcgcttcacaagatgatccattttttcacaatggccttgggaggagaggggtacctcaatttcatgggtaacgagtttggccatcctgagtggattgacttccctagagagggcaataattggagttatgacaaatgtagacgccagtggaacctcgcggatagcgaacacttgagatacaagtttatgaatgcatttgatagagctatgaattcgctcgatgaaaagttctcattcctcgcatcaggaaaacagatagtaagcagcatggatgatgataataaggttgttgtgtttgaacgtggtgacctggtatttgtattcaacttccacccaaagaacacatacgaagggtataaagttggatgtgacttgccagggaagtacagagttgcactggacagtgatgcttgggaatttggtggccatggaagaactggtcatgatgttgaccatttcacatcaccagaaggaatacctggagttccagaaacaaatttcaatggtcgtcaaattccttcaaagtgctgtctcctgcgcgaacatgtgtggcttattacagagttgatgaacgcatgtcagaaactgaagattaccagacagacatttgtagtgagctactaccaacagccaatatcgaggagagtgacgagaaacttaaagattcgttatctacaaatatcagtaacattgacgaacgcatgtcagaaactgaagtttaccagacagacatttctagtgagctactaccaacagccaatattgaggagagtgacgagaaaacttaaagattcgttatctacaaatatcagtacatgatcagactgttgtagtttctgttgaggagagagacaaggaacttaaagattcaccgtctgtaagcatcattagtgatgttgttccagctgaatggatgatcagatgcaaacgtctgggtgaggactagtcagatgattgatcgacccttctacgttggtgatcttggtccgtccatgatgtcttcagggtggtagcattgactgatggcatcatagttttttttttaaaagtatttcctctatgcatattattagtatccaataaatttactggttgttgtacatagaaaaagtgcatttgcatgtatgtgttctctgaaattttccccagtttttggtgctttgcctttggagccaagtctctatatgtataagaaaactaagaacaatcacatatatcaaatattag

SEQ ID NO: 148785 - protein, 861 aa, Solanum tuberosum
MEINFKVLSKPIRGSFPSFSPKVSSGASRNKICFPSQHSTGLKFGSQERSWDISSTPKSRVRKDERMKHSSAISAVLTDDNSTMAPLEEDVKTENIGLLNLDPTLEPYLDHFRHRMKRYVDQKMLIEKYEGPLEEFAQGYLKFGFNREDGCIVYREWAPAAQEDEVIGDFNGWNGSNHMMEKDQFGVWSIRIPDVDSKPVIPHNSRVKFRFKHGNGVWVDRIPAWIKYATADATKFAAPYDGVYWDPPPSERYHFKYPRPPKPRAPRIYEAHVGMSSSEPRVNSYREFADDVLPRIKANNYNTVQLMAIMEHSYYGSFGYHVTNFFAVSSRYGNPEDLKYLIDKAHSLGLQVLVDVVHSHASNNVTDGLNGFDIGQGSQESYFHAGERGYHKLWDSRLFNYANWEVLRFLLSNLRWWLEEYNFDGFRFDGITSMLYVHHGINMGFTGNYNEYFSEATDVDAVVYLMLANNLIHKIFPDATVIAEDVSGMPGLGRPVSEGGIGFDYRLAMAIPDKWIDYLKNKNDEDWSMKEVTSSLTNRRYTEKCIAYAESHDQSIVGDKTIAFLLMDKEMYSGMSCLTDASPVVDRGIALHKMIHFFTMALGGEGYLNFMGNEFGHPEWIDFPREGNNWSYDKCRRQWNLADSEHLRYKFMNAFDRAMNSLDEKFSFLASGKQIVSSMDDDNKVVVFERGDLVFVFNFHPKNTYEGYKVGCDLPGKYRVALDSDAWEFGGHGRTGHDVDHFTSPEGIPGVPETNFNGRQIPSKCCLLREHVWLITELMNACQKLKITRQTFVVSYYQQPISRRVTRNLKIRYLQISVTLTNACQKLKFTRQTFLVSYYQQPILRRVTRKLKDSLSTNIST

SEQ ID NO: 148786 - DNA, 2076 bp, Yarrowia lipolytica
  CDS (1)..(2076)
atgacactacaagtttgcaaagacgatccttggctcaaaccattcgaggaggaactccttcgacgacaagccctagtgggccagtggaaggaccattttgccaaggagggaggtcttgctgagtttgcagcctcctataaacgatacggactccatgtcaacaaggacaactcggtcacctacagagagtgggctccaggagcctccgaagcagttctaaccggcgacttcaacggctgggacagacaacagtaccacatgaccagagacgagtatggactgtggagcgtgactgtgcctcctacctcagatggtcaggtggcaatcccccataactccaaggtcaagcttgctctgaagacctccaacggtcaatgggtcgatcgactgcctgcctggtccacctacgtcgtccaggacctgtccaaatcgcccatctatgaggctgtgttctggaaccctcccgagtcggaaaagtaccagtggaagaacaaatctccccccactcctgccaacgcccaaatctacgaagcccacgtgggtatctcctccagcgaacctcgagtcggcacttacaaggagtttacaaagaacattctccctcgaatccacaaactgggctacaacgtgatccagctcatggccatcatggaacacgcctactacgcctcctttggctaccaggtcacctccttctacgctatttcgtcccgatatggtactccagaggacctcaaggagctcattgacaccgctcacggtatgggtattactgttcttctggatgttgtgcactctcatgcttgcaaaaacgtcgatgacggtctcaacaactttgatggaactgaccaccagtacttccatggtggagcaaagggagaccatcctcagtgggactcaaagctgtttgattacggaaagtacgaggttcttcggttcttgctgtccaacctgcggttctatattgaggagtaccactttgacggcttccggtttgacggagtcacctctatgctctacaagcatcatggtctcggtaccggcttctccggtggctaccatgagtactttggagacgaacatgttgatcagcaggccgttgtttatctcatgttggctcacgagctcatgagggagctgcaacctcttcttcgacccggagaagatgcaggcaacttcctctccatcgccgaagatgtgtctggaatgcctgctctctgtagacctgtttctgagggaggtgttggctttgactaccgtctggccatggctattcccgacatgtggatcaagctcgtcaaggagacccgagacgaggactgggacatgggcaacattgtttttactttgaccaaccgtcgtcatcgagaaaagaccattgcttatgctgagtctcatgatcaggctctggttggagacaaaactctggccttctggctcatggataaggaaatgtacacctccatgtctgttctttccgaccccaaccccatcattgaccgaggaatcgctctccacaagatgattcgactcatcacccattctcttggaggagaaggatacctcaactttgagggtaacgagtttggacaccctgagtggctggacttccctcgagagggcaatggctcctctttccactactgtcgacgacagtggcctgtggtggatgacaagctgttgagataccagcatcttaatgaattcgatgccgccatgcagcaccgaggagaccactacggctggctgtcggccgaccaggcttacgtgtcgttgaagaacgaggacgacaaggtggttgtgtatgagcgagctggtctggtgtttgtcttcaacttccaccccaacaagtcgttcactgactacagaatcggtgtggaccagcctggaacatacacccttgtgttggattctgattctcccgagtttggaggttttggccgaatcgaccacgaaaagacccgatgccataccgagcctctggagtggaacggacgggctaactgtatgcatatctacattccttctcgagtggctctggtgtttgcccgggaggatgaccctagacgaaagtaa

SEQ ID NO: 148787 - protein, 691 aa, Yarrowia lipolytica
MTLQVCKDDPWLKPFEEELLRRQALVGQWKDHFAKEGGLAEFAASYKRYGLHVNKDNSVTYREWAPGASEAVLTGDFNGWDRQQYHMTRDEYGLWSVTVPPTSDGQVAIPHNSKVKLALKTSNGQWVDRLPAWSTYVVQDLSKSPIYEAVFWNPPESEKYQWKNKSPPTPANAQIYEAHVGISSSEPRVGTYKEFTKNILPRIHKLGYNVIQLMAIMEHAYYASFGYQVTSFYAISSRYGTPEDLKELIDTAHGMGITVLLDVVHSHACKNVDDGLNNFDGTDHQYFHGGAKGDHPQWDSKLFDYGKYEVLRFLLSNLRFYIEEYHFDGFRFDGVTSMLYKHHGLGTGFSGGYHEYFGDEHVDQQAVVYLMLAHELMRELQPLLRPGEDAGNFLSIAEDVSGMPALCRPVSEGGVGFDYRLAMAIPDMWIKLVKETRDEDWDMGNIVFTLTNRRHREKTIAYAESHDQALVGDKTLAFWLMDKEMYTSMSVLSDPNPIIDRGIALHKMIRLITHSLGGEGYLNFEGNEFGHPEWLDFPREGNGSSFHYCRRQWPVVDDKLLRYQHLNEFDAAMQHRGDHYGWLSADQAYVSLKNEDDKVVVYERAGLVFVFNFHPNKSFTDYRIGVDQPGTYTLVLDSDSPEFGGFGRIDHEKTRCHTEPLEWNGRANCMHIYIPSRVALVFAREDDPRRK

SEQ ID NO: 148788 - DNA, 2268 bp, Oryza sativa
  CDS (1)..(2268)
atggtgactgttgtggaggaggtcgaccaccttcctatatatgatctggaccctaagttggaggaattcaaggatcacttcaactataggataaaaagatacctcgaccagaaatgcctgattgaaaaacatgaggggggccttgaagaattttctaaaggctatttgaagtttgggattaatacagttgatggtgccacaatatatcgtgaatgggcgcctgctgcacaagaagcacagctcattggtgagttcaataactggaatggtgcaaaacacaagatggagaaggataaatttggcatttggtcaatcaagatttcacatgtcaatgggaagcctgccatccctcacaattccaaggttaaatttcgctttaggcatgggggtggagcatgggttgatcgtattcccgcatggattcgttatgcaacttttgatgcctctaaatttggagctccatatgatggtgtacactgggatcctccagcctgtgaaaggtacgtgtttaagcatcctcgacctccaaaacctgatgctccacgcatctatgaggctcatgtggggatgagtggtgaagagccagaagtaagcacatacagagaatttgcagacaatgtgttaccacgcatacgggcaaataactacaacacagttcagttaatggcaatcatggaacattcctactatgcttcttttgggtatcacgtgacaaattttttcgcagtcagcagcagatcaggaacaccagaggatctgaaatatcttgttgacaaggcacatagtttaggattacgagttctgatggatgttgtccatagccatgcgagtaataatgtgaccgatggtctaaatggctatgacgttggacaaaacactcatgagtcttattttcatacaggagataggggctaccataaactctgggatagtcgtctgttcaactatgccaattgggaggtcttaagatttcttctttctaatttgagatattggatggacgaattcatgtttgatggcttccgatttgatggggttacatcaatgctataccatcaccatggtatcaataagggatttactggaaactacaaggagtatttcagtttggataccgatgtggatgcaattgtttacatgatgctcgcaaaccatttaatgcataaactcttgccggaagcaactattgttgctgaagatgtttcgggcatgccagtgctttgtcggccagttgatgaaggtggagtagggtttgacttccgcctggcaatggccattcctgatagatggattgactacctgaagaacaaagaggaccgcaaatggtcaatgagtgaaatagtgcaaactttgactaacaggagatatacagaaaaatgcattgcctatgccgagagccatgatcagtccattgttggtgacaagactatagcatttctcttgatggacaaggaaatgtacactggcatgtcagacttgcagcctgcttcacctaccatcaaccgtggcattgcactccaaaagatgattcacttcattacgatggcccttggaggtgatggctacttaaattttatgggcaatgagtttggccatccagaatggattgactttccaagagaaggcaacaactggagctatgataaatgcagacgtcagtggagccttgtcgacactgatcaccttcgatacaagtatatgaatgcatttgatcaagcaatgaatgcactcgaggaggaattttccttcctgtcatcatcaaagcagattgttagcgacatgaacgagaaagataaggttattgtctttgaacgtggagatttggtttttgttttcaattttcatcccaacaaaacttacaagggttacaaagtcggatgtgacttgcccgggaagtacagagtagctctggactctgatgctttggtctttggtggccatggaagagttggccatgatgtggatcacttcacgtctcccgagggaatgccaggagtaccagaaacaaatttcaacaaccgccctaactcattcaaagtcctttccccgccccgtacctgtgtggcttactatcgcgttgatgaagatcgtgaagagctcaggaggggtggagcagttgcttctggaaagattgttacagagtatatcgatgttgaagcaacaagtggggagactatctctggtggctggaagggctccgagaaggacgattgtggcaagaaagggatgaagtttgtgtttcggtcttctgacgaagactgcaaatga

SEQ ID NO: 148789 - protein, 755 aa, Oryza sativa
MVTVVEEVDHLPIYDLDPKLEEFKDHFNYRIKRYLDQKCLIEKHEGGLEEFSKGYLKFGINTVDGATIYREWAPAAQEAQLIGEFNNWNGAKHKMEKDKFGIWSIKISHVNGKPAIPHNSKVKFRFRHGGGAWVDRIPAWIRYATFDASKFGAPYDGVHWDPPACERYVFKHPRPPKPDAPRIYEAHVGMSGEEPEVSTYREFADNVLPRIRANNYNTVQLMAIMEHSYYASFGYHVTNFFAVSSRSGTPEDLKYLVDKAHSLGLRVLMDVVHSHASNNVTDGLNGYDVGQNTHESYFHTGDRGYHKLWDSRLFNYANWEVLRFLLSNLRYWMDEFMFDGFRFDGVTSMLYHHHGINKGFTGNYKEYFSLDTDVDAIVYMMLANHLMHKLLPEATIVAEDVSGMPVLCRPVDEGGVGFDFRLAMAIPDRWIDYLKNKEDRKWSMSEIVQTLTNRRYTEKCIAYAESHDQSIVGDKTIAFLLMDKEMYTGMSDLQPASPTINRGIALQKMIHFITMALGGDGYLNFMGNEFGHPEWIDFPREGNNWSYDKCRRQWSLVDTDHLRYKYMNAFDQAMNALEEEFSFLSSSKQIVSDMNEKDKVIVFERGDLVFVFNFHPNKTYKGYKVGCDLPGKYRVALDSDALVFGGHGRVGHDVDHFTSPEGMPGVPETNFNNRPNSFKVLSPPRTCVAYYRVDEDREELRRGGAVASGKIVTEYIDVEATSGETISGGWKGSEKDDCGKKGMKFVFRSSDEDCK

SEQ ID NO: 148790 - DNA, 2535 bp, Zea mays
  CDS (1)..(2535)
atggcgtcgttcgctgtgtccggcgcgaggctcggggtcgtgcggcctggcggctcggcgcgatctggcggggagcggaggagtgcggtggacttgccgtcggtgctcttcaggaggaaggacgccttctctcgcaccgttctgagctgcgctggtgctcctggaaaggtgctggtgcctggaggtggcagtgatgacttgctttcctccgcagagccggtcgtggacactcaacctgaagaactacagatacctgaagcagaactgactgtggagaagacatcctcctcaccaactcaaacaacatcagcagtggctgaagcaagctcaggagttgaggctgaggagaggcctgagctctcagaagtgattggagttggaggtactggtggaaccaaaattgatggtgcaggcatcaaagccaaagcaccactcgtggaggagaaaccacgagttatcccaccaccaggagatggccaacgaatatatgagattgacccaatgttggaagggtttcggggtcaccttgactaccgatacagtgaatataagagattacgtgcggctattgatcaacatgaaggtggtttggatgcattttcacgcggttacgaaaagcttggatttactcgcagcgctgaaggtatcacttacagagaatgggctcctggagcatactctgcagcattagtaggtgacttcaacaactggaacccaaatgctgatgctatggccagaaatgagtacggcgtttgggagattttcctgcctaacaatgctgatggttcccctgctattcctcatggctcacgtgtaaagatacggatggacacaccatctggtgttaaggattccattcctgcctggatcaagttttctgtgcaggctccaggtgaaataccatacaacggtatatattatgacccacctgaagaggagaaatatgtattcaaacaccctcaacctaagcggcccaagtcactgcggatatatgaatcacatgttggaatgagtagcccggaaccaaagataaatacatatgctaacttcagagatgaggtgcttccaagaattaaaaagcttggatacaatgcagtacagataatggcaatccaggaacactcttattatgcaagctttgggtaccatgttacgaatttttttgccccaagtagccgttttgggactccagaggacctaaaatctcttattgataaagcgcatgagcttggcttgctagtgcttatggatattgttcatagtcattcatcaaataataccttggatggtttgaatggtttcgatggcaccgatacacattacttccatggtggtccacgaggccatcattggatgtgggattctcgcctattcaattatgggagttgggaagttttgagatttctattgtcaaatgcgagatggtggcttgaagaatataaatttgatgggtttcgatttgatggggtgacctccatgatgtatactcaccatggattacaagtgacattcactgggaactatggcgagtattttggatttgccactgatgttgatgcagtagtttacctaatgctggtaaacgatcttattcgtgggctttatccagaagctgtatccattggcgaagatgtcagcggaatgcctacattttgtatccctgtccaagatggtggtgttggttttgattatcgtcttcatatggctgtcccagacaaatggattgaacttctgaagcaaagtgacgaatattgggaaatgggtgacatcgtgcacaccttaacaaatagaaggtggcttgaaaagtgtgtcacttattgtgaaagtcatgatcaagctcttgttggtgacaagacaattgcattctggttgatggataaggatatgtatgatttcatggctctggacaggccttcaacgcctcgcatcgatcgtgggatagcattacataaaatgattaggcttgtcacaatgggtttaggaggtgaaggctatctaaatttcatgggaaatgagtttgggcatcctgaatggatagattttccaagaggtcctcaaagtcttccaaatggctccgtcattcctgggaataacaatagctttgataaatgccgccgtagatttgaccttggagatgcagattatcttagatatcgtggtatgcaagagtttgaccaggcaatgcagcaccttgagggaaaatatgaattcatgacatctgatcactcatatgtatcacggaagcatgaggaggataaggtgatcatctttgagagaggagatttggtcttcgtgttcaacttccactggagcaatagctattttgactatcgcgttggttgtttcaagcctgggaagtacaagatcgttttagattctgacgatggccttttcggtggatttagtcggcttgatcatgatgccgagtacttcactgctgactggccgcatgacaacaggccgtgttctttctcggtctatgcacccagcagaacagccgtcgtatatgcacctgcaggtgcagaggacgaatag

SEQ ID NO: 148791 - protein, 844 aa, Zea mays
MASFAVSGARLGVVRPGGSARSGGERRSAVDLPSVLFRRKDAFSRTVLSCAGAPGKVLVPGGGSDDLLSSAEPVVDTQPEELQIPEAELTVEKTSSSPTQTTSAVAEASSGVEAEERPELSEVIGVGGTGGTKIDGAGIKAKAPLVEEKPRVIPPPGDGQRIYEIDPMLEGFRGHLDYRYSEYKRLRAAIDQHEGGLDAFSRGYEKLGFTRSAEGITYREWAPGAYSAALVGDFNNWNPNADAMARNEYGVWEIFLPNNADGSPAIPHGSRVKIRMDTPSGVKDSIPAWIKFSVQAPGEIPYNGIYYDPPEEEKYVFKHPQPKRPKSLRIYESHVGMSSPEPKINTYANFRDEVLPRIKKLGYNAVQIMAIQEHSYYASFGYHVTNFFAPSSRFGTPEDLKSLIDKAHELGLLVLMDIVHSHSSNNTLDGLNGFDGTDTHYFHGGPRGHHWMWDSRLFNYGSWEVLRFLLSNARWWLEEYKFDGFRFDGVTSMMYTHHGLQVTFTGNYGEYFGFATDVDAVVYLMLVNDLIRGLYPEAVSIGEDVSGMPTFCIPVQDGGVGFDYRLHMAVPDKWIELLKQSDEYWEMGDIVHTLTNRRWLEKCVTYCESHDQALVGDKTIAFWLMDKDMYDFMALDRPSTPRIDRGIALHKMIRLVTMGLGGEGYLNFMGNEFGHPEWIDFPRGPQSLPNGSVIPGNNNSFDKCRRRFDLGDADYLRYRGMQEFDQAMQHLEGKYEFMTSDHSYVSRKHEEDKVIIFERGDLVFVFNFHWSNSYFDYRVGCFKPGKYKIVLDSDDGLFGGFSRLDHDAEYFTADWPHDNRPCSFSVYAPSRTAVVYAPAGAEDE

SEQ ID NO: 148792 - DNA, 2400 bp, Zea mays
  CDS (1)..(2400)
atggcgttcgcggtttctggggcggtgctcggtggggccgtaagggctccccgactcaccggcggcggggagggtagtctagtcttccggcacaccggcctcttcttaactcggggtgctcgagttggatgttcggggacgcacggggccatgcgcgcggcggccgcggccaggaaggcggtcatggttcctgagggcgagaatgatggcctcgcatcaagggctgactcggctcaattccagtcggatgaactggaggtaccagacatttctgaagagacaacgtgcggtgctggtgtggctgatgctcaagccttgaacagagttcgagtggtccccccaccaagcgatggacaaaaaatattccagattgaccccatgttgcaaggctataagtaccatcttgagtatcggtacagcctctatagaagaatccgttcagacattgatgaacatgaaggaggcttggaagccttctcccgtagttatgagaagtttggatttaatcgcagcgcggaaggtatcacatatcgagaatgggctcctggagcattttctgcagcattggtgggtgacttcaacaactgggatccaaatgcagatcgtatgagcaaaaatgagtttggtgtttgggaaatttttctgcctaacaatgcagatggtacatcacctattcctcatggatctcgtgtaaaggtgagaatggatactccatcagggataaaggattcaattccagcctggatcaagtactcagtgcaggccccaggagaaataccatatgatgggatttattatgatcctcctgaagaggtaaagtatgtgttcaggcatgcgcaacctaaacgaccaaaatcattgcggatatatgaaacacatgtcggaatgagtagcccggaaccgaagataaacacatatgtaaactttagggatgaagtcctcccaagaataaaaaaacttggatacaatgcagtgcaaataatggcaatccaagagcactcatattatggaagctttggataccatgtaactaatttttttgcgccaagtagtcgttttggtaccccagaagatttgaagtctttgattgatagagcacatgagcttggtttgctagttctcatggatgtggttcatagtcatgcgtcaagtaatactctggatgggttgaatggttttgatggtacagatacacattactttcacagtggtccacgtggccatcactggatgtgggattctcgcctatttaactatgggaactgggaagttttaagatttcttctctccaatgctagatggtggctcgaggaatataagtttgatggtttccgttttgatggtgtgacctccatgatgtacactcaccacggattacaagtaacatttacggggaacttcaatgagtattttggctttgccaccgatgtagatgcagtggtttacttgatgctggtaaatgatctaattcatggactttatcctgaggctgtaaccattggtgaagatgttagtggaatgcctacatttgcccttcctgttcacgatggtggggtaggttttgactatcggatgcatatggctgtggctgacaaatggattgaccttctcaagcaaagtgatgaaacttggaagatgggtgatattgtgcacacactgacaaataggaggtggttagagaagtgtgtaacttatgctgaaagtcatgatcaagcattagtcggcgacaagactattgcgttttggttgatggacaaggatatgtatgatttcatggccctcgatagaccttcaactcctaccattgatcgtgggatagcattacataagatgattagacttatcacaatgggtttaggaggagagggctatcttaatttcatgggaaatgagtttggacatcctgaatggatagattttccaagaggtccgcaaagacttccaagtggtaagtttattccagggaataacaacagttatgacaaatgtcgtcgaagatttgacctgggtgatgcagactatcttaggtatcatggtatgcaagagtttgatcaggcaatgcaacatcttgagcaaaaatatgaattcatgacatctgatcaccagtatatttcccggaaacatgaggaggataaggtgattgtgttcgaaaagggagatttggtatttgtgttcaacttccactgcaacaacagctattttgactaccgtattggttgtcgaaagcctggggtgtataaggtggtcttggactccgacgctggactatttggtggatttagcaggatccatcacgcagccgagcacttcaccgccgactgttcgcatgataataggccatattcgttctcggtttatacaccaagcagaacatgtgtcgtctatgctccagtggagtga

SEQ ID NO: 148793 - protein, 799 aa, Zea mays
MAFAVSGAVLGGAVRAPRLTGGGEGSLVFRHTGLFLTRGARVGCSGTHGAMRAAAAARKAVMVPEGENDGLASRADSAQFQSDELEVPDISEETTCGAGVADAQALNRVRVVPPPSDGQKIFQIDPMLQGYKYHLEYRYSLYRRIRSDIDEHEGGLEAFSRSYEKFGFNRSAEGITYREWAPGAFSAALVGDFNNWDPNADRMSKNEFGVWEIFLPNNADGTSPIPHGSRVKVRMDTPSGIKDSIPAWIKYSVQAPGEIPYDGIYYDPPEEVKYVFRHAQPKRPKSLRIYETHVGMSSPEPKINTYVNFRDEVLPRIKKLGYNAVQIMAIQEHSYYGSFGYHVTNFFAPSSRFGTPEDLKSLIDRAHELGLLVLMDVVHSHASSNTLDGLNGFDGTDTHYFHSGPRGHHWMWDSRLFNYGNWEVLRFLLSNARWWLEEYKFDGFRFDGVTSMMYTHHGLQVTFTGNFNEYFGFATDVDAVVYLMLVNDLIHGLYPEAVTIGEDVSGMPTFALPVHDGGVGFDYRMHMAVADKWIDLLKQSDETWKMGDIVHTLTNRRWLEKCVTYAESHDQALVGDKTIAFWLMDKDMYDFMALDRPSTPTIDRGIALHKMIRLITMGLGGEGYLNFMGNEFGHPEWIDFPRGPQRLPSGKFIPGNNNSYDKCRRRFDLGDADYLRYHGMQEFDQAMQHLEQKYEFMTSDHQYISRKHEEDKVIVFEKGDLVFVFNFHCNNSYFDYRIGCRKPGVYKVVLDSDAGLFGGFSRIHHAAEHFTADCSHDNRPYSFSVYTPSRTCVVYAPVE

SEQ ID NO: 148794 - DNA, 2400 bp, Zea mays
  CDS (1)..(2400)
atggcgttcccggtttctggggcggtgctcggtggggccgtaagggctccccgactcaccggcggcggggagggtagtctagtcttccggcacaccggcctcttcttaactcggggtgctcgagttggatgttcggggacgcacggggccatgcgcgcggcggccgcggccaggaaggcggtcatggttcctgagggcgagaatgatggcctcgcatcaagggctgactcggctcaattccagtcggatgaactggaggtaccagacatttctgaagagacaacgtgcggtgctggtgtggctgatgctcaagccttgaacagagttcgagtggtccccccaccaagcgatggacaaaaaatattccagattgaccccatgttgcaaggctataagtaccatcttgagtatcggtacagcctctatagaagaatccgttcagacattgatgaacatgaaggaggcttggaagccttctcccgtagttatgagaagtttggatttaatcccagcgcggaaggtatcacatatcgagaatgggctcctggagcattttctgcagcattggtgggtgacgtcaacaactgggatccaaatgcagatcgtatgagcaaaaatgagtttggtgtttgggaaatttttctgcctaacaatgcagatggtacatcacctattcctcatggatctcgtgtaaaggtgagaatggatactccatcagggataaaggattcaattccagcctggatcaagtactcagtgcaggccccaggagaaataccatatgatgggatttattatgatcctcctgaagaggtaaagtatgtgttcaggcatgcgcaacctaaacgaccaaaatcattgcggatatatgaaacacatgtcggaatgagtagcccggaaccgaagataaacacatatgtaaactttagggatgaagtcctcccaagaataaaaaaacttggatacaatgcagtgcaaataatggcaatccaagagcactcatattatggaagctttggataccatgtaactaatttttttgcgccaagtagtcgttttggtaccccagaagatttgaagtctttgattgatagagcacatgagcttggtttgctagttctcatggatgtggttcatagtcatgcgtcaagtaatactctggatgggttgaatggttttgatggtacagatacacattactttcacagtggtccacgtggccatcactggatgtgggattctcgcctatttaactatgggaactgggaagttttaagatttcttctctccaatgctagatggtggctcgaggaatataagtttgatggtttccgttttgatggtgtgacctccatgatgtacactcaccacggattacaagtaacatttacggggaacttcaatgagtattttggctttgccaccgatgtagatgcagtggtttacttgatgctggtaaatgatctaattcatggactttatcctgaggctgtaaccattggtgaagatgttagtggaatgcctacatttgcccttcctgttcacgatggtggggtaggttttgactatcggatgcatatggctgtggctgacaaatggattgaccttctcaagcaaagtgatgaaacttggaagatgggtgatattgtgcacacactgacaaataggaggtggttagagaagtgtgtaacttatgctgaaagtcatgatcaagcattagtcggcgacaagactattgcgttttggttgatggacaaggatatgtatgatttcatggccctcgatagaccttcaactcctaccattgatcgtgggatagcattacataagatgattagacttatcacaatgggtttaggaggagagggctatcttaatttcatgggaaatgagtttggacatcctgaatggatagattttccaagaggtccgcaaagacttccaagtggtaagtttattccagggaataacaacagttatgacaaatgtcgtcgaagatttgacctgggtgatgcagactatcttaggtatcatggtatgcaagagtttgatcaggcaatgcaacatcttgagcaaaaatatgaattcatgacatctgatcaccagtatatttcccggaaacatgaggaggataaggtgattgtgttcgaaaagggagatttggtatttgtgttcaacttccactgcaacaacagctattttgactaccgtattggttgtcgaaagcctggggtgtataaggtggtcttggactccgacgctggactatttggtggatttagcaggatccatcacgcagccgagcacttcaccgccgactgttcgcatgataataggccatattcattctcggtttatacaccaagcagaacatgtgtcgtctatgctccagtggagtga

SEQ ID NO: 148795 - protein, 799 aa, Zea mays
MAFPVSGAVLGGAVRAPRLTGGGEGSLVFRHTGLFLTRGARVGCSGTHGAMRAAAAARKAVMVPEGENDGLASRADSAQFQSDELEVPDISEETTCGAGVADAQALNRVRVVPPPSDGQKIFQIDPMLQGYKYHLEYRYSLYRRIRSDIDEHEGGLEAFSRSYEKFGFNPSAEGITYREWAPGAFSAALVGDVNNWDPNADRMSKNEFGVWEIFLPNNADGTSPIPHGSRVKVRMDTPSGIKDSIPAWIKYSVQAPGEIPYDGIYYDPPEEVKYVFRHAQPKRPKSLRIYETHVGMSSPEPKINTYVNFRDEVLPRIKKLGYNAVQIMAIQEHSYYGSFGYHVTNFFAPSSRFGTPEDLKSLIDRAHELGLLVLMDVVHSHASSNTLDGLNGFDGTDTHYFHSGPRGHHWMWDSRLFNYGNWEVLRFLLSNARWWLEEYKFDGFRFDGVTSMMYTHHGLQVTFTGNFNEYFGFATDVDAVVYLMLVNDLIHGLYPEAVTIGEDVSGMPTFALPVHDGGVGFDYRMHMAVADKWIDLLKQSDETWKMGDIVHTLTNRRWLEKCVTYAESHDQALVGDKTIAFWLMDKDMYDFMALDRPSTPTIDRGIALHKMIRLITMGLGGEGYLNFMGNEFGHPEWIDFPRGPQRLPSGKFIPGNNNSYDKCRRRFDLGDADYLRYHGMQEFDQAMQHLEQKYEFMTSDHQYISRKHEEDKVIVFEKGDLVFVFNFHCNNSYFDYRIGCRKPGVYKVVLDSDAGLFGGFSRIHHAAEHFTADCSHDNRPYSFSVYTPSRTCVVYAPVE

SEQ ID NO: 148796 - DNA, 26 bp, Artificial sequence
  primer
atgtacaacattccagataatgtcaa

SEQ ID NO: 148797 - DNA, 25 bp, Artificial sequence
  primer
tcattcttttaaggcaagcaccaaa

SEQ ID NO: 148798 - protein, 795 aa, Artificial sequence
  consensus sequence
  Variant (2)..(3): Xaa in position 2 to 3 is any amino acid
  Variant (5)..(12): Xaa in position 5 to 12 is any amino acid
  Variant (13)..(13): Xaa in position 13 is any or no amino acid
  Variant (15)..(20): Xaa in position 15 to 20 is any amino acid
  Variant (21)..(37): Xaa in position 21 to 37 is any or no amino acid
  Variant (39)..(40): Xaa in position 39 to 40 is any amino acid
  Variant (42)..(48): Xaa in position 42 to 48 is any amino acid
  Variant (49)..(49): Xaa in position 49 is any or no amino acid
  Variant (51)..(61): Xaa in position 51 to 61 is any amino acid
  Variant (62)..(69): Xaa in position 62 to 69 is any or no amino acid
  Variant (74)..(74): Xaa in position 74 is any amino acid
  Variant (76)..(81): Xaa in position 76 to 81 is any amino acid
  Variant (86)..(86): Xaa in position 86 is any amino acid
  Variant (88)..(99): Xaa in position 88 to 99 is any amino acid
  Variant (100)..(101): Xaa in position 100 to 101 is any or no amino acid
  Variant (103)..(103): Xaa in position 103 is any amino acid
  Variant (105)..(108): Xaa in position 105 to 108 is any amino acid
  Variant (110)..(114): Xaa in position 110 to 114 is any amino acid
  Variant (115)..(123): Xaa in position 115 to 123 is any or no amino acid
  Variant (125)..(125): Xaa in position 125 is any amino acid
  Variant (127)..(128): Xaa in position 127 to 128 is any amino acid
  Variant (129)..(130): Xaa in position 129 to 130 is any or no amino acid
  Variant (132)..(144): Xaa in position 132 to 144 is any amino acid
  Variant (145)..(150): Xaa in position 145 to 150 is any or no amino acid
  Variant (152)..(169): Xaa in position 152 to 169 is any amino acid
  Variant (170)..(176): Xaa in position 170 to 176 is any or no amino acid
  Variant (178)..(178): Xaa in position 178 is any amino acid
  Variant (179)..(182): Xaa in position 179 to 182 is any or no amino acid
  Variant (184)..(197): Xaa in position 184 to 197 is any amino acid
  Variant (198)..(200): Xaa in position 198 to 200 is any or no amino acid
  Variant (204)..(204): Xaa in position 204 is any amino acid
  Variant (206)..(206): Xaa in position 206 is any amino acid
  Variant (208)..(217): Xaa in position 208 to 217 is any amino acid
  Variant (218)..(242): Xaa in position 218 to 242 is any or no amino acid
  Variant (244)..(245): Xaa in position 244 to 245 is any amino acid
  Variant (247)..(250): Xaa in position 247 to 250 is any amino acid
  Variant (255)..(257): Xaa in position 255 to 257 is any amino acid
  Variant (261)..(262): Xaa in position 261 to 262 is any amino acid
  Variant (264)..(264): Xaa in position 264 is any amino acid
  Variant (268)..(268): Xaa in position 268 is any amino acid
  Variant (271)..(271): Xaa in position 271 is any amino acid
  Variant (274)..(274): Xaa in position 274 is any amino acid
  Variant (279)..(279): Xaa in position 279 is any amino acid
  Variant (282)..(282): Xaa in position 282 is any amino acid
  Variant (286)..(286): Xaa in position 286 is any amino acid
  Variant (290)..(290): Xaa in position 290 is any amino acid
  Variant (294)..(295): Xaa in position 294 to 295 is any amino acid
  Variant (298)..(298): Xaa in position 298 is any amino acid
  Variant (300)..(300): Xaa in position 300 is any amino acid
  Variant (302)..(302): Xaa in position 302 is any amino acid
  Variant (305)..(306): Xaa in position 305 to 306 is any amino acid
  Variant (308)..(309): Xaa in position 308 to 309 is any amino acid
  Variant (312)..(312): Xaa in position 312 is any amino acid
  Variant (314)..(314): Xaa in position 314 is any amino acid
  Variant (319)..(321): Xaa in position 319 to 321 is any amino acid
  Variant (323)..(323): Xaa in position 323 is any amino acid
  Variant (324)..(324): Xaa in position 324 is any or no amino acid
  Variant (328)..(329): Xaa in position 328 to 329 is any amino acid
  Variant (332)..(335): Xaa in position 332 to 335 is any amino acid
  Variant (336)..(340): Xaa in position 336 to 340 is any or no amino acid
  Variant (343)..(343): Xaa in position 343 is any amino acid
  Variant (345)..(346): Xaa in position 345 to 346 is any amino acid
  Variant (347)..(348): Xaa in position 347 to 348 is any or no amino acid
  Variant (350)..(350): Xaa in position 350 is any amino acid
  Variant (352)..(353): Xaa in position 352 to 353 is any amino acid
  Variant (362)..(364): Xaa in position 362 to 364 is any amino acid
  Variant (367)..(367): Xaa in position 367 is any amino acid
  Variant (369)..(369): Xaa in position 369 is any amino acid
  Variant (374)..(376): Xaa in position 374 to 376 is any amino acid
  Variant (378)..(379): Xaa in position 378 to 379 is any amino acid
  Variant (381)..(382): Xaa in position 381 to 382 is any amino acid
  Variant (395)..(395): Xaa in position 395 is any amino acid
  Variant (397)..(398): Xaa in position 397 to 398 is any amino acid
  Variant (401)..(402): Xaa in position 401 to 402 is any amino acid
  Variant (403)..(406): Xaa in position 403 to 406 is any or no amino acid
  Variant (408)..(410): Xaa in position 408 to 410 is any amino acid
  Variant (412)..(413): Xaa in position 412 to 413 is any amino acid
  Variant (416)..(416): Xaa in position 416 is any amino acid
  Variant (417)..(422): Xaa in position 417 to 422 is any or no amino acid
  Variant (424)..(425): Xaa in position 424 to 425 is any amino acid
  Variant (427)..(428): Xaa in position 427 to 428 is any amino acid
  Variant (431)..(431): Xaa in position 431 is any amino acid
  Variant (433)..(433): Xaa in position 433 is any amino acid
  Variant (435)..(437): Xaa in position 435 to 437 is any amino acid
  Variant (439)..(441): Xaa in position 439 to 441 is any amino acid
  Variant (443)..(448): Xaa in position 443 to 448 is any amino acid
  Variant (449)..(457): Xaa in position 449 to 457 is any or no amino acid
  Variant (465)..(468): Xaa in position 465 to 468 is any amino acid
  Variant (470)..(472): Xaa in position 470 to 472 is any amino acid
  Variant (475)..(475): Xaa in position 475 is any amino acid
  Variant (481)..(482): Xaa in position 481 to 482 is any amino acid
  Variant (484)..(486): Xaa in position 484 to 486 is any amino acid
  Variant (488)..(488): Xaa in position 488 is any amino acid
  Variant (491)..(493): Xaa in position 491 to 493 is any amino acid
  Variant (495)..(496): Xaa in position 495 to 496 is any amino acid
  Variant (497)..(497): Xaa in position 497 is any or no amino acid
  Variant (499)..(500): Xaa in position 499 to 500 is any amino acid
  Variant (502)..(508): Xaa in position 502 to 508 is any amino acid
  Variant (515)..(516): Xaa in position 515 to 516 is any amino acid
  Variant (519)..(521): Xaa in position 519 to 521 is any amino acid
  Variant (529)..(530): Xaa in position 529 to 530 is any amino acid
  Variant (536)..(539): Xaa in position 536 to 539 is any amino acid
  Variant (541)..(541): Xaa in position 541 is any amino acid
  Variant (543)..(543): Xaa in position 543 is any amino acid
  Variant (544)..(544): Xaa in position 544 is any or no amino acid
  Variant (547)..(548): Xaa in position 547 to 548 is any amino acid
  Variant (550)..(552): Xaa in position 550 to 552 is any amino acid
  Variant (553)..(560): Xaa in position 553 to 560 is any or no amino acid
  Variant (563)..(563): Xaa in position 563 is any amino acid
  Variant (566)..(566): Xaa in position 566 is any amino acid
  Variant (568)..(568): Xaa in position 568 is any amino acid
  Variant (570)..(572): Xaa in position 570 to 572 is any amino acid
  Variant (574)..(575): Xaa in position 574 to 575 is any amino acid
  Variant (579)..(579): Xaa in position 579 is any amino acid
  Variant (580)..(580): Xaa in position 580 is any or no amino acid
  Variant (585)..(585): Xaa in position 585 is any amino acid
  Variant (593)..(593): Xaa in position 593 is any amino acid
  Variant (596)..(596): Xaa in position 596 is any amino acid
  Variant (601)..(601): Xaa in position 601 is any amino acid
  Variant (602)..(612): Xaa in position 602 to 612 is any or no amino acid
  Variant (615)..(615): Xaa in position 615 is any amino acid
  Variant (616)..(616): Xaa in position 616 is any or no amino acid
  Variant (618)..(621): Xaa in position 618 to 621 is any amino acid
  Variant (624)..(625): Xaa in position 624 to 625 is any amino acid
  Variant (626)..(626): Xaa in position 626 is any or no amino acid
  Variant (628)..(631): Xaa in position 628 to 631 is any amino acid
  Variant (632)..(632): Xaa in position 632 is any or no amino acid
  Variant (636)..(640): Xaa in position 636 to 640 is any amino acid
  Variant (643)..(644): Xaa in position 643 to 644 is any amino acid
  Variant (646)..(657): Xaa in position 646 to 657 is any amino acid
  Variant (658)..(662): Xaa in position 658 to 662 is any or no amino acid
  Variant (664)..(673): Xaa in position 664 to 673 is any amino acid
  Variant (677)..(678): Xaa in position 677 to 678 is any amino acid
  Variant (679)..(684): Xaa in position 679 to 684 is any or no amino acid
  Variant (686)..(686): Xaa in position 686 is any amino acid
  Variant (688)..(688): Xaa in position 688 is any amino acid
  Variant (693)..(698): Xaa in position 693 to 698 is any amino acid
  Variant (699)..(699): Xaa in position 699 is any or no amino acid
  Variant (701)..(702): Xaa in position 701 to 702 is any amino acid
  Variant (704)..(706): Xaa in position 704 to 706 is any amino acid
  Variant (707)..(707): Xaa in position 707 is any or no amino acid
  Variant (709)..(709): Xaa in position 709 is any amino acid
  Variant (711)..(713): Xaa in position 711 to 713 is any amino acid
  Variant (715)..(716): Xaa in position 715 to 716 is any amino acid
  Variant (718)..(721): Xaa in position 718 to 721 is any amino acid
  Variant (724)..(724): Xaa in position 724 is any amino acid
  Variant (725)..(725): Xaa in position 725 is any or no amino acid
  Variant (727)..(729): Xaa in position 727 to 729 is any amino acid
  Variant (730)..(741): Xaa in position 730 to 741 is any or no amino acid
  Variant (743)..(745): Xaa in position 743 to 745 is any amino acid
  Variant (746)..(758): Xaa in position 746 to 758 is any or no amino acid
  Variant (760)..(764): Xaa in position 760 to 764 is any amino acid
  Variant (765)..(767): Xaa in position 765 to 767 is any or no amino acid
  Variant (769)..(773): Xaa in position 769 to 773 is any amino acid
  Variant (774)..(794): Xaa in position 774 to 794 is any or no amino acid
DXXLXXXXXXXXXRXXXXXXXXXXXXXXXXXXXXXXXLXXFXXXXXXXXGXXXXXXXXXXXXXXXXXXXEWAPXAXXXXXXGDFNXWXXXXXXXXXXXXXXGXWXXXXPXXXXXXXXXXXXXXHXSXXXXKXXXXXXXXXXXXXXXXXXXWXXXXXXXXXXXXXXXXXXXXXXXXXPXXXXXYXXXXXXXXXXXXXXXXXIYEXHXGXXXXXXXXXXXXXXXXXXXXXXXXXXXXXXXXXXXYXXFXXXXLPRIXXXGYNXXQXMAIXEHXYYXSFGYXVTXFFAXSSRXGTPXXLKXLXDXAHXXGXXVLXDXVHSHXXXNXXDGLXXFDXXXXXXXXXFHXGXXXXGXHXXWDSRLFNYXXXEVXRXLLSNXXXWXXEXXFDGFRFDGVTSMXYXXHGXXXXXXFXXXYXXYFXXXXXXXDXXAXXYLXLXNXXXHXXXPXXXXXXXXXXXXXXXEDVSGMPXXXXPXXXGGXGFDYRXXMXXXDXWIXXXKXXXDXXWXXXXXXXTLTNRRXXEKXXXYAESHDQXXVGDKTXXXXLXDXXMYXXMXXXXXXXXXXXRGXALXKXIXXXTXXLGGXXYLNFXGNEFGHPXEWXDFPRXXXXXXXXXXXXGNXXSXXXXRRXXXLXXXXXLRYXXXXXFDXXMXXXXXXXXXXXXXXXXXSXXXXXXXXXXFERXXXXXXXXLXFXFNFHXXXXXXXYXXGXXXXGXYXXXLXXDXXXXGGXXRXXXXXXXXXXXXXXXTXXXXXXXXXXXXXXXXRXXXXXXXXPXXXXXXXXXXXXXXXXXXXXXXXXXXV

SEQ ID NO: 148799 - protein, 60 aa, Artificial sequence
  protein pattern
  Variant (2)..(4): Xaa in position 2 to 4 is any amino acid
  Variant (6)..(6): Xaa in position 6 is Ile, Leu, Met or Val
  Variant (9)..(9): Xaa in position 9 is Gly, Ile or Val
  Variant (10)..(10): Xaa in position 10 is any amino acid
  Variant (13)..(13): Xaa in position 13 is Ala, Pro or Ser
  Variant (16)..(16): Xaa in position 16 is Ala or Gly
  Variant (21)..(21): Xaa in position 21 is any amino acid
  Variant (23)..(23): Xaa in position 23 is Asn, Ser or Thr
  Variant (24)..(24): Xaa in position 24 is Asn or Ser
  Variant (25)..(26): Xaa in position 25 to 26 is any amino acid
  Variant (27)..(27): Xaa in position 27 is Ala or Gly
  Variant (28)..(28): Xaa in position 28 is Ala, Ile, Pro or Val
  Variant (29)..(29): Xaa in position 29 is Cys or Ser
  Variant (32)..(32): Xaa in position 32 is any amino acid
  Variant (34)..(34): Xaa in position 34 is any amino acid
  Variant (36)..(36): Xaa in position 36 is Asp or Glu
  Variant (37)..(37): Xaa in position 37 is Asp, Glu or Gln
  Variant (39)..(40): Xaa in position 39 to 40 is any amino acid
  Variant (41)..(41): Xaa in position 41 is Leu or Met
  Variant (42)..(42): Xaa in position 42 is Ile or Val
  Variant (43)..(43): Xaa in position 43 is Asp or Asn
  Variant (44)..(44): Xaa in position 44 is any amino acid
  Variant (47)..(48): Xaa in position 47 to 48 is any amino acid
  Variant (50)..(50): Xaa in position 50 is Ile, Leu or Val
  Variant (51)..(51): Xaa in position 51 is any amino acid
  Variant (53)..(53): Xaa in position 53 is Ile or Leu
  Variant (54)..(54): Xaa in position 54 is Leu, Met or Val
  Variant (56)..(56): Xaa in position 56 is Ile, Leu or Val
  Variant (57)..(57): Xaa in position 57 is Ile or Val
YXXXQXMAXXEHXYYXSFGYXVXXXXXXXSRXGXPXXLXXXXXXAHXXGXXVXXDXXHSH

SEQ ID NO: 148800 - protein, 49 aa, Artificial sequence
  protein pattern
  Variant (4)..(4): Xaa in position 4 is any or no amino acid
  Variant (6)..(7): Xaa in position 6 to 7 is any amino acid
  Variant (8)..(8): Xaa in position 8 is any or no amino acid
  Variant (10)..(12): Xaa in position 10 to 12 is any amino acid
  Variant (14)..(14): Xaa in position 14 is Thr or Val
  Variant (15)..(15): Xaa in position 15 is any amino acid
  Variant (16)..(16): Xaa in position 16 is His or Arg
  Variant (17)..(17): Xaa in position 17 is Phe or Tyr
  Variant (20)..(20): Xaa in position 20 is Ala or Ser
  Variant (22)..(23): Xaa in position 22 to 23 is any amino acid
  Variant (24)..(25): Xaa in position 24 to 25 is Phe, Trp or Tyr
  Variant (26)..(26): Xaa in position 26 is any amino acid
  Variant (27)..(27): Xaa in position 27 is Asp or Glu
  Variant (28)..(28): Xaa in position 28 is any amino acid
  Variant (29)..(29): Xaa in position 29 is Phe or Tyr
  Variant (30)..(30): Xaa in position 30 is any amino acid
  Variant (34)..(34): Xaa in position 34 is Phe or Tyr
  Variant (39)..(39): Xaa in position 39 is Ile or Val
  Variant (43)..(43): Xaa in position 43 is Leu or Met
  Variant (45)..(46): Xaa in position 45 to 46 is any amino acid
  Variant (47)..(47): Xaa in position 47 is His or Arg
  Variant (49)..(49): Xaa in position 49 is Ile, Leu, Met or Val
WDSXLXXXYXXXEXXXXLLXNXXXXXXXXXFDGXRFDGXTSMXYXXXGX

SEQ ID NO: 148801 - protein, 15 aa, Artificial sequence
  protein pattern
  Variant (2)..(2): Xaa in position 2 is Asp, Glu or Lys
  Variant (3)..(3): Xaa in position 3 is Ala, Gly or Ser
  Variant (8)..(8): Xaa in position 8 is any amino acid
GXXYLNFXGNEFGHP

SEQ ID NO: 148802 - protein, 27 aa, Artificial sequence
  protein pattern
  Variant (6)..(6): Xaa in position 6 is any amino acid
  Variant (8)..(8): Xaa in position 8 is Ala, Gly, Ser, Thr or Val
  Variant (9)..(9): Xaa in position 9 is Phe, Ile or Leu
  Variant (10)..(11): Xaa in position 10 to 11 is any amino acid
  Variant (12)..(12): Xaa in position 12 is Pro, Gln or Ser
  Variant (13)..(15): Xaa in position 13 to 15 is any amino acid
  Variant (18)..(18): Xaa in position 18 is any amino acid
  Variant (20)..(20): Xaa in position 20 is Phe or Leu
  Variant (21)..(21): Xaa in position 21 is Asp or Asn
  Variant (22)..(22): Xaa in position 22 is any amino acid
  Variant (24)..(24): Xaa in position 24 is Leu or Met
  Variant (25)..(25): Xaa in position 25 is any amino acid
  Variant (27)..(27): Xaa in position 27 is Ala, Gly or Ser
EDVSGXPXXXXXXXXGGXGXXXRXXMX

SEQ ID NO: 148803 - protein, 19 aa, Artificial sequence
  protein pattern
  Variant (4)..(5): Xaa in position 4 to 5 is any amino acid
  Variant (8)..(8): Xaa in position 8 is Ala, Cys, Ser, Thr or Val
  Variant (9)..(9): Xaa in position 9 is Ile or Val
  Variant (10)..(10): Xaa in position 10 is Ala, Gly, Ser, Thr or Val
  Variant (12)..(12): Xaa in position 12 is Ala, Cys, Thr or Val
  Variant (18)..(18): Xaa in position 18 is Ala or Ser
  Variant (19)..(19): Xaa in position 19 is Ile, Leu or Met
NRRXXEKXXXYXESHDQXX

SEQ ID NO: 148804 - protein, 18 aa, Artificial sequence
  protein pattern
  Variant (5)..(5): Xaa in position 5 is Ala, Glu, Gly or Asn
  Variant (7)..(10): Xaa in position 7 to 10 is any amino acid
  Variant (11)..(11): Xaa in position 11 is Ile, Leu, Met or Val
  Variant (12)..(12): Xaa in position 12 is any amino acid
  Variant (13)..(13): Xaa in position 13 is Gly or Ser
  Variant (14)..(14): Xaa in position 14 is Asp, Glu or Thr
  Variant (15)..(15): Xaa in position 15 is Phe or Val
  Variant (16)..(16): Xaa in position 16 is Asn, Ser or Thr
  Variant (17)..(17): Xaa in position 17 is Asp, Glu, Gly, Asn, Gln or Ser
EWAPXAXXXXXXXXXXXW

SEQ ID NO: 148805 - protein, 18 aa, Artificial sequence
  protein pattern
  Variant (2)..(4): Xaa in position 2 to 4 is any or no amino acid
  Variant (6)..(6): Xaa in position 6 is Ile, Leu, Met or Val
  Variant (8)..(9): Xaa in position 8 to 9 is any amino acid
  Variant (11)..(11): Xaa in position 11 is Leu or Met
  Variant (12)..(12): Xaa in position 12 is Ile, Leu or Val
  Variant (13)..(13): Xaa in position 13 is any amino acid
  Variant (14)..(14): Xaa in position 14 is Phe or Leu
  Variant (15)..(15): Xaa in position 15 is Phe, Ile, Leu or Val
  Variant (16)..(16): Xaa in position 16 is Thr or Val
  Variant (17)..(17): Xaa in position 17 is any amino acid
  Variant (18)..(18): Xaa in position 18 is Ala, Gly, Ser or Thr
RXXXGXAXXKXXXXXXXX

SEQ ID NO: 148806 - protein, 14 aa, Artificial sequence
  protein pattern
  Variant (4)..(5): Xaa in position 4 to 5 is any amino acid
  Variant (6)..(6): Xaa in position 6 is Phe or Met
  Variant (7)..(7): Xaa in position 7 is any amino acid
  Variant (8)..(8): Xaa in position 8 is Leu or Met
  Variant (9)..(9): Xaa in position 9 is any amino acid
  Variant (11)..(11): Xaa in position 11 is any amino acid
  Variant (12)..(12): Xaa in position 12 is Ala, Asp or Glu
DKTXXXXXXDXXMY

SEQ ID NO: 148807 - protein, 12 aa, Artificial sequence
  protein pattern
  Variant (2)..(2): Xaa in position 2 is any amino acid
  Variant (3)..(4): Xaa in position 3 to 4 is any or no amino acid
  Variant (6)..(6): Xaa in position 6 is Ala, Cys, Ser or Thr
  Variant (8)..(8): Xaa in position 8 is Ile or Val
  Variant (10)..(10): Xaa in position 10 is Ile or Met
  Variant (11)..(11): Xaa in position 11 is Ala or Ser
  Variant (12)..(12): Xaa in position 12 is Gly, Ser or Thr
IXXXEXHXGXXX

SEQ ID NO: 148808 - protein, 30 aa, Artificial sequence
  protein pattern
  Variant (2)..(2): Xaa in position 2 is Gly, Asn or Gln
  Variant (3)..(3): Xaa in position 3 is any amino acid
  Variant (5)..(7): Xaa in position 5 to 7 is any amino acid
  Variant (8)..(8): Xaa in position 8 is Ala or Cys
  Variant (11)..(11): Xaa in position 11 is Gln or Arg
  Variant (12)..(13): Xaa in position 12 to 13 is any amino acid
  Variant (15)..(15): Xaa in position 15 is any amino acid
  Variant (16)..(16): Xaa in position 16 is any or no amino acid
  Variant (18)..(19): Xaa in position 18 to 19 is any amino acid
  Variant (20)..(20): Xaa in position 20 is any or no amino acid
  Variant (22)..(22): Xaa in position 22 is any amino acid
  Variant (24)..(25): Xaa in position 24 to 25 is any amino acid
  Variant (26)..(26): Xaa in position 26 is Leu or Met
  Variant (27)..(28): Xaa in position 27 to 28 is any amino acid
NXXSXXXXRRXXXLXXDXXXLXYXXXXXFD

SEQ ID NO: 148809 - protein, 14 aa, Artificial sequence
  protein pattern
  Variant (2)..(3): Xaa in position 2 to 3 is any amino acid
  Variant (4)..(4): Xaa in position 4 is any or no amino acid
  Variant (7)..(7): Xaa in position 7 is Ile or Leu
  Variant (8)..(8): Xaa in position 8 is Ala, Asp or Asn
  Variant (9)..(9): Xaa in position 9 is any amino acid
  Variant (10)..(10): Xaa in position 10 is Phe or Tyr
  Variant (11)..(11): Xaa in position 11 is Asp, Glu or Asn
  Variant (12)..(12): Xaa in position 12 is any amino acid
  Variant (13)..(13): Xaa in position 13 is Gly, Ser or Thr
  Variant (14)..(14): Xaa in position 14 is Asp, Asn or Gln
NXXXDGXXXXXXXX

SEQ ID NO: 148810 - protein, 16 aa, Artificial sequence
  protein pattern
  Variant (2)..(2): Xaa in position 2 is any amino acid
  Variant (4)..(4): Xaa in position 4 is any amino acid
  Variant (5)..(6): Xaa in position 5 to 6 is Ala, Ile, Leu or Val
  Variant (8)..(8): Xaa in position 8 is Asp, Asn, Ser or Thr
  Variant (9)..(9): Xaa in position 9 is Ser or Thr
  Variant (11)..(14): Xaa in position 11 to 14 is any amino acid
GXYXXXLXXDXXXXGG

SEQ ID NO: 148811 - DNA, 2772 bp, Saccharomyces cerevisiae
  CDS (1)..(2772)
atgtcaagcggcagtactattgtttcgtctgacaagtcggggcgaacatttaagcatgaggaagaactacccaagttaccattacctaaactctgtgacactttgcagcgtctgaaggagagtttagagccattgtattatgctgatggttactatcaacatcctttagatccagaacaaattgagaagctgtcatccataataagagattttgaagagaatcccgtaagtgagaagctgcaatctaaactacagagctaccatgacactagggattgctaccttgatgaattacacttagacatcaataaccagacctccactagggagattcaggacgatgtcctacccaggaatcccttcttggttctcgcagatgacgctttgccaaacatcactcaagctgataggtcagccgtcctagtgcactctgcggccaggtttatttctgctttgaaacaagatttgttgccaccagatatcaatgccaccaatggcaaaccactgtcaatggctccatttctgaacttgttcggtactactcgtagtcctgtttttcagcgcggtgaggttgaaaattttgatttgaacaaaccttacacagcatctgatttagaagaccctgattattcaagcgatgaggacgataacgacgaacccacccaaaaagactttgatgaccgtaaaagaaaacacgaagaagacatattcactggcaatggtataactataaaaagacatccggatagcaaacacatcttgatcatctccaggggccaatactatacactggaagtacttgattcgacgaataaaattatatacactgctgcagaattaaccacaattttcaaccatataataaaagattcttctggcattgaaaaatcaactgcgttaggtagtttgacctctcactcttttagaaactggaaatatgcaaggaagagactacagaaaaggtatcctaatgaattacatcgcatagactctgctctgttcgtgttagtgctggacgaatcacaagaagaaactaccaatgatggcgatgataccgctgatatcagtcaaatgtttaacaggactatcactgagcgagacaagaaatgtacttccgccaattgtaagagagtgttttacggtacttctataataaatagcaaaggccatcaagtgggttcatgtgtttctcgttggtatgataaattacagttagttgtcactgcagatgcaaaagccacagtgatttgggattccttcacatgtgacgggtcagtcgtgcttcggtttacttctgaaatttatacagaatcagtcttgagattagctagagacgttaacgccggtgacccacagttttcactctggcctaacgtgacacaaatggatcctgaaactaaaaaactgatgacggcgaccataagtgccgacggcggaggcccttctgaaattgaccctaagttggttgtaaataaaatcgattggtctttcagtaacatcctgaacacacatgtccatttgtcagaaaccaaactagctgatctgatttccaagtatgatattgttcgcgcttctattccattgggcagaaggtcagctcaaagattaggagtcaagcccgattcgatggttcaagtagctttacaaatagctcactatgctttgtatggaagaatggtgtttggattagaaccagtatccacacgtggtttcaaaaactcgagatcatcttttattaacattcaaagtcaagcgctgttggaactatgtcaattgtttatttctagctccattgatgggacagataaattagacaaatttatccaaacctgcgaaacacataataacatggttaaacatgcaaagtctggggtaggttatgaaaaacacttcaatgcattgaaatatctcttcaaatttcatgaccattttggtatccacttaagtggtgatgaatcatctgctgcgaaagatcttttcgaaaatccacttgttttacctttctcacagcctgagttgattgttgccaactgtggtaatgctgctaccacgacatttggtataactcctgctgtacctcatggctttggaatagggtacatcattaaagatgatcaagtagatttgaccgtgacatcgcaatttcgacagggtgacaggttaatgtttatgttaagttgggtgttaggcgaaattcgttcctactggaggatgtcacgcggcacttctcataataaaactggcgtgaagatcagtccagtggtcgataaattgtatgaaatggacaatgcagtcaataatcctccgaaacgtaacggccatacagtcaatggctcccgcaaaacatcttcttcatcacaggtaaatttgaacaggtatggcgggtttttcgatttggaaggccacattgacagtaggaatatatctaaaacaccatcgatgaagaatttgcagaaaaccttcaatggcttgaccatgagcgcagacaatgatcattcaagttccgcagtttccgttcccacagaaaaggaaaaattaaatacaggccatgaaattttacagatccaaccgcgggaagtggcaagtaatgggttggaagcagatgatgagacagatattgaaatagttgctggcaatgctgatggcacatcctcttcggcatcttcagctacatctctaaattccaagaaacgtaacgtcatcaactcaagattcgatattgattttgaccgcagtcgtgtgggtagaaaggtggcgaccttagatcaataa

SEQ ID NO: 148812 - protein, 923 aa, Saccharomyces cerevisiae
MSSGSTIVSSDKSGRTFKHEEELPKLPLPKLCDTLQRLKESLEPLYYADGYYQHPLDPEQIEKLSSIIRDFEENPVSEKLQSKLQSYHDTRDCYLDELHLDINNQTSTREIQDDVLPRNPFLVLADDALPNITQADRSAVLVHSAARFISALKQDLLPPDINATNGKPLSMAPFLNLFGTTRSPVFQRGEVENFDLNKPYTASDLEDPDYSSDEDDNDEPTQKDFDDRKRKHEEDIFTGNGITIKRHPDSKHILIISRGQYYTLEVLDSTNKIIYTAAELTTIFNHIIKDSSGIEKSTALGSLTSHSFRNWKYARKRLQKRYPNELHRIDSALFVLVLDESQEETTNDGDDTADISQMFNRTITERDKKCTSANCKRVFYGTSIINSKGHQVGSCVSRWYDKLQLVVTADAKATVIWDSFTCDGSVVLRFTSEIYTESVLRLARDVNAGDPQFSLWPNVTQMDPETKKLMTATISADGGGPSEIDPKLVVNKIDWSFSNILNTHVHLSETKLADLISKYDIVRASIPLGRRSAQRLGVKPDSMVQVALQIAHYALYGRMVFGLEPVSTRGFKNSRSSFINIQSQALLELCQLFISSSIDGTDKLDKFIQTCETHNNMVKHAKSGVGYEKHFNALKYLFKFHDHFGIHLSGDESSAAKDLFENPLVLPFSQPELIVANCGNAATTTFGITPAVPHGFGIGYIIKDDQVDLTVTSQFRQGDRLMFMLSWVLGEIRSYWRMSRGTSHNKTGVKISPVVDKLYEMDNAVNNPPKRNGHTVNGSRKTSSSSQVNLNRYGGFFDLEGHIDSRNISKTPSMKNLQKTFNGLTMSADNDHSSSAVSVPTEKEKLNTGHEILQIQPREVASNGLEADDETDIEIVAGNADGTSSSASSATSLNSKKRNVINSRFDIDFDRSRVGRKVATLDQ

SEQ ID NO: 148813 - DNA, 2598 bp, Kluyveromyces lactis NRRL Y-1140
  CDS (1)..(2598)
atgactatgtcgacgtttatcaatgagaaaaacttgccaaagttgcctctcccagacttgcaaaagaccttagaggagatggaggattccttgaaaccactgtattatgcagatgggtattataaacatcctttacatccagaagaatccagtgaattgcatgaaaatatcgagaaattcttgcattccaatgctgctgtaaaattacaggaaaaattgaagatgtttgatagatttaacggttgttatttggacaagttgcatctagacatcaataaccatacttccacgaaagagatccaggatgatgtgctaccaagaaatccgtttttaatcttagcagaagatgctacctctgatatctcacaagcagtccgtagtggtgtgctctgttcctctgctttgagatttgtcagtgccttgagacagaaccatttgcctcctgattgtggcagcgatgggaagccgatgagtatgcttccatataccaatcttttcggtacgacaagatgtcccgtgtttgaacatggtgaagtggaatccttcgatttgaacagaccttacgatgaatctgatttggaagccgaattgaataatctttctgcgcagagaaggccttctactgcgtcatcagaggcttctaatcagccatctgccaattctgacgatgatttggaatttttcaacgttcatggcattacaaagaaacagtaccctgattctaaacatattatgatcatttcaaagggtcaatattacactctggaagtgttggatgaaaacgataatgcattgtttacagattcacagttgtcacgtgttttccaacatattatcgatgattcgactacttcttatagtttgaaaagggctaccgcattgggttctctcacatcatattcctttaagaactggaagtatgcaagaaaaagattacagaagcgttatccacaggaattgaacgttatcgattctgctttattcatcgtcgttcttgacgaatcgactagtactagtgatatcaacgaagattgcaagaggttatactatggtactagtattgttgatgatgttacagggttccaagtcgggtcttgcacttcaagatggtatgacaagctacagttagtcgtaactgctgactcaaaggcagcagtgatttgggattcctttacttgtgatggtagcgttgttctaagatttactagtgatatttatgccgaatctattttgagattggctagagaagtccatgctggtgatcctcatttttccttatggccacaggtccctaaagcaagctcaaaagatgcatggactgagaaattttccaagatcacttggtcctttagtcatattttgaatacccatgttcatttatccgaaaccaagttgactgatttgatctcaaagcatgacatagttcacacaactattccatttggtcgtagaacagcccagaaattaggggttcgtgctgactctttgattcaaattgccctccaaatagctcattatgctctttatggtaagatggtattcagtttcgaaccagtgtctactaggttcttccaaaattctagatctacttttatcccaatacaaactcaagagctattagagttgtgccaactattcatatccaattccctaaatgaaacgggaaagttggagaagtttattactgcttgcaatgatcacagcgaaagaatccaaaaggctcaaagaggtacagggtttgaaaaacatttcaatgcaatcaagtaccttttcaagttccacgaccatttcgatattggcctatctcctgaagaattcgaaatctcttcaaaagtcttcaacgatgccatgctggaaccattctcagctcctgagttaattgcatctaattgtggtaattcagcaatgactgcgttcggtgttacaccagcagtaccacaaggatttggtattggttatattatcaaaaatgagcaatgtgacattacgttaacctcacaatacagacaagggagaagacttgctttcatgttgaaatgggtcctaactgaaatcaacaactactgggaattaagttccgttaaatctgtgaaaattagccccaaagttgatcagttatatgaaattgataatgcgattaaccaattgaaattcaactcattatccacaaaaccagaaatagcaaagagccctgttcaattcgctgaaagacctaaccttggatcgtaccaacaatcttcatcctccagtatcttcaatggtggtcatggtttcttagaactcaagggtcatcttgaaagtagagcttcatccaggcctatttctagatctggatccaatttgaagttatctgccatgaatacaacaaattcattacagcccaccttgtcaaatggcttagaagatgcactaacatctacaattagcatcacaagtgaggttttgaagcagaatgccggccatgaaatcttgaagattgatgcttcgaatatcggggaaacacaacctcaggtgcagaaaaagaacgttgtttcatccaagtttgaaattaactttgaccgttcaagtgttggtagaaaagttaatactcgtggttaa

SEQ ID NO: 148814 - protein, 865 aa, Kluyveromyces lactis NRRL Y-1140
MTMSTFINEKNLPKLPLPDLQKTLEEMEDSLKPLYYADGYYKHPLHPEESSELHENIEKFLHSNAAVKLQEKLKMFDRFNGCYLDKLHLDINNHTSTKEIQDDVLPRNPFLILAEDATSDISQAVRSGVLCSSALRFVSALRQNHLPPDCGSDGKPMSMLPYTNLFGTTRCPVFEHGEVESFDLNRPYDESDLEAELNNLSAQRRPSTASSEASNQPSANSDDDLEFFNVHGITKKQYPDSKHIMIISKGQYYTLEVLDENDNALFTDSQLSRVFQHIIDDSTTSYSLKRATALGSLTSYSFKNWKYARKRLQKRYPQELNVIDSALFIVVLDESTSTSDINEDCKRLYYGTSIVDDVTGFQVGSCTSRWYDKLQLVVTADSKAAVIWDSFTCDGSVVLRFTSDIYAESILRLAREVHAGDPHFSLWPQVPKASSKDAWTEKFSKITWSFSHILNTHVHLSETKLTDLISKHDIVHTTIPFGRRTAQKLGVRADSLIQIALQIAHYALYGKMVFSFEPVSTRFFQNSRSTFIPIQTQELLELCQLFISNSLNETGKLEKFITACNDHSERIQKAQRGTGFEKHFNAIKYLFKFHDHFDIGLSPEEFEISSKVFNDAMLEPFSAPELIASNCGNSAMTAFGVTPAVPQGFGIGYIIKNEQCDITLTSQYRQGRRLAFMLKWVLTEINNYWELSSVKSVKISPKVDQLYEIDNAINQLKFNSLSTKPEIAKSPVQFAERPNLGSYQQSSSSSIFNGGHGFLELKGHLESRASSRPISRSGSNLKLSAMNTTNSLQPTLSNGLEDALTSTISITSEVLKQNAGHEILKIDASNIGETQPQVQKKNVVSSKFEINFDRSSVGRKVNTRG

SEQ ID NO: 148815 - DNA, 2601 bp, Debaryomyces hansenii CBS767
  CDS (1)..(2601)
atgacatacacatatgaatatgaagagggtcttcctcgattaccagttcctctgttaacgaacacgtcaacccaattattgaatacattgaaaccattattgagcgtagatgaatataacgaattactccaggaatcgagtgagtttctcagtcatgaagttattaatttgattcaacgtcatttggtggcagcttctttaaatcctaataacacatgctacttaaattgtgtgaataatggaaccagcccggggatttatggcgaaataagaggagatattcttcctcgaaacccgtacttaattttagaagaagatccgtatgcgaagactgttaatccacctaaccaaagtcaaagagcagccaatttggttaattcgtctttgaaatttgtaacaagtcttcgtaatgatacattacaaccagataggacacctaaaaatggtaatcccttatcgatgaactgttataatatattatttggcacaacaagagtgcccctcacagaagacgaaaattcgtaccaaagtgcaactatacaaaagtttaatgatatcaatgattcgagacacattgttatcatttgtaacaaccagtattattgcttggaagtgttgacagagtatagcgaagaggaatacaaggaatctaagaccaagcataaaatttggttcagtgattatgaattatcaataatttttcaagggataatcaacaattctaatactattgatagagttgagtctataaacaattctattggatctttgactacgcaatcattttcaatttggaaaataagcagaagtgaattgaataagtctaacaaaaaaaacttagaattgattgataatgccttattcatagttgtattggatcctaatttgccagattccgatcaagaaaagacatcggtgatagcacatggaacctctgagttgttgaaaggaactaatatgcaagtcggttcatgtacgtctaggtggtatgataagttacagttagtcgttactaagaattcagttgcaggtgtagtctgggaatcatcatcaacagatggcacagcgattttaagattcattagtgacatctatgctgattctattttgaaattagccaaaaacatcaatggagctgagtatacattgtttgatgataatgttgggtttgtatcagcagatggatcgatcaagaagccagagtctgaaagattgataattaccagaaccccagaacttttgaatttgataaggctatcagaaacaagattagccgacttaatacaccaacatgaatacaagaccttgactcttaaattgaacacctatttggtcaataaattcgaactcagtatagactcagttttgcaagttgcatttcagattgcaaattatactttatatgggagtatggcaaatacgttagaacccattaccactagaaagttcagagactcgaggactgaattaattccagttcaaaacgatcatatttctaggttggttaaattatttattacaaactcaaattcttcattgaaatgggacttgttcagagaatgttgtagcgttcatactaagcaatatcgtaatgctatgaatggtaaaggttttgagagacattttaatgcaatcatctctgttttagggagacctcatgcagtcgagactttgaacaaattgaatgctgatgtgcctgatttggaaccgattccagatataaagaaaataaaaaacctacatattccattactctcaaatcccacgattgaaaagctttcctctcctgaattattgatttctaattgtggtaatccagcattacacatgtttggtattccacctgcagcggaccaaggttttgggattggttacgttatccatggtgataaaatcatcattactgttagttcaaagttcagacaaacagagaggtttttgcgtacttttaaaggagtcatgaaggaattcttatcgattattaagcaaaaatcgaatttcttgattaatataaatgattcagaatctagaaaactggagttacaaagacttagaattgagcatgagcttaagaatattaacaaatccctccctctgacaaaacatcctatcgaattgactgttgaaaaaacacgcattccaatagaaaatgttagcattgaaggaaatggggatagtgtgcaatcccgctctagtagatctaactctttatcggacgattataaagaagattacgatattttagggggatatgggtacttcaattttggtgacttagatatgagatcggatgaattatcaagagaagagtcgttcttaaacagtactccacctagcttatcgagcttgaattcgaaacaacattcttcgacaaatcttcataaagcagcaatgactaataacaatagtcctagtgatatcaagcaaaagtttaatttgtctgctgagatcagagacagattgctgttacaagatgattattcgtcgacatcctctgttgcaggaagcatggaggatgcatcatcagaaggttcaaatgaaaattctagtaagccaaagaaattaataggcagagagttggatatttcagatgttcattag

SEQ ID NO: 148816 - protein, 866 aa, Debaryomyces hansenii CBS767
MTYTYEYEEGLPRLPVPLLTNTSTQLLNTLKPLLSVDEYNELLQESSEFLSHEVINLIQRHLVAASLNPNNTCYLNCVNNGTSPGIYGEIRGDILPRNPYLILEEDPYAKTVNPPNQSQRAANLVNSSLKFVTSLRNDTLQPDRTPKNGNPLSMNCYNILFGTTRVPLTEDENSYQSATIQKFNDINDSRHIVIICNNQYYCLEVLTEYSEEEYKESKTKHKIWFSDYELSIIFQGIINNSNTIDRVESINNSIGSLTTQSFSIWKISRSELNKSNKKNLELIDNALFIVVLDPNLPDSDQEKTSVIAHGTSELLKGTNMQVGSCTSRWYDKLQLVVTKNSVAGVVWESSSTDGTAILRFISDIYADSILKLAKNINGAEYTLFDDNVGFVSADGSIKKPESERLIITRTPELLNLIRLSETRLADLIHQHEYKTLTLKLNTYLVNKFELSIDSVLQVAFQIANYTLYGSMANTLEPITTRKFRDSRTELIPVQNDHISRLVKLFITNSNSSLKWDLFRECCSVHTKQYRNAMNGKGFERHFNAIISVLGRPHAVETLNKLNADVPDLEPIPDIKKIKNLHIPLLSNPTIEKLSSPELLISNCGNPALHMFGIPPAADQGFGIGYVIHGDKIIITVSSKFRQTERFLRTFKGVMKEFLSIIKQKSNFLININDSESRKLELQRLRIEHELKNINKSLPLTKHPIELTVEKTRIPIENVSIEGNGDSVQSRSSRSNSLSDDYKEDYDILGGYGYFNFGDLDMRSDELSREESFLNSTPPSLSSLNSKQHSSTNLHKAAMTNNNSPSDIKQKFNLSAEIRDRLLLQDDYSSTSSVAGSMEDASSEGSNENSSKPKKLIGRELDISDVH

SEQ ID NO: 148817 - DNA, 2418 bp, Aspergillus oryzae
  CDS (1)..(2418)
atggccacccctcgctctcagcctaccatggagactaagatcaagcctacttccgtggacggcgtgaacggccaaggcgtcgcgtcagaacagccgaagaagaaagggtccacgttcgctaaccaagactctctcccgaaacttcctatcccggatttagagagcacatgcaagaaatacattgaggccctgtctgcattacaaacgccgagggaacaggaagaaacaaaggcctctgtacaagattttctcaagtcggacggccctattcttcaagagaagttaaagaactatgcgtcttcgaagaccagctatattgagcaattttggtatgattcttacctgaactacgacagcccggtcgttttgaatctcaacccattcttcttgctggaggatgaccccacacctgccaggaatcaccaggttactagagcagcatcgcttgttgtatcggccctcagctttgtccgagcggtgaggagggaagaactcgagcccgacaccgttagagggacgccactatgcatgtatcaatattctcgactattcggaacagcacgtctgcccaccgaaaatggatgcgttatcagtcaggacccccacgccaagcacattgttgtcatgtgccggggccagttctactggtttgatgtcctcgacgagaacaatgatctgattatgactgagaaggacattgcccttaacctgcaggtgatcattggggatgcggaacagaccccaatccaggatgctgccaagggagctttgggtgtcctcagtacggaaaaccgcaaagtgtggtctgggctacgggatatcttaacgaaggacgaaggctcaaacaacgcagaatgtctgaacattgttgatacagcgctctttgttctctgtctagattatactgagccgagcaatacgtctgatctctgtgccaatatgctatgcggtacaagtgaagtggtgaaaggtgtgcaggtcggaacttgtaccaatcggtggtatgacaagctccagatcattgtgtgccagaacggcagcgccggtatcaactttgagcataccggtgtggacggccatacggtgctgcgttttgccagtgacgtctacacagatacgatacttcgcttcgcaaaaactatcaatggacaagcgcccactctgtgggcaagcaacagccccgatccggccaagcgtgatccccgaagctttggcaatgtcagcacgacgccccgcaagctagagtgggacatgcttcctgaactgagtattgccctgcggttcgccgaatcccatctcgccgaccttctcaagcagcacgagttccgcgtgcttgaattcgaagggtttggtaagaatttcatcacgtcgatggggttctcgccagatgcgttcgtgcagatggcatttcaagctgcgtactacgggctgtatggccgtctggagaacacctacgagccagcgatgaccaaattcttcttgcacggtcggacggaggcgatacggacggtcaccaacgaatgcgccaattttgtacagacattctggggagagaatccagcagagcagaaggtagaggctttgaagaaggcgaccgaaaaacacaccgctactacaaaagagtgctccaagggacagggacaggatcgacatctctatgcattatattgcctctggcagcggtcgtttgaggaaggctcttcctcctccggcaatagtgttgtaagcagttccaacggctattctagccctgttgagaatggctctaccattgactcacccaagtctccgttgtcggatgacggcgtttcctccacgaccagctatggcttgcgtgcgattcgcccagcgccacccacgccagcactcttcagtgaccccggttgggacaagatcaacaatactatactgtcaacctcaaactgcggaaatccatgtctgcggcattttggcttcggtccaacgtctgcggatggcttcggaattggctatatcatcaaagatgactcgatctcgttctgcgcctcgtccaagcaccgtcagaccgctcgatttttgtacacactcgaatcgtatttgtttgaaatccgaaagctgctacgcgccaccaaccgtacgacggccagtccgcgaaccagtcgggctcgggaaatggagatcatcgccgagcggctccaaggggatcaccgtcggggccggctcgtccggggagatcctggggcagtgcgccggggtgccgatacgccaacgaccgacagcggagaaatagaagacgacggcatgggtggatacgggttcttcgatgccggaatgctattgcatgcactcaaaggcttgaatacagaccgagagcgtaacggagagaaacccgaacgacgtcggtttgttggcaagaaactacgtctaaatgagtactga

SEQ ID NO: 148818 - protein, 805 aa, Aspergillus oryzae
MATPRSQPTMETKIKPTSVDGVNGQGVASEQPKKKGSTFANQDSLPKLPIPDLESTCKKYIEALSALQTPREQEETKASVQDFLKSDGPILQEKLKNYASSKTSYIEQFWYDSYLNYDSPVVLNLNPFFLLEDDPTPARNHQVTRAASLVVSALSFVRAVRREELEPDTVRGTPLCMYQYSRLFGTARLPTENGCVISQDPHAKHIVVMCRGQFYWFDVLDENNDLIMTEKDIALNLQVIIGDAEQTPIQDAAKGALGVLSTENRKVWSGLRDILTKDEGSNNAECLNIVDTALFVLCLDYTEPSNTSDLCANMLCGTSEVVKGVQVGTCTNRWYDKLQIIVCQNGSAGINFEHTGVDGHTVLRFASDVYTDTILRFAKTINGQAPTLWASNSPDPAKRDPRSFGNVSTTPRKLEWDMLPELSIALRFAESHLADLLKQHEFRVLEFEGFGKNFITSMGFSPDAFVQMAFQAAYYGLYGRLENTYEPAMTKFFLHGRTEAIRTVTNECANFVQTFWGENPAEQKVEALKKATEKHTATTKECSKGQGQDRHLYALYCLWQRSFEEGSSSSGNSVVSSSNGYSSPVENGSTIDSPKSPLSDDGVSSTTSYGLRAIRPAPPTPALFSDPGWDKINNTILSTSNCGNPCLRHFGFGPTSADGFGIGYIIKDDSISFCASSKHRQTARFLYTLESYLFEIRKLLRATNRTTASPRTSRAREMEIIAERLQGDHRRGRLVRGDPGAVRRGADTPTTDSGEIEDDGMGGYGFFDAGMLLHALKGLNTDRERNGEKPERRRFVGKKLRLNEY

SEQ ID NO: 148819 - DNA, 25 bp, Artificial sequence
  primer
atgtcaagcggcagtactattgttt

SEQ ID NO: 148820 - DNA, 25 bp, Artificial sequence
  primer
ttattgatctaaggtcgccaccttt

SEQ ID NO: 148821 - protein, 988 aa, Artificial sequence
  consensus sequence
  Variant (2)..(7): Xaa in position 2 to 7 is any amino acid
  Variant (10)..(10): Xaa in position 10 is any amino acid
  Variant (13)..(13): Xaa in position 13 is any amino acid
  Variant (15)..(15): Xaa in position 15 is any amino acid
  Variant (17)..(18): Xaa in position 17 to 18 is any amino acid
  Variant (20)..(26): Xaa in position 20 to 26 is any amino acid
  Variant (28)..(29): Xaa in position 28 to 29 is any amino acid
  Variant (31)..(67): Xaa in position 31 to 67 is any amino acid
  Variant (68)..(78): Xaa in position 68 to 78 is any or no amino acid
  Variant (80)..(96): Xaa in position 80 to 96 is any amino acid
  Variant (97)..(100): Xaa in position 97 to 100 is any or no amino acid
  Variant (102)..(103): Xaa in position 102 to 103 is any amino acid
  Variant (106)..(108): Xaa in position 106 to 108 is any amino acid
  Variant (110)..(111): Xaa in position 110 to 111 is any amino acid
  Variant (113)..(118): Xaa in position 113 to 118 is any amino acid
  Variant (119)..(122): Xaa in position 119 to 122 is any or no amino acid
  Variant (124)..(125): Xaa in position 124 to 125 is any amino acid
  Variant (127)..(129): Xaa in position 127 to 129 is any amino acid
  Variant (131)..(132): Xaa in position 131 to 132 is any amino acid
  Variant (134)..(136): Xaa in position 134 to 136 is any amino acid
  Variant (138)..(145): Xaa in position 138 to 145 is any amino acid
  Variant (147)..(147): Xaa in position 147 is any amino acid
  Variant (150)..(152): Xaa in position 150 to 152 is any amino acid
  Variant (153)..(154): Xaa in position 153 to 154 is any or no amino acid
  Variant (156)..(156): Xaa in position 156 is any amino acid
  Variant (158)..(159): Xaa in position 158 to 159 is any amino acid
  Variant (161)..(165): Xaa in position 161 to 165 is any amino acid
  Variant (170)..(170): Xaa in position 170 is any amino acid
  Variant (172)..(172): Xaa in position 172 is any amino acid
  Variant (174)..(187): Xaa in position 174 to 187 is any amino acid
  Variant (188)..(243): Xaa in position 188 to 243 is any or no amino acid
  Variant (246)..(251): Xaa in position 246 to 251 is any amino acid
  Variant (253)..(253): Xaa in position 253 is any amino acid
  Variant (255)..(257): Xaa in position 255 to 257 is any amino acid
  Variant (260)..(278): Xaa in position 260 to 278 is any amino acid
  Variant (279)..(289): Xaa in position 279 to 289 is any or no amino acid
  Variant (292)..(303): Xaa in position 292 to 303 is any amino acid
  Variant (304)..(307): Xaa in position 304 to 307 is any or no amino acid
  Variant (309)..(309): Xaa in position 309 is any amino acid
  Variant (311)..(317): Xaa in position 311 to 317 is any amino acid
  Variant (319)..(321): Xaa in position 319 to 321 is any amino acid
  Variant (323)..(324): Xaa in position 323 to 324 is any amino acid
  Variant (326)..(326): Xaa in position 326 is any amino acid
  Variant (328)..(332): Xaa in position 328 to 332 is any amino acid
  Variant (333)..(336): Xaa in position 333 to 336 is any or no amino acid
  Variant (338)..(340): Xaa in position 338 to 340 is any amino acid
  Variant (342)..(342): Xaa in position 342 is any amino acid
  Variant (346)..(348): Xaa in position 346 to 348 is any amino acid
  Variant (351)..(366): Xaa in position 351 to 366 is any amino acid
  Variant (367)..(391): Xaa in position 367 to 391 is any or no amino acid
  Variant (395)..(400): Xaa in position 395 to 400 is any amino acid
  Variant (401)..(402): Xaa in position 401 to 402 is any or no amino acid
  Variant (406)..(406): Xaa in position 406 is any amino acid
  Variant (408)..(409): Xaa in position 408 to 409 is any amino acid
  Variant (417)..(418): Xaa in position 417 to 418 is any amino acid
  Variant (420)..(424): Xaa in position 420 to 424 is any amino acid
  Variant (426)..(434): Xaa in position 426 to 434 is any amino acid
  Variant (437)..(439): Xaa in position 437 to 439 is any amino acid
  Variant (443)..(443): Xaa in position 443 is any amino acid
  Variant (445)..(446): Xaa in position 445 to 446 is any amino acid
  Variant (448)..(451): Xaa in position 448 to 451 is any amino acid
  Variant (453)..(454): Xaa in position 453 to 454 is any amino acid
  Variant (456)..(494): Xaa in position 456 to 494 is any amino acid
  Variant (495)..(512): Xaa in position 495 to 512 is any or no amino acid
  Variant (514)..(520): Xaa in position 514 to 520 is any amino acid
  Variant (522)..(523): Xaa in position 522 to 523 is any amino acid
  Variant (525)..(525): Xaa in position 525 is any amino acid
  Variant (528)..(552): Xaa in position 528 to 552 is any amino acid
  Variant (553)..(553): Xaa in position 553 is any or no amino acid
  Variant (555)..(557): Xaa in position 555 to 557 is any amino acid
  Variant (559)..(559): Xaa in position 559 is any amino acid
  Variant (561)..(561): Xaa in position 561 is any amino acid
  Variant (563)..(563): Xaa in position 563 is any amino acid
  Variant (565)..(565): Xaa in position 565 is any amino acid
  Variant (567)..(567): Xaa in position 567 is any amino acid
  Variant (571)..(576): Xaa in position 571 to 576 is any amino acid
  Variant (579)..(580): Xaa in position 579 to 580 is any amino acid
  Variant (582)..(583): Xaa in position 582 to 583 is any amino acid
  Variant (585)..(587): Xaa in position 585 to 587 is any amino acid
  Variant (589)..(591): Xaa in position 589 to 591 is any amino acid
  Variant (593)..(605): Xaa in position 593 to 605 is any amino acid
  Variant (607)..(614): Xaa in position 607 to 614 is any amino acid
  Variant (615)..(615): Xaa in position 615 is any or no amino acid
  Variant (617)..(626): Xaa in position 617 to 626 is any amino acid
  Variant (628)..(636): Xaa in position 628 to 636 is any amino acid
  Variant (638)..(638): Xaa in position 638 is any amino acid
  Variant (640)..(642): Xaa in position 640 to 642 is any amino acid
  Variant (644)..(645): Xaa in position 644 to 645 is any amino acid
  Variant (647)..(685): Xaa in position 647 to 685 is any amino acid
  Variant (686)..(728): Xaa in position 686 to 728 is any or no amino acid
  Variant (730)..(732): Xaa in position 730 to 732 is any amino acid
  Variant (737)..(741): Xaa in position 737 to 741 is any amino acid
  Variant (744)..(745): Xaa in position 744 to 745 is any amino acid
  Variant (747)..(750): Xaa in position 747 to 750 is any amino acid
  Variant (757)..(757): Xaa in position 757 is any amino acid
  Variant (759)..(768): Xaa in position 759 to 768 is any amino acid
  Variant (770)..(771): Xaa in position 770 to 771 is any amino acid
  Variant (774)..(775): Xaa in position 774 to 775 is any amino acid
  Variant (777)..(786): Xaa in position 777 to 786 is any amino acid
  Variant (788)..(858): Xaa in position 788 to 858 is any amino acid
  Variant (859)..(884): Xaa in position 859 to 884 is any or no amino acid
  Variant (886)..(914): Xaa in position 886 to 914 is any amino acid
  Variant (915)..(987): Xaa in position 915 to 987 is any or no amino acid
TXXXXXXLPXLPXPXLXXTXXXXXXXLXXLXXXXXXXXXXXXXXXXXXXXXXXXXXXXXXXXXXXXXXXXXXXXXXXXYXXXXXXXXXXXXXXXXXXXXXLXXNPXXXLXXDXXXXXXXXXXQXXRXXXLXXSXXXFXXXXXXXXLXPDXXXXXGXPXXMXXXXXLFGTXRXPXXXXXXXXXXXXXXXXXXXXXXXXXXXXXXXXXXXXXXXXXXXXXXXXXXXXXXXXXXXXXXXXXXXXXXHIXXXXXXQXYXXXVLXXXXXXXXXXXXXXXXXXXXXXXXXXXXXXIIXXXXXXXXXXXXXXXXGXLXXXXXXXWXXXRXXLXKXXXXXXXXXLXXXDXALFXXXLDXXXXXXXXXXXXXXXXXXXXXXXXXXXXXXXXXXXXXXXXXGTSXXXXXXXXQVGXCXXRWYDKLQXXVXXXXXAXXXXXXXXXDGXXXLRFXSXXYXXXXLXXAXXXXXXXXXXXXXXXXXXXXXXXXXXXXXXXXXXXXXXXXXXXXXXXXXXXXXXXXXLXXXXXXXEXXLXDLXXXXXXXXXXXXXXXXXXXXXXXXXXDXXXQXAXQXAXYXLYGXXXXXXEPXXTXXFXXXRXXXIXXXXXXXXXXXXXFXXXXXXXXXKXXXXXXXXXXHXXXXXXXXXGXGXXXHXXAXXXXXXXXXXXXXXXXXXXXXXXXXXXXXXXXXXXXXXXXXXXXXXXXXXXXXXXXXXXXXXXXXXXXXXXXXXXXXXXXXXLXXXNCGNXXXXXFGXXPXXXXGFGIGYXIXXXXXXXXXXSXXRQXXRXXXXXXXXXXEXXXXXXXXXXXXXXXXXXXXXXXXXXXXXXXXXXXXXXXXXXXXXXXXXXXXXXXXXXXXXXXXXXXXXXXXXXXXXXXXXXXXXXXXXXXXXXXXXFXXXXXXXXXXXXXXXXXXXXXXXXXXXXXXXXXXXXXXXXXXXXXXXXXXXXXXXXXXXXXXXXXXXXXXXXXXXXXXXXXXXXXXXXXXXXXXXXXXXXXXG

SEQ ID NO: 148822 - protein, 58 aa, Artificial sequence
  protein pattern
  Variant (3)..(3): Xaa in position 3 is Ser or Thr
  Variant (5)..(5): Xaa in position 5 is Thr or Val
  Variant (6)..(6): Xaa in position 6 is Asn or Ser
  Variant (14)..(14): Xaa in position 14 is any amino acid
  Variant (15)..(15): Xaa in position 15 is any or no amino acid
  Variant (17)..(21): Xaa in position 17 to 21 is any amino acid
  Variant (22)..(22): Xaa in position 22 is any or no amino acid
  Variant (24)..(24): Xaa in position 24 is Ala, Gly or Thr
  Variant (25)..(25): Xaa in position 25 is Ile or Val
  Variant (26)..(26): Xaa in position 26 is any amino acid
  Variant (27)..(27): Xaa in position 27 is Phe or Trp
  Variant (28)..(28): Xaa in position 28 is Asp or Glu
  Variant (29)..(30): Xaa in position 29 to 30 is any amino acid
  Variant (31)..(31): Xaa in position 31 is Gly, Ser or Thr
  Variant (32)..(32): Xaa in position 32 is Cys, Thr or Val
  Variant (35)..(35): Xaa in position 35 is any amino acid
  Variant (36)..(36): Xaa in position 36 is Ala, Thr or Val
  Variant (37)..(37): Xaa in position 37 is Ile or Val
  Variant (41)..(41): Xaa in position 41 is any amino acid
  Variant (43)..(43): Xaa in position 43 is Asp or Glu
  Variant (44)..(44): Xaa in position 44 is Ile or Val
  Variant (46)..(46): Xaa in position 46 is Ala or Thr
  Variant (47)..(47): Xaa in position 47 is Asp or Glu
  Variant (48)..(48): Xaa in position 48 is Ser or Thr
  Variant (49)..(49): Xaa in position 49 is Ile or Val
  Variant (51)..(51): Xaa in position 51 is Lys or Arg
  Variant (52)..(52): Xaa in position 52 is Phe or Leu
  Variant (54)..(54): Xaa in position 54 is Lys or Arg
  Variant (55)..(55): Xaa in position 55 is Asp, Glu, Asn or Thr
  Variant (56)..(56): Xaa in position 56 is Ile or Val
  Variant (57)..(57): Xaa in position 57 is any amino acid
  Variant (58)..(58): Xaa in position 58 is Ala or Gly
VGXCXXRWYDKLQXXVXXXXXXAXXXXXXXXXDGXXXLRFXSXXYXXXXLXXAXXXXX

SEQ ID NO: 148823 - protein, 54 aa, Artificial sequence
  protein pattern
  Variant (3)..(3): Xaa in position 3 is Ala, Pro or Ser
  Variant (4)..(4): Xaa in position 4 is Ala or Cys
  Variant (5)..(7): Xaa in position 5 to 7 is any amino acid
  Variant (10)..(10): Xaa in position 10 is Phe, Ile or Val
  Variant (11)..(11): Xaa in position 11 is Gly, Pro or Thr
  Variant (13)..(13): Xaa in position 13 is Ala or Thr
  Variant (14)..(14): Xaa in position 14 is Ala, Ser or Val
  Variant (15)..(15): Xaa in position 15 is Ala, Asp or Pro
  Variant (16)..(16): Xaa in position 16 is any amino acid
  Variant (23)..(23): Xaa in position 23 is Ile or Val
  Variant (25)..(25): Xaa in position 25 is His or Lys
  Variant (26)..(26): Xaa in position 26 is Asp, Gly or Asn
  Variant (27)..(27): Xaa in position 27 is Asp or Glu
  Variant (28)..(30): Xaa in position 28 to 30 is any amino acid
  Variant (31)..(31): Xaa in position 31 is Phe, Ile or Leu
  Variant (32)..(32): Xaa in position 32 is Cys or Thr
  Variant (33)..(33): Xaa in position 33 is Ala, Leu or Val
  Variant (34)..(34): Xaa in position 34 is Ser or Thr
  Variant (36)..(36): Xaa in position 36 is any amino acid
  Variant (37)..(37): Xaa in position 37 is Phe, His or Tyr
  Variant (40)..(40): Xaa in position 40 is Gly or Thr
  Variant (41)..(41): Xaa in position 41 is any amino acid
  Variant (43)..(43): Xaa in position 43 is Phe or Leu
  Variant (44)..(46): Xaa in position 44 to 46 is any amino acid
  Variant (47)..(47): Xaa in position 47 is Phe or Leu
  Variant (48)..(50): Xaa in position 48 to 50 is any amino acid
  Variant (51)..(51): Xaa in position 51 is Leu or Met
  Variant (52)..(52): Xaa in position 52 is any amino acid
  Variant (54)..(54): Xaa in position 54 is Phe or Ile
GNXXXXXFGXXPXXXXGFGIGYXIXXXXXXXXXXSXXRQXXRXXXXXXXXXXEX

SEQ ID NO: 148824 - protein, 55 aa, Artificial sequence
  protein pattern
  Variant (2)..(3): Xaa in position 2 to 3 is any amino acid
  Variant (4)..(6): Xaa in position 4 to 6 is any or no amino acid
  Variant (8)..(8): Xaa in position 8 is Ile, Met or Val
  Variant (10)..(10): Xaa in position 10 is Phe or Leu
  Variant (12)..(12): Xaa in position 12 is Ala or Ile
  Variant (14)..(14): Xaa in position 14 is any amino acid
  Variant (16)..(16): Xaa in position 16 is Ala, Gly or Thr
  Variant (20)..(20): Xaa in position 20 is any amino acid
  Variant (21)..(21): Xaa in position 21 is Leu or Met
  Variant (22)..(23): Xaa in position 22 to 23 is any amino acid
  Variant (24)..(24): Xaa in position 24 is Gly, Ser or Thr
  Variant (25)..(25): Xaa in position 25 is any amino acid
  Variant (28)..(28): Xaa in position 28 is Ala, Ile or Val
  Variant (29)..(29): Xaa in position 29 is any amino acid
  Variant (31)..(31): Xaa in position 31 is any amino acid
  Variant (32)..(32): Xaa in position 32 is any or no amino acid
  Variant (34)..(35): Xaa in position 34 to 35 is any amino acid
  Variant (36)..(36): Xaa in position 36 is Gly or Ser
  Variant (38)..(38): Xaa in position 38 is Ser or Thr
  Variant (39)..(39): Xaa in position 39 is Glu, Ser or Thr
  Variant (40)..(40): Xaa in position 40 is any amino acid
  Variant (42)..(44): Xaa in position 42 to 44 is any amino acid
  Variant (45)..(45): Xaa in position 45 is Asn, Ser or Thr
  Variant (46)..(46): Xaa in position 46 is Asp, Asn or Gln
  Variant (47)..(49): Xaa in position 47 to 49 is any amino acid
  Variant (50)..(50): Xaa in position 50 is Glu, Asn or Arg
  Variant (51)..(51): Xaa in position 51 is Phe or Leu
  Variant (52)..(52): Xaa in position 52 is Cys or Val
  Variant (53)..(54): Xaa in position 53 to 54 is any amino acid
SXXXXXQXAXQXAXYXLYGXXXXXXEPXXTXXFXXXRXXXIXXXXXXXXXXXXXF

SEQ ID NO: 148825 - protein, 50 aa, Artificial sequence
  protein pattern
  Variant (2)..(8): Xaa in position 2 to 8 is any amino acid
  Variant (9)..(11): Xaa in position 9 to 11 is any or no amino acid
  Variant (14)..(14): Xaa in position 14 is Leu, Met or Val
  Variant (15)..(15): Xaa in position 15 is Ile or Val
  Variant (16)..(16): Xaa in position 16 is Ile or Met
  Variant (17)..(17): Xaa in position 17 is Cys or Ser
  Variant (18)..(18): Xaa in position 18 is any amino acid
  Variant (19)..(19): Xaa in position 19 is Gly or Asn
  Variant (21)..(21): Xaa in position 21 is Phe or Tyr
  Variant (23)..(23): Xaa in position 23 is any amino acid
  Variant (24)..(24): Xaa in position 24 is Phe or Leu
  Variant (25)..(25): Xaa in position 25 is Asp or Glu
  Variant (28)..(28): Xaa in position 28 is Asp or Thr
  Variant (29)..(29): Xaa in position 29 is Glu or Ser
  Variant (30)..(30): Xaa in position 30 is any amino acid
  Variant (31)..(31): Xaa in position 31 is Asp, Asn or Ser
  Variant (32)..(36): Xaa in position 32 to 36 is any amino acid
  Variant (37)..(37): Xaa in position 37 is Ala, Asp or Glu
  Variant (38)..(43): Xaa in position 38 to 43 is any amino acid
  Variant (44)..(44): Xaa in position 44 is Phe, Ile or Leu
  Variant (45)..(49): Xaa in position 45 to 49 is any amino acid
  Variant (50)..(50): Xaa in position 50 is Asp or Glu
IXXXXXXXXXXHIXXXXXXQXYXXXVLXXXXXXXXXXXXXXXXXXXXXXX

SEQ ID NO: 148826 - protein, 36 aa, Artificial sequence
  protein pattern
  Variant (2)..(2): Xaa in position 2 is any amino acid
  Variant (3)..(3): Xaa in position 3 is Asp or Glu
  Variant (4)..(4): Xaa in position 4 is any amino acid
  Variant (5)..(5): Xaa in position 5 is Phe or Leu
  Variant (6)..(7): Xaa in position 6 to 7 is any amino acid
  Variant (8)..(8): Xaa in position 8 is Ala, Cys or Thr
  Variant (9)..(9): Xaa in position 9 is Cys or Thr
  Variant (10)..(10): Xaa in position 10 is Glu, Asn or Ser
  Variant (11)..(11): Xaa in position 11 is any amino acid
  Variant (13)..(13): Xaa in position 13 is Asn, Ser or Thr
  Variant (14)..(18): Xaa in position 14 to 18 is any amino acid
  Variant (19)..(19): Xaa in position 19 is Ala or Cys
  Variant (20)..(21): Xaa in position 20 to 21 is any amino acid
  Variant (23)..(23): Xaa in position 23 is any amino acid
  Variant (25)..(25): Xaa in position 25 is any amino acid
  Variant (26)..(26): Xaa in position 26 is Asp or Glu
  Variant (27)..(27): Xaa in position 27 is Lys or Arg
  Variant (29)..(29): Xaa in position 29 is Phe or Leu
  Variant (30)..(30): Xaa in position 30 is any amino acid
  Variant (32)..(34): Xaa in position 32 to 34 is any amino acid
  Variant (35)..(35): Xaa in position 35 is any or no amino acid
KXXXXXXXXXXHXXXXXXXXXGXGXXXHXXAXXXXL

SEQ ID NO: 148827 - protein, 21 aa, Artificial sequence
  protein pattern
  Variant (2)..(2): Xaa in position 2 is any amino acid
  Variant (4)..(5): Xaa in position 4 to 5 is any or no amino acid
  Variant (7)..(11): Xaa in position 7 to 11 is any amino acid
  Variant (12)..(13): Xaa in position 12 to 13 is any or no amino acid
  Variant (18)..(18): Xaa in position 18 is Ala or Thr
  Variant (20)..(20): Xaa in position 20 is any amino acid
GXPXXMXXXXXXXLFGTXRXP

SEQ ID NO: 148828 - protein, 29 aa, Artificial sequence
  protein pattern
  Variant (2)..(9): Xaa in position 2 to 9 is any amino acid
  Variant (10)..(15): Xaa in position 10 to 15 is any or no amino acid
  Variant (17)..(18): Xaa in position 17 to 18 is any amino acid
  Variant (19)..(19): Xaa in position 19 is Ile or Val
  Variant (21)..(21): Xaa in position 21 is Asn, Ser or Thr
  Variant (25)..(25): Xaa in position 25 is Ile or Val
  Variant (26)..(26): Xaa in position 26 is Leu or Val
  Variant (27)..(27): Xaa in position 27 is Cys or Val
RXXXXXXXXXXXXXXLXXXDXALFXXXLD

SEQ ID NO: 148829 - protein, 35 aa, Artificial sequence
  protein pattern
  Variant (2)..(7): Xaa in position 2 to 7 is any or no amino acid
  Variant (10)..(10): Xaa in position 10 is Lys or Arg
  Variant (13)..(13): Xaa in position 13 is Ile, Leu or Val
  Variant (15)..(15): Xaa in position 15 is any amino acid
  Variant (17)..(18): Xaa in position 17 to 18 is any amino acid
  Variant (20)..(24): Xaa in position 20 to 24 is any amino acid
  Variant (25)..(25): Xaa in position 25 is Asp, Glu or Asn
  Variant (26)..(26): Xaa in position 26 is Ala, Ser or Thr
  Variant (28)..(28): Xaa in position 28 is any amino acid
  Variant (29)..(29): Xaa in position 29 is Ala or Pro
  Variant (31)..(32): Xaa in position 31 to 32 is any amino acid
  Variant (33)..(33): Xaa in position 33 is Ala, Pro or Val
  Variant (34)..(34): Xaa in position 34 is Asp or Arg
  Variant (35)..(35): Xaa in position 35 is Glu or Gly
TXXXXXXLPXLPXPXLXXTXXXXXXXLXXLXXXXX

SEQ ID NO: 148830 - protein, 24 aa, Artificial sequence
  protein pattern
  Variant (2)..(2): Xaa in position 2 is Ala or Ser
  Variant (3)..(3): Xaa in position 3 is Ala or Gly
  Variant (4)..(4): Xaa in position 4 is Asn, Ser or Val
  Variant (6)..(6): Xaa in position 6 is Cys or Val
  Variant (7)..(7): Xaa in position 7 is any amino acid
  Variant (9)..(9): Xaa in position 9 is Ala or Ser
  Variant (10)..(10): Xaa in position 10 is Ala or Leu
  Variant (11)..(11): Xaa in position 11 is any amino acid
  Variant (13)..(13): Xaa in position 13 is Ile or Val
  Variant (14)..(14): Xaa in position 14 is any amino acid
  Variant (15)..(15): Xaa in position 15 is Ala or Ser
  Variant (16)..(16): Xaa in position 16 is Leu or Val
  Variant (17)..(17): Xaa in position 17 is Lys or Arg
  Variant (18)..(18): Xaa in position 18 is Asn, Gln or Arg
  Variant (19)..(19): Xaa in position 19 is Asp, Glu or Asn
  Variant (20)..(20): Xaa in position 20 is any amino acid
  Variant (22)..(22): Xaa in position 22 is Glu, Pro or Gln
RXXXLXXSXXXFXXXXXXXXLXPD

SEQ ID NO: 148831 - protein, 20 aa, Artificial sequence
  protein pattern
  Variant (2)..(4): Xaa in position 2 to 4 is any amino acid
  Variant (5)..(5): Xaa in position 5 is Ile, Leu or Val
  Variant (6)..(6): Xaa in position 6 is His or Arg
  Variant (7)..(7): Xaa in position 7 is Phe or Leu
  Variant (8)..(8): Xaa in position 8 is Ala or Ser
  Variant (10)..(10): Xaa in position 10 is Ser or Thr
  Variant (11)..(11): Xaa in position 11 is His, Lys or Arg
  Variant (13)..(13): Xaa in position 13 is Ala or Thr
  Variant (16)..(16): Xaa in position 16 is Ile or Leu
  Variant (17)..(18): Xaa in position 17 to 18 is any amino acid
  Variant (19)..(19): Xaa in position 19 is His or Tyr
  Variant (20)..(20): Xaa in position 20 is Asp or Glu
LXXXXXXXEXXLXDLXXXXX

SEQ ID NO: 148832 - protein, 18 aa, Artificial sequence
  protein pattern
  Variant (2)..(5): Xaa in position 2 to 5 is any amino acid
  Variant (6)..(6): Xaa in position 6 is any or no amino acid
  Variant (8)..(9): Xaa in position 8 to 9 is any or no amino acid
  Variant (11)..(11): Xaa in position 11 is Phe or Tyr
  Variant (12)..(12): Xaa in position 12 is Phe or Leu
  Variant (13)..(13): Xaa in position 13 is Ile, Leu or Val
  Variant (15)..(15): Xaa in position 15 is Ala or Glu
  Variant (16)..(16): Xaa in position 16 is Asp or Glu
  Variant (18)..(18): Xaa in position 18 is Ala or Pro
DXXXXXNXXPXXXLXXDX

SEQ ID NO: 148833 - DNA, 804 bp, Saccharomyces cerevisiae
  CDS (1)..(804)
atgtcaaccagtcgtgaagattctgtgtacctagccaagttggctgaacaggccgaacgttatgaagaaatggtcgaaaacatgaagactgttgcctcctctggccaagagttgtcggtcgaagagcgtaatttgttgtctgttgcttataagaacgttattggtgctcgtcgtgcctcttggagaattgtttcttctattgagcaaaaggaggagtccaaggagaagtccgaacaccaggtcgagttgatttgttcgtaccgttcgaagattgagaccgaactaactaagatctccgacgatattttgtccgtgctagactcccacttaattccatcagccaccactggcgagtccaaggttttctactataagatgaagggtgactaccaccgttatttggctgaattttctagtggcgatgctagagaaaaggccacaaacgcctctttagaagcatacaagaccgcttctgaaattgccaccacagagttacccccaactcacccaatccgtctaggtttggctcttaacttctctgtcttctattatgaaattcaaaactctccagacaaagcctgccatttggccaagcaagcttttgacgacgctattgctgagttggacactctgtctgaagaatcatacaaagatagcacacttatcatgcaactgctaagggacaatttaaccttatggacttcagacatgtccgagtccggtcaagctgaagaccaacaacaacaacaacaacatcagcaacagcagccacctgctgccgccgaaggtgaagcaccaaagtaa

SEQ ID NO: 148834 - protein, 267 aa, Saccharomyces cerevisiae
MSTSREDSVYLAKLAEQAERYEEMVENMKTVASSGQELSVEERNLLSVAYKNVIGARRASWRIVSSIEQKEESKEKSEHQVELICSYRSKIETELTKISDDILSVLDSHLIPSATTGESKVFYYKMKGDYHRYLAEFSSGDAREKATNASLEAYKTASEIATTELPPTHPIRLGLALNFSVFYYEIQNSPDKACHLAKQAFDDAIAELDTLSEESYKDSTLIMQLLRDNLTLWTSDMSESGQAEDQQQQQQHQQQQPPAAAEGEAPK

SEQ ID NO: 148835 - DNA, 1424 bp, Sorghum bicolor
  CDS (147)..(947)
gccggccgggccggggcacaaacgcgtcgtttccgcacgctccacaggggatcctctgcgccaccgcaaccgtgtaaccccggccgtgccgccgccggcgatcccgatccgccgacccgacccgtcccgtccccccgctcgcagccatgtcgccgtcggagccgacgcgggaggagagcgtgtacatggccaagctggcggagcaggcggagcggtacgaggagatggtcgagttcatggagcgcgtggcgcgctccgcgggcggcgcggggggcggggaggagctctccgtggaggagcgcaacctgctgtccgtcgcctacaagaacgtcatcggcgcccgcagggcctcgtggcggatcatctcctccatcgagcagaaggaggagggccgcgggaacgaggcgcacgccgcctccatccgcgcctaccgctccaagatcgaggccgagctcgcccgcatctgcgacggcatcctcgcgctgctcgactcccacctcgtcccgtccgccggcgccgccgagtccaaggtcttctacctcaagatgaagggcgactaccacaggtaccttgctgagttcaagtcaggtgcggagaggaaggatgctgcggagagcaccatgaatgcttacaaagctgctcaggatattgctcttgctgatttggcaccaacccaccccatcaggcttgggctggcactcaacttctcagtgttctactatgagattctgaactcccctgatcgcgcttgcaaccttgcaaagcaggcttttgatgaggcaatctctgagctagacagcctgggagaggagtcctacaaggacagcactctgatcatgcagctcctgcgtgacaacttgaccctatggacttcggacaccaacgaggatggcggcgacgagatcaaggaagctgctgccccgaaagagtccacagagggtcagtaagatggactcgatctcccgacctgatgcatttgctgatgttgggagaggggtgaccaggaccgctgtgcttgaattctgatagcttatcttctagtataccttgttgttgtcttccgtcatcacacgcaccggtgtatgcatgcgatggagctgctgccattgctgctgtttttaattaagcactctagatgtcgtcatgccgcgcgctttgttgtttcggttttttcaagtcgataaaatgatggctggatgctggttttcgtgctccaagccagccgccaccaaggagaaaagacctgctcatcttgtgttgcagctgttgtgttttagaatgaccccacgtacggagtatttgacttgacaggcctgctgccgagtggtattctgttatgatgatggcttttgcaaagctatttggcttaaatgtctcggaatgatctgaattggctccattggattttttttaagcattattgg

SEQ ID NO: 148836 - protein, 266 aa, Sorghum bicolor
MSPSEPTREESVYMAKLAEQAERYEEMVEFMERVARSAGGAGGGEELSVEERNLLSVAYKNVIGARRASWRIISSIEQKEEGRGNEAHAASIRAYRSKIEAELARICDGILALLDSHLVPSAGAAESKVFYLKMKGDYHRYLAEFKSGAERKDAAESTMNAYKAAQDIALADLAPTHPIRLGLALNFSVFYYEILNSPDRACNLAKQAFDEAISELDSLGEESYKDSTLIMQLLRDNLTLWTSDTNEDGGDEIKEAAAPKESTEGQ

SEQ ID NO: 148837 - DNA, 768 bp, Arabidopsis thaliana
  CDS (1)..(768)
atgtcgacaagggaagagaatgtttacatggcgaaattagccgaacaagctgaacgttacgaagaaatggttgaattcatggagaaagttgcgaaaactgttgatgttgaggaactttcagttgaagagaggaatcttctctctgttgcttacaagaacgtgattggagcgagaagagcttcgtggagaatcatttcttcgattgagcagaaagaagagagcaaagggaacgaagatcatgttgctattatcaaggattacagaggagagattgaatccgagcttagcaaaatctgtgatgggattttgaatgttcttgaagctcatcttattccttctgcttcaccagctgaatctaaagtgttttatcttaagatgaagggtgattatcataggtatcttgctgagtttaaggctggtgctgaaaggaaagaagctgctgaaagcactttggttgcttacaagtctgcttccgacattgccactgctgagttagctcctactcacccgataaggcttggtcttgcactcaacttctctgtgttttactatgaaatcctcaactcgcctgatcgtgcttgcagcctcgcaaagcaggcgtttgatgatgcaatcgctgagttagatacattgggtgaggaatcatacaaggacagtacactgattatgcagcttcttagagacaatctcactctctggacttcagatatgactgacgaagcaggagatgagattaaggaggcatcaaagcccgatggtgccgagtaa

SEQ ID NO: 148838 - protein, 255 aa, Arabidopsis thaliana
MSTREENVYMAKLAEQAERYEEMVEFMEKVAKTVDVEELSVEERNLLSVAYKNVIGARRASWRIISSIEQKEESKGNEDHVAIIKDYRGEIESELSKICDGILNVLEAHLIPSASPAESKVFYLKMKGDYHRYLAEFKAGAERKEAAESTLVAYKSASDIATAELAPTHPIRLGLALNFSVFYYEILNSPDRACSLAKQAFDDAIAELDTLGEESYKDSTLIMQLLRDNLTLWTSDMTDEAGDEIKEASKPDGAE

SEQ ID NO: 148839 - DNA, 990 bp, Arabidopsis thaliana
  CDS (7)..(813)
gcaaagatgtcttctgattcgtcccgggaagagaatgtgtacttggccaagttagccgagcaagctgagcgttacgaggaaatggttgagttcatggagaaagttgcaaagaccgtggagaccgaggaacttactgttgaagagaggaatctcttgtctgttgcttacaagaacgtgattggtgctaggagagcttcttggaggattatctcttccattgagcagaaggaagatagcaggggcaacagtgatcatgtttcgattatcaaggattacagaggcaagattgaaactgagctcagcaagatttgtgatggcattttgaaccttcttgaggctcatctcattcctgctgcttctttggctgagtccaaagttttttacctgaagatgaagggagattatcatcggtaccttgctgaattcaagactggtgctgagaggaaagaagctgctgagagcactcttgttgcctacaagtctgctcaggatattgctcttgctgatctggctcccactcacccaatcagactggggcttgctcttaacttctctgttttctactatgagattctcaactcatctgatcgtgcgtgtagtctcgcaaagcaggcttttgatgaggcaatctcggagctagacacattgggagaggaatcatacaaggacagtacattgatcatgcagcttctccgtgacaatctcaccctctggacttctgacctcaatgacgaagctggtgatgatatcaaggaagccccgaaagaggtgcagaaagttgatgaacaagcccaaccaccaccttcgcagtgataaaatcagatccatggaatgatttgcagacaaaaagatatatggcttggttctgtgtttttaaacagaaaaaaaccttgtagtttccttaaacatgggctgtagtttccttaaacatggatttgtagtagtaattgtagctgcatgatttggttatcgatggttaaaaaaaaaaaa

SEQ ID NO: 148840 - protein, 268 aa, Arabidopsis thaliana
MSSDSSREENVYLAKLAEQAERYEEMVEFMEKVAKTVETEELTVEERNLLSVAYKNVIGARRASWRIISSIEQKEDSRGNSDHVSIIKDYRGKIETELSKICDGILNLLEAHLIPAASLAESKVFYLKMKGDYHRYLAEFKTGAERKEAAESTLVAYKSAQDIALADLAPTHPIRLGLALNFSVFYYEILNSSDRACSLAKQAFDEAISELDTLGEESYKDSTLIMQLLRDNLTLWTSDLNDEAGDDIKEAPKEVQKVDEQAQPPPSQ

SEQ ID NO: 148841 - DNA, 1092 bp, Glycine max
  CDS (49)..(837)
attcggctcgagctctcatccagatcttgcaaaaaaaaaaaaaacacaatggcagcgagcgctcccactccacgcgaagagttcgtgtacatggcgaagctggcggagcaggccgagcgctacgaggagatggtggagttcatggagaaggtctccgcctccgccgagagcgaggagctgaccgtggaggagcgcaacctcctctccgtcgcctacaagaacgtaatcggcgctcgccgcgcctcctggcgcatcatctcctccattgagcagaaggaggagagccgcggcaacgaggaccacgtcgccgtcatccgtgactaccgctccaagatcgaggccgagctctccaacatctgcgacggaatcctcaagctcctcgacacgcgcctcgtcccctccgccgcctccggcgactccaaggtcttctacctcaagatgaagggagactaccacaggtacctcgctgagttcaagaccggcgccgaccgcaaggaagccgccgagagcacgctctccgcctacaaagccgctcaggacattgctaacaccgagctgcctccaactcaccctatcaggctgggtcttgctctgaatttctctgtgttttactatgagattcttaactctcctgatcgtgcatgcagccttgcaaaacaggcttttgatgaggctattgctgaattggatacgttgggagaggaatcatacaaggatagcactttgatcatgcaacttcttcgtgataaccttaccctctggacctctgacatgcaggatgatggtgcagatgaaattaaagaagccgcacccaaaggtgacggggaacaaaattaaacataccatacttctaattagtgattgaacttcccttgtgtaatgttttcaaagggagaaggtgttgaatgctaatctcggtgttactgagattttgggcattcatgttcttcgttatgaattgtggatgtactgggctattttagtttgtccttccattagtacgcgtttctgaactgcctattttcataatgacactgaaatttccattataatgctgtttagaatattaagatataaaaaaaaaaaaaaagg

SEQ ID NO: 148842 - protein, 262 aa, Glycine max
MAASAPTPREEFVYMAKLAEQAERYEEMVEFMEKVSASAESEELTVEERNLLSVAYKNVIGARRASWRIISSIEQKEESRGNEDHVAVIRDYRSKIEAELSNICDGILKLLDTRLVPSAASGDSKVFYLKMKGDYHRYLAEFKTGADRKEAAESTLSAYKAAQDIANTELPPTHPIRLGLALNFSVFYYEILNSPDRACSLAKQAFDEAIAELDTLGEESYKDSTLIMQLLRDNLTLWTSDMQDDGADEIKEAAPKGDGEQN

SEQ ID NO: 148843 - DNA, 1095 bp, Cucurbita maxima
  CDS (113)..(907)
  misc_feature (1029)..(1029): n is a, g, c or t
gttcccctcctccctctcttcctctctctattctcttcttcttcccattgtctctgcttctctctgttgtttttcgcattttttgttccgttcttttccgctctctcaaaccatgtcttccgccgagaaggagagagaaactcaggtctacatggccaagcttgctgagcaggccgagcgctatgacgaaatggttgagtatatgaagaatattgcaaagcttgacctcgaactaactgtagaggagaggaaccttctttctgtggggtacaaaaatgtgattggtgcacgacgagcctcttggcgcatcatgtcttcaattgagcagaaagaggagtctaaggggaatgagaacattgtaaaattgataaagagttaccgccagaaagtcgaggaggaactttcaaagatttgtggtgatattctctctatcatagacaagcatctaatccctcattcgtctgctgcagaagccactgtcttctactacaagatgaaaggtgattactatcgttatcttgctgagttcaagacagatcaagatagaaaagaggctgctgatcagtcgttgaagggatatgaggctgcctcaggcactgcgaataccgaactcccatcgacccacccaatccgtcttggtcttgctctcaacttttctgtcttctactatgagattatgaattctcctgagagagcttgccatttggctaaacaagcttttgatgaggcaattgcagagttggataccttgagtgaggaatcatacaaggacagcactctgatcatgcagctgttgagagacaatctcaccctctggacctccgatttgcctgaagatggcggtgacgaaaacttcaaagctgaggaatccaaacctgctgaacctgaggcccagcaaggcaaatgaaagattgatgggcaaactacacaaatgatgtgtgttgagatggaagaagaagtgtgttgttcctttttaaaagagaaattttaaaaaatagctctctctctctctctaaaacacagtgtggnggattggactgcacaataaaacaattcaattcattgcggcgttttttaaaaaaccaactaaaaaat

SEQ ID NO: 148844 - protein, 264 aa, Cucurbita maxima
MSSAEKERETQVYMAKLAEQAERYDEMVEYMKNIAKLDLELTVEERNLLSVGYKNVIGARRASWRIMSSIEQKEESKGNENIVKLIKSYRQKVEEELSKICGDILSIIDKHLIPHSSAAEATVFYYKMKGDYYRYLAEFKTDQDRKEAADQSLKGYEAASGTANTELPSTHPIRLGLALNFSVFYYEIMNSPERACHLAKQAFDEAIAELDTLSEESYKDSTLIMQLLRDNLTLWTSDLPEDGGDENFKAEESKPAEPEAQQGK

SEQ ID NO: 148845 - DNA, 1120 bp, Arabidopsis thaliana
  CDS (74)..(853)
cctctcgtctccctctggtttccgttgtttctctctctctctctctctctctccctccctgccggaacgaacgatgtcgtcggagaaggagcgcgatgctcacgtctacctggccaagctcgccgaacaggccgagcgttacgacgaaatggtagagtgcatgaagaaggttgctaagcttgatctagatctgaccgtggaggagaggaatctcctctctgttggctacaagaatgtgattggggctaggcgagcctcgtggcgcatcatgtcctcgattgagcagaaggaagagtccaaaggcaatgagcacaatgtcaagctggtccgggactaccgacagaaggtagaggaggagctctccaagatttgcagtgacattctgtccatcatagacaagcacctgattccttcctccaatgccggagaagccaccgttttctattacaaaatgaaaggggactattaccgctaccttgctgagttcaagattgaccaggaaaggaaagaggctgcagagcaatctctgaaaggctatgaggctgcttcaagcactgcaaacacagaactcccgtccacccacccaatccgtctaggccttgcgctcaacttctctgtattctactatgagataatgaattctccagaaagggcctgccatttagccaagcaagcttttgatgaagcaattgcagagttggacacgttgagcgaggagtcctacaaggacagcaccctaattatgcaactgttgagagataacctgactctctggacctctgatttgcctgaagatggaggtgaagatggcatcaaagttgaagaacctaaacctgccgaacccgagcactgaccaatgtctcagtgatcaagaaaccgggcattaaatgactaggctgcaccatggatgcagtctttcttcttctccagcagactaagcagacaatgcggaaacccgcaagcagttattccgggcccaaagcaagtggagtagattgcttcacctccgtttcggttgcatctcttgacattttctttttgctgttcatgtttttactcgacgcttgtcatgtaaacgcagactccggatttcaatactctggttatcttaaaaaaaaaa

SEQ ID NO: 148846 - protein, 259 aa, Arabidopsis thaliana
MSSEKERDAHVYLAKLAEQAERYDEMVECMKKVAKLDLDLTVEERNLLSVGYKNVIGARRASWRIMSSIEQKEESKGNEHNVKLVRDYRQKVEEELSKICSDILSIIDKHLIPSSNAGEATVFYYKMKGDYYRYLAEFKIDQERKEAAEQSLKGYEAASSTANTELPSTHPIRLGLALNFSVFYYEIMNSPERACHLAKQAFDEAIAELDTLSEESYKDSTLIMQLLRDNLTLWTSDLPEDGGEDGIKVEEPKPAEPEH

SEQ ID NO: 148847 - DNA, 795 bp, Eucalyptus grandis
  CDS (1)..(795)
atggcggcagctgattcttcacgcgaggaaaatgtgtacatggccaagttggctgaacaggccgagcgttatgaggaaatggtggaatttatggagaaagtggccaagacggttgatgtcgaggagcttactgttgaggaacgtaacctcctctccgtggcatacaagaatgtgattggtgccaggagggcttcatggaggatcatctcttccattgagcagaaggaagagagcaggggaaatgaggaccatgttgtgattatcaaggagtatagggggaagattgagactgagctcagcaagatctgtgatggcatcctcaatctccttgagtcgcatctcgttccatcagcctcatctgctgagtcaaaggtgttctatctgaagatgaagggtgattaccacaggtacttggctgagtttaaggcgggaactgagaggaaagaggctgctgagagcaccttgttggcttataaatctgctcaggatattgctttggctgagctggctcccactcaccctattaggcttggacttgctcttaacttctctgtgttctattatgaaattctcaactcacctgatcgtgcctgcagtctggctaaacaggcatttgatgaggctatctccgagctagatacattgggtgaggaatcatacaaggacagcacattgattatgcaacttctccgagataacctaacactctggacttccgatgtcacggatgaagctggagatgagatcaaggaatcttcaaaaagggagtctggtgaggggcagccaccacagtga

SEQ ID NO: 148848 - protein, 264 aa, Eucalyptus grandis
MAAADSSREENVYMAKLAEQAERYEEMVEFMEKVAKTVDVEELTVEERNLLSVAYKNVIGARRASWRIISSIEQKEESRGNEDHVVIIKEYRGKIETELSKICDGILNLLESHLVPSASSAESKVFYLKMKGDYHRYLAEFKAGTERKEAAESTLLAYKSAQDIALAELAPTHPIRLGLALNFSVFYYEILNSPDRACSLAKQAFDEAISELDTLGEESYKDSTLIMQLLRDNLTLWTSDVTDEAGDEIKESSKRESGEGQPPQ

SEQ ID NO: 148849 - DNA, 1167 bp, Eucalyptus grandis
  CDS (102)..(893)
gctctctctccctccctccctccctctctctctctctctctctctctctctctaaacccgacgcgattttcgaatccgacctccctcgacaaccctctccgatggccgccgccgcaccgccgccgtcctcgccgcgcgaggagtacgtgtacatggcgaagctggccgagcaggcggagcgctacgaggagatggtggagttcatggagaaggtgtcggccgccgccgccgacgccgaggagctcaccgtcgaggagcgcaacctcctgtcggtcgcctacaagaacgtgatcggggcccgccgcgcctcctggcgcatcatctcctccatcgagcagaaggaggagagccgcggcaacgaggaccacgtggccgcgatccgcgactaccgcgccaagatcgaggccgagctctccaagatctgcgacggcatcctcggcctcctcgacacccgcctcatccccgccgcctccgtcggcgactccaaggtcttctacctcaagatgaagggggattaccaccgctacttggccgagttcaaaaccggcaccgagcgcaaggaagccgccgagagcaccctcaccgcctacaaagccgctcaggatattgccaactctgaactggctcctactcacccaattcggcttgggctggctttgaacttctctgttttctactatgagattctcaactcccccgaccgtgcttgtggtctcgctaaacaagcctttgatgaagcaattgctgagttggacactcttggtgaggaatcctacaaggacagcactttgatcatgcagcttctcagagataacctgaccttgtggacatccgacatgcaggatgatggagtggatgagatcaaagaaacagccaaggctgatgagcaatagtgatgtctcagctgctcatcaatatccgtatagaagctaccctcttatctgttttttaactggggaagattgctggctactgattcatgtgcaattctgggttttaggctcgttgtctctataacagaattctggtgttgcttgtcttatcgaagtcttatgtatttccaaatcactcttatttctcttggattcttaatgcttcaatatctcaattgaacacgataaaaggcctccatgtctatgcagattgttgcctactttaaaaaaaaaa

SEQ ID NO: 148850 - protein, 263 aa, Eucalyptus grandis
MAAAAPPPSSPREEYVYMAKLAEQAERYEEMVEFMEKVSAAAADAEELTVEERNLLSVAYKNVIGARRASWRIISSIEQKEESRGNEDHVAAIRDYRAKIEAELSKICDGILGLLDTRLIPAASVGDSKVFYLKMKGDYHRYLAEFKTGTERKEAAESTLTAYKAAQDIANSELAPTHPIRLGLALNFSVFYYEILNSPDRACGLAKQAFDEAIAELDTLGEESYKDSTLIMQLLRDNLTLWTSDMQDDGVDEIKETAKADEQ

SEQ ID NO: 148851 - DNA, 965 bp, Eucalyptus grandis
  CDS (25)..(798)
ctctcgtaccccccaccaccaaccatgcctgaatcccgtgaagactctgtctacctcgccaagctcgctgagcaggctgagcgttacgaagaaatggtcgagaacatgaagcgcgtcgcctcgtccgaccaggagctcaccgtcgaagagcgcaatctcctttccgtcgcatacaagaacgtcatcggcgcccgccgtgcatcgtggagaatagtatcctccatcgagcagaaggaggagtcgaagggcaatgaggcccaggtctccatgatcaagggctacagggagaagatcgagcaggagcttgcgaaaatctgcgaggacatcctcgaggtgctcgacaagcacctgatcccctctgcggcctcgggcgagtccaaggtcttctaccacaagatgatgggcgactaccaccgctaccttgccgaattcgcaaccggcgataagcggaaggacagcgctgacaagtcgcttgaggcctacaaggccgcatctgacgtcgccgtcaccgagctccccccgacacaccccatccgtcttggtctcgccctgaacttctccgtgttctactacgaaatcctcaactcgcccgaccgtgcatgccacctcgcaaagcaagcattcgacgacgccatcgccgagctcgacacgttatcagaagagagctacaaagactcgaccctgatcatgcaactgctccgggataacctgacgctctggacctcggacatgcaagactctgctgacaagcccgccgacacaaaggaggaggctggggatgcaccggcagaggattagatattgcacgcgctcgtttcttgttacccctcacttcatgccatgctacatcccccccttccgtacacgtcctccaatccaatgttatttcttattagcgctaagaccttacctctggatcccttcgttgaaaataatgaatccctttctgctctataaaaaaaaaa

SEQ ID NO: 148852 - protein, 257 aa, Eucalyptus grandis
MPESREDSVYLAKLAEQAERYEEMVENMKRVASSDQELTVEERNLLSVAYKNVIGARRASWRIVSSIEQKEESKGNEAQVSMIKGYREKIEQELAKICEDILEVLDKHLIPSAASGESKVFYHKMMGDYHRYLAEFATGDKRKDSADKSLEAYKAASDVAVTELPPTHPIRLGLALNFSVFYYEILNSPDRACHLAKQAFDDAIAELDTLSEESYKDSTLIMQLLRDNLTLWTSDMQDSADKPADTKEEAGDAPAED

SEQ ID NO: 148853 - DNA, 1235 bp, Pinus radiata
  CDS (96)..(878)
agagtgctcttcttccactgctctctagctctcgtggcacacaaggaggagtttcagagaggccaggccagtctgcggatctgtgttcagacaagatgagtagcgacaaggagagggagaatcatgtttacatggccaaactcgctgagcaggccgagcgatacgatgaaatggttgaagccatgaagagggtcgcgaagctggacgtggagttaactgtagaagaaaggaatcttctctctgttgggtacaaaaatgtgattggggctcggcgagcttcctggagaataatgtcctctattgagcagaaggaggacgcgaagggcaatgatcataacgtgaaacgtatcaaagagtatagacagaaagttgaagcagagctttctaagatttgccatgatattatgaccataattgatgaacaccttattccttcctccaatattggcgaatctactgttttctactataaaatgaaaggagactactaccgttatctggctgaattcaaaacaggaaatgagagaaaagaagccgctgatcagtccttgaaagcttaccagacagcttcaagtactgcagagtcggatttagcgccaactcatccaatcagacttggattggccttgaacttttctgttttctattatgaaataatgaattcacctgaaagggcttgtcatctggccaagcaagcttttgatgaagctattgcagaacttgacaccttgagtgaagagtcatacaaagatagcactttaatcatgcagctcttgagggataatcttactttgtggacctctgatctccaggaagatggagttgaggatcagaccaagggggatgagcctgtagttgggatggatgaagagctttgagcaggtacatgtagaaacaaatgaagttgttagatatgggcttttatgtcggcctcaatgtactctagagtactcctttctgctctgcagctgcaatttacaaattcgctctatttatcttgttattgacacctggttttgtttataagttttagattggaacaaaagaccagtaggacattatggggtcttaacttggtgtgtataccatggctattaaatgcttcaatatgtaataggggcccagcactgcagtactgtgtagaatttagagtctttcgttgtgcattattatcgttttgaagattaatataggcttttgatggatgaagtggctttgttgccacaaaaaaaaaa

SEQ ID NO: 148854 - protein, 260 aa, Pinus radiata
MSSDKERENHVYMAKLAEQAERYDEMVEAMKRVAKLDVELTVEERNLLSVGYKNVIGARRASWRIMSSIEQKEDAKGNDHNVKRIKEYRQKVEAELSKICHDIMTIIDEHLIPSSNIGESTVFYYKMKGDYYRYLAEFKTGNERKEAADQSLKAYQTASSTAESDLAPTHPIRLGLALNFSVFYYEIMNSPERACHLAKQAFDEAIAELDTLSEESYKDSTLIMQLLRDNLTLWTSDLQEDGVEDQTKGDEPVVGMDEEL

SEQ ID NO: 148855 - DNA, 1384 bp, Pinus radiata
  CDS (268)..(1047)
cagagctcctataacccccaattgtgtctccatttttgcgtgcgaaccatggctcaagctcccaaaaatctgtgtatcattctgttcttcatcacaagttccttgtactgcccttcattgtcttgcgctgctgctttcacagaaaatccattaacagttcttggttctgccagtttagtgtgtttgtgcattgcagcggccgtttctttgaagatccagaggtgaagttgggtttttattatttgtgtacaaatggcggcagcggcgatggtggagtcatcgcgggaggagaatgtctacatggcgaagctggccgagcaggcggagcgctacgaagagatggtggagttcatggagaaagtgacaaaaggcgtggaggtggaggagctcacagtggaggagcggaacctgctatctgtagcctacaaaaacgtgatcggtgcccgcagggcctcctggaggattatctcctccatcgagcagaaggaggagagcaggggcaatgatgagcacgtggtcaccatcagggagtacagagccaaggtggaagcagagctttccaagatctgtgagggcattctccgcctcctcgactcccacctcatcccttcttccaccgctgcggagtccaaggttttctatctcaagatgaagggcgattaccatcgataccttgccgagtttaagacaggcgccgagaggaaggaggccgctgagaacactctgcttgcttacaagtctgcgcaggatattgctgcggcagagctggctccaacgcatcctattaggctagggctggctcttaacttctctgtattttactatgagattttgaattcgccagacagagcctgtaatctcgcaaaacaggcatttgatgaggcaattgcggagttagataccttaggtgaagattcttacaaggacagcactctcatcatgcagctccttcgtgacaatttgacattgtggacctcagacatgcaggaggatgctggggaagagatcaaagagacttctaagcgtgaggacggggaggagcaatagtgaaatgtgataatcttatagtgtattaggattaggattagattaccaggctttcctgcattgtttggtaaaggaggcctatgtgcacgattgtgtttattagatctcatgctctgcagcatttagttgctgtgggtagcatattcttagtcatattttgttggctgcgtttatgttggcattttatatcatctatttgcgaatggttggagacagtggcttggtactgtaatatcagattggtggagtctatcaacaaatctgtaggcccattctgcttttgtgttcaataatattttttattgtcttgatttaaaaaaaaaaaaaaaaaaaaaaa

SEQ ID NO: 148856 - protein, 259 aa, Pinus radiata
MVESSREENVYMAKLAEQAERYEEMVEFMEKVTKGVEVEELTVEERNLLSVAYKNVIGARRASWRIISSIEQKEESRGNDEHVVTIREYRAKVEAELSKICEGILRLLDSHLIPSSTAAESKVFYLKMKGDYHRYLAEFKTGAERKEAAENTLLAYKSAQDIAAAELAPTHPIRLGLALNFSVFYYEILNSPDRACNLAKQAFDEAIAELDTLGEDSYKDSTLIMQLLRDNLTLWTSDMQEDAGEEIKETSKREDGEEQ

SEQ ID NO: 148857 - DNA, 1476 bp, Pinus radiata
  CDS (164)..(940)
cgcctcggagggtttctttgcgcgaagatcacaggtcagaatagccatttggtgaagggaatctgtggtttcttatttcagagcactggtatcagtgttagtcgttcggttcacgtcattttgagcccaaatttgaggtctttctgtgcggattcggtaaaaaatgacggagaaggagagagaaaatcatgtttacatggccaagcttgccgagcaagccgagcgatacgatgagatggtggattcaatgaagaaagttgctaagttggatgtggagcttactgtggaagagagaaacttgctctcagttggctacaagaatgtcattggtgcaagaagagcttcatggcggataatgtcttccattgagcagaaagaagaggcaaagggtaacgagctcaatgtcaaacggatcaaggagtaccgtcacaaagttgaagatgaactcagtaggatttgcaacgacattcttacaataattgatgaacatctcattccctcttctagcactggcgagtctacagttttctactacaagatgaagggggattattatcggtatcttgcagaatttaagacaggaaatgaaaggaaagaagctgcagaccaatctctcaaagcttatcaggctgcttcaaacacagcgactacagatttggcacctacccacccaatcaggcttgggctggcattgaacttctcagttttctactatgaaattttgaactcgcctgagagggcctgccacttggccaaacaagcttttgatgaagcaattgcggagcttgacactctcagtgaagagtcatacaaggacagcacattaatcatgcaactactgagagacaatcttactctctggacttcagatttacaagaagaaggaggggaagatcaacccaaaggtgaagaggataagatagaagaaattgagcactagtttcagaagggcagtgtaatgactactttcagcataacaactgccatggcagttgtatgctggaaggtagtttatatttgctatgtttcttcattcctccgtgctggtcgaggcgctctgcatagactaaattgtattcatgattcctgttgccagtttttattttttattttggtgaagtgggtttaagttaggttggaactttgaagtacattagtgttctgcactttatatcctaagttggaggtcttttgaatttttagttccacatgcatggaatgttgatgcacgattttctgtttcgtcactattaagttgataggaagttttaatttgtaagccatgagttggctgattgggctcaaattttggacttgcctgctttatttgagcagaagttgtggacgtgtctctaaatgtaagaggtgaatgtatttgacactggaccgtgtggatgatgcagattactaaaaaccttgcgttatgaaagatgctacctataaaatgtggtttggctgttggttttaaaaaaaaaa

SEQ ID NO: 148858 - protein, 258 aa, Pinus radiata
MTEKERENHVYMAKLAEQAERYDEMVDSMKKVAKLDVELTVEERNLLSVGYKNVIGARRASWRIMSSIEQKEEAKGNELNVKRIKEYRHKVEDELSRICNDILTIIDEHLIPSSSTGESTVFYYKMKGDYYRYLAEFKTGNERKEAADQSLKAYQAASNTATTDLAPTHPIRLGLALNFSVFYYEILNSPERACHLAKQAFDEAIAELDTLSEESYKDSTLIMQLLRDNLTLWTSDLQEEGGEDQPKGEEDKIEEIEH

SEQ ID NO: 148859 - DNA, 1144 bp, Pinus radiata
  CDS (86)..(859)
ccttctcaaccacaaccatcatcccctcgcactctccacatcatctccagtccccatttcctgtttctattcttctatattaactatgcctgaaactcgtgaagattccgtctacctcgccaagctcgctgagcaggctgagcgttatgaagagatggttgagaacatgaagcgtgtggcttcttctgaccaagaactcactgtcgaggaacgcaatctgctgtctgtcgcgtacaagaacgttattggtgctcgccgcgcgtcctggagaatcgtttcatcaattgagcagaaggaggaatctaaaggcaatgaggctcaggtgtcaatgatcaaaggatacagggagaaaattgagagtgaactcgccaaaatctgcgaagatattctcgatgtcctcgataagcacctcattccctcagctgcctctggggagtccaaggtcttctaccacaagatgatgggcgactaccaccgctacctcgcagaatttgccaccggtgataagcggaaagatagcgccgacaagtccctcgaagcctacaaggccgcatcggaggttgccgtcaccgaattaccacctacacatcccattcgtcttggtctcgcactgaatttctcggtattctactatgaaattctcaatagtcccgaccgtgcatgccacctggccaaacaagcgttcgacgatgctattgccgagcttgatacgctctcggaggaaagctacaaggattccactctcatcatgcaattgcttagggataacttgacgctctggacttcggacatgcaagactctgccgataagcccgccgactcgaaggatgagcccgctgagacacctgcagaggattagatgtttccgtatgcatttattgtctcggaagtcttgttatttctaggcttttgttcttcaaattttaatcaatcatttgttgaatttgtcgttcgtctgtttgcgctctcattatatctctgcatttgtgtcatcctccattcctctcatcacgtccatgtgtccccttcccttattactccctatcccttcccctccagtattatgctcgaaatggtttcttatactccttaccttcaatgatgatagaggcggttcgagagcaaaaaaaaaaaaaaaaaaaaa

SEQ ID NO: 148860 - protein, 257 aa, Pinus radiata
MPETREDSVYLAKLAEQAERYEEMVENMKRVASSDQELTVEERNLLSVAYKNVIGARRASWRIVSSIEQKEESKGNEAQVSMIKGYREKIESELAKICEDILDVLDKHLIPSAASGESKVFYHKMMGDYHRYLAEFATGDKRKDSADKSLEAYKAASEVAVTELPPTHPIRLGLALNFSVFYYEILNSPDRACHLAKQAFDDAIAELDTLSEESYKDSTLIMQLLRDNLTLWTSDMQDSADKPADSKDEPAETPAED

SEQ ID NO: 148861 - DNA, 1508 bp, Pinus radiata
  CDS (203)..(1048)
cccactcccgctcaatccgacaacttgttttgatagtccatgtcacgtgcgggctgtgttttcctgagcgacccaattctccctacaagtcccgcccacgactatctttgctttcaacgaccccccttcgacgccaacattactcgaacttgctagaataccctctttccaacatctatcacaatcttccacaatagaaatcatggcaaacgaacgcgagagcaaaaccttcctcgcccggctgtgcgaacaggctgagcgctacgatgagatggtcacatacatgaaggaagtcgcaaagatcggcggtgaattgaccgtggacgagcgcaaccttctctcagtcgcatacaagaacgtagttggcacacgacgtgcgtcgtggcgcatcatctcctcgatcgagcagaaagaggagtcaaaaggcaccgataagcacgtcggcaccatccgcgattaccgtcagaagatcgagacggagctcgagaaggtgtgccaggatgtcctcgacgttcttgatgagagcttgattcccaaagccgagactggcgagtctaaagtattttaccacaagatgaagggcgactaccaccgctatctcgccgagtttgcctcgggagagaagcgcaagaatgctgcgaccgccgcccatgaggcctacaagagcgccaccgatgttgcgcagactgagctcactcccactcaccccatccgcctcggtctggccctgaacttttctgtgttctactacgagatcctcaactcacccgaccgcgcttgccatcttgcaaagcaggcattcgacgacgccattgccgagctcgactctttgtctgaggagtcttaccgggacagcaccctcatcatgcagcttctgcgtgataatctcaccctctggacatcttctgatggtgctgaaccagctgagactggtgaggcaccaaagaccgaagaggccaagccagctgagactgccgaagccgcacccgccgagcccgagagcaagccagccaaggaggaggagcccgccgccccagctgcagcttaaattatcagctgacatggacaatgcatgctgttgcgaaccgattgaagcttggtccatcatgcctcgagactgcccaatctatgttctcgagactcagtcgcaatggacatttcttcagttcttcgggtttatgcaggttaacgggttgatgcggtgttctgcttcttatcatcatgcgaaaactggttcattatagcaagcgggtttacgagttctcacacgtgtcatgtcttatgggccccttcttcccttatctctccgatcctcctttgctttcctgctttatagccccggtatacttttgttttgtgcaatctttctggtgggatacgctggtggatggatgttttggcagttgtaaagtgagtaggtcttctatggacttactcgcaagcagctcgaccgtgatatctgggtataactaactagctataaattgatcatattcaatttgaaaaaa

SEQ ID NO: 148862 - protein, 281 aa, Pinus radiata
MANERESKTFLARLCEQAERYDEMVTYMKEVAKIGGELTVDERNLLSVAYKNVVGTRRASWRIISSIEQKEESKGTDKHVGTIRDYRQKIETELEKVCQDVLDVLDESLIPKAETGESKVFYHKMKGDYHRYLAEFASGEKRKNAATAAHEAYKSATDVAQTELTPTHPIRLGLALNFSVFYYEILNSPDRACHLAKQAFDDAIAELDSLSEESYRDSTLIMQLLRDNLTLWTSSDGAEPAETGEAPKTEEAKPAETAEAAPAEPESKPAKEEEPAAPAAA

SEQ ID NO: 148863 - DNA, 765 bp, Arabidopsis thaliana
  CDS (1)..(765)
atgtcgacaagggaagagaatgtttacatggcgaaattagccgaacaagctgaacgttacgaagaaatggttgaattcatggagaaagttgcgaaaactgttgatgttgaggaactttcagttgaagagaggaatcttctctctgttgcttacaagaacgtgattggagcgagaagagcttcgtggagaatcatttcttcgattgagcagaaagaagagagcaaagggaacgaagatcatgttgctattatcaaggattacagaggaaagattgaatccgagcttagcaaaatctgtgatgggattttgaatgttcttgaagctcatcttattccttctgcttcaccagctgaatctaaagtgttttatcttaagatgaagggtgattatcataggtatcttgctgagtttaaggctggtgctgaaaggaaagaagctgctgaaagcactttggttgcttacaagtctgcttccgacattgccactgctgagttagctcctactcacccgataaggcttggtcttgcactcaacttctctgtgttttactatgaaatcctcaactcgcctgatcgtgcttgcagcctcgcaaagcaggcgtttgatgatgcaatcgctgagttagatacattgggtgaggaatcatacaaggacagtacactgattatgcagcttcttagagacaatctcactctctggacttcagatatgactgtaacaggagatgagattaaggaggcatcaaagcccgatggtgccgagtaa

SEQ ID NO: 148864 - protein, 254 aa, Arabidopsis thaliana
MSTREENVYMAKLAEQAERYEEMVEFMEKVAKTVDVEELSVEERNLLSVAYKNVIGARRASWRIISSIEQKEESKGNEDHVAIIKDYRGKIESELSKICDGILNVLEAHLIPSASPAESKVFYLKMKGDYHRYLAEFKAGAERKEAAESTLVAYKSASDIATAELAPTHPIRLGLALNFSVFYYEILNSPDRACSLAKQAFDDAIAELDTLGEESYKDSTLIMQLLRDNLTLWTSDMTVTGDEIKEASKPDGAE

SEQ ID NO: 148865 - DNA, 777 bp, Encephalitozoon cuniculi GB-M1
  CDS (1)..(777)
atggcatccaagcagtacgaggaggcattgcaaaaggcaaatcttagcgacatggccgagaggtatgacgatatggcaaaggagatgaggcttgcagtgacacttgcacacgaggacaagcacatcctcaacgtgatggcaagaaaccttttttccgttgcatacaagaacctggtgagctcgagaagatccagttggagaatgctgtgctccgagaggcaaaaactcgagggaaaggaccccagtgtggtccatgtgatcaacgaaaagataaaggttgttgaggaggagcttttgaggttctgcgacgaggtcctggacatcatcacgacatacatactgagcctggaggaggctcagaagaatatcgagtacaacattttcttcttgaagatgaagggagactactacagatacaaggcagaggttgtcacgggtcctgagcactctgaggtatcgaagcatgctgccgagtcgtacaaggaagccaccgagaaggcaaagaccctcccccccacaaaccctataaagctggggcttgcgctgaactactccgtattccactacgagatcctcaacgactcggaaaaggcctgctcaatagccaagggggcttttgacgaggctatcaaggagttggacactctttctgaagagcactacagagactcaaccctgataatgcagcttcttagggacaacctcactctctggacttctcgagaagaggggaatgtaatgggtgatgaggggaagggagatcctgatgaaaattaa

SEQ ID NO: 148866 - protein, 258 aa, Encephalitozoon cuniculi GB-M1
MASKQYEEALQKANLSDMAERYDDMAKEMRLAVTLAHEDKHILNVMARNLFSVAYKNLVSSRRSSWRMLCSERQKLEGKDPSVVHVINEKIKVVEEELLRFCDEVLDIITTYILSLEEAQKNIEYNIFFLKMKGDYYRYKAEVVTGPEHSEVSKHAAESYKEATEKAKTLPPTNPIKLGLALNYSVFHYEILNDSEKACSIAKGAFDEAIKELDTLSEEHYRDSTLIMQLLRDNLTLWTSREEGNVMGDEGKGDPDEN

SEQ ID NO: 148867 - DNA, 819 bp, Magnaporthe grisea 70-15
  CDS (1)..(819)
atgggtcacgaagatgccgtttacctggccaagctcgccgagcaggctgagcgctacgaggagatggtcgagaacatgaagatcgtcgcctccgaggacagggacttgaccgttgaggagcgcaaccttctctcggtcgcctacaagaacgtcattggtgcccgcagggcctcgtggaggattgttacctcgattgagcaaaaggaggagtccaagggcaactcgtcgcaggtcggcctcatcaaggagtaccgcaccaagatcgaggccgagctggccaagatctgcgaggacatcctgtcggtcctcgacaagcacctcatcccctcggccaagagcggcgagtccaaggtcttttaccacaagatgaagggcgactaccaccgttacctcgctgagttcgccattggcgacaagcgcaaggactcggcagacaagtccctcgaggcttacaaggctgctaccgaggttgcccagaccgagctgcctcccacgcatcccattcgccttggtcttgctctgaacttctccgtcttctactacgagatcctcaacgctcccgaccaggcctgccatctggccaagcaggcctttgacgatgctattgctgagctggacaccctgagcgaggagagctacaaggactcaactctgatcatgcagctgttgcgtgacaaccttactctctggacttcgtcggaggctgagccgacagcttcaacgggacacgctgaggctcctgctgcagcggctgccacagaggagaagcccgccgaggctgctgctgccgccgaggaggcgccgaagcctgctgagtaa

SEQ ID NO: 148868 - protein, 272 aa, Magnaporthe grisea 70-15
MGHEDAVYLAKLAEQAERYEEMVENMKIVASEDRDLTVEERNLLSVAYKNVIGARRASWRIVTSIEQKEESKGNSSQVGLIKEYRTKIEAELAKICEDILSVLDKHLIPSAKSGESKVFYHKMKGDYHRYLAEFAIGDKRKDSADKSLEAYKAATEVAQTELPPTHPIRLGLALNFSVFYYEILNAPDQACHLAKQAFDDAIAELDTLSEESYKDSTLIMQLLRDNLTLWTSSEAEPTASTGHAEAPAAAAATEEKPAEAAAAAEEAPKPAE

SEQ ID NO: 148869 - DNA, 819 bp, Gibberella zeae PH-1
  CDS (1)..(819)
atgggtcacgaagatgctgtctaccttgccaagctcgctgagcaggccgagcgatatgaggagatggttgagaacatgaagattgtcgccggtgaggaccgagatctcaccgtcgaggagcgaaaccttctctctgttgcctacaagaacgtcatcggcgcccgccgtgcctcctggcgcatagtcacctccatcgagcagaaggaggagtcaaagggcaactctagccaggttaccctcatcaaggagtaccgacagaagattgaggccgagcttgccaagatctgcgaagatatcctcgaggtccttgaccagcacctgatcccctctgccaagtctggcgagtccaaggttttctaccacaagatgaagggtgactaccaccgttacctcgccgagttcgccattggcgaccgtcgcaaggactctgccgacaagtccctcgaggcctacaaggctgctactgaggttgctcagaccgagcttcctcccacccaccccatccgccttggtctcgccctcaacttctccgttttctactacgagatcctcaacgctcctgaccaggcttgccacctggctaagcaggccttcgatgatgccatcgctgagcttgacactctgagcgaggagagctacaaggactctacactgatcatgcaactgctccgagacaacctcactctctggacctcttccgaggccgagacctccgctgctggtcaggctgaggctcccaaggaggatgcccctgctgctgccaccgctgaggacgcccctgctgcccctgccgcggctgaggagcccaaggctgagtaa

SEQ ID NO: 148870 - protein, 272 aa, Gibberella zeae PH-1
MGHEDAVYLAKLAEQAERYEEMVENMKIVAGEDRDLTVEERNLLSVAYKNVIGARRASWRIVTSIEQKEESKGNSSQVTLIKEYRQKIEAELAKICEDILEVLDQHLIPSAKSGESKVFYHKMKGDYHRYLAEFAIGDRRKDSADKSLEAYKAATEVAQTELPPTHPIRLGLALNFSVFYYEILNAPDQACHLAKQAFDDAIAELDTLSEESYKDSTLIMQLLRDNLTLWTSSEAETSAAGQAEAPKEDAPAAATAEDAPAAPAAAEEPKAE

SEQ ID NO: 148871 - DNA, 750 bp, Candida glabrata CBS 138
  CDS (1)..(750)
atgtctttgagccgtgaggatagtgtgtttttgaccaagttggctgagcaagccgagagatatgaggagatggtggagaacatgaaggatgttgcctctgctggacaggagttgagtgtcgaggagagaaacttgttgtctgttgcatacaagaacgttattggtgctcgcagagcttcctggagaattgtctcttccattgagcagaaagaagagagcaaagagaactcggaacaccaaatcaaattgatcaaggactaccgtgccaagatcgaggcagagctaactaagatctccgacgacatcttgtcggtgctagataagcacttgatcccatccgcctcctccggcgagtctaaggtcttctactacaagatgaaaggtgactaccaccgttacttggctgagttctcccaaggcgacgtgagagaaaacgctaccaaggcctccctagacgcttaccaaaaggcctccgaaatcgccaccactgaattgccaccaacccaccctatcagattgggtttggctctaaatttctccgtgttctactacgagatccaaaactctccagacaaggcttgccatttggccaagcaggctttcgacgacgctatcgcagaattggatactttgtctgaagaatcctacaaggacagtactttgatcatgcaattactaagagataacttgaccttgtggacttctgacatgtctgaggccgatgaccaaaagaatgaagaatctaagtga

SEQ ID NO: 148872 - protein, 249 aa, Candida glabrata CBS 138
MSLSREDSVFLTKLAEQAERYEEMVENMKDVASAGQELSVEERNLLSVAYKNVIGARRASWRIVSSIEQKEESKENSEHQIKLIKDYRAKIEAELTKISDDILSVLDKHLIPSASSGESKVFYYKMKGDYHRYLAEFSQGDVRENATKASLDAYQKASEIATTELPPTHPIRLGLALNFSVFYYEIQNSPDKACHLAKQAFDDAIAELDTLSEESYKDSTLIMQLLRDNLTLWTSDMSEADDQKNEESK

SEQ ID NO: 148873 - DNA, 753 bp, Candida glabrata CBS 138
  CDS (1)..(753)
atgtcgccaagtcgtgaggatagtgtgtatttggccaagctggctgagcaggccgagaggtacgaggagatggttgagtctatgaaggaggtggcctcgagtggtcaggagttgagtgttgaggagcgtaacctgctgtcggttgcttataagaatgttattggtgcgcgcagagcgtcctggaggattatctcctcgatcgagcagaaggaggagagcaaagagaaggctgagcaccaggttgagttgatccgcacgtaccgtggcaagatcgagaccgagctgacgaagatctctgacgacatactgtctgtgctagactcccacctgatcccatccgccaccagcggcgagtccaaggttttctactacaagatgaagggtgactaccaccgttacttggctgagttctccagtggtgatgtgagggacaaggccaccgaggcctccctagaggcttacaagaccgcctcagagatcgccaccacagagctgccaccaacacatcctatcagattgggtctggctctgaacttctccgtgttctactacgagatccaaaactccccagacaaggcttgccacttggctaagcaagctttcgacgacgccatcgccgagctggatacattgtccgaggaatcctacaaggacagtactctaatcatgcaattgctaagagataacttgaccttgtggacttccgacatgtctgaagctcaagatgaacaaaatgacgaaccaccaaaatga

SEQ ID NO: 148874 - protein, 250 aa, Candida glabrata CBS 138
MSPSREDSVYLAKLAEQAERYEEMVESMKEVASSGQELSVEERNLLSVAYKNVIGARRASWRIISSIEQKEESKEKAEHQVELIRTYRGKIETELTKISDDILSVLDSHLIPSATSGESKVFYYKMKGDYHRYLAEFSSGDVRDKATEASLEAYKTASEIATTELPPTHPIRLGLALNFSVFYYEIQNSPDKACHLAKQAFDDAIAELDTLSEESYKDSTLIMQLLRDNLTLWTSDMSEAQDEQNDEPPK

SEQ ID NO: 148875 - DNA, 753 bp, Kluyveromyces lactis NRRL Y-1140
  CDS (1)..(753)
atgtctttaagtcgtgaagattcagtgtatttagccaaattggctgaacaagcagaacgttatgaagaaatggtggaaaacatgaagaatgttgcatcttctggtcaagaattgtccgttgaagaaagaaacttgttatctgttgcttacaagaacgttattggtgctcgtcgtgcatcctggagaatcgtttcctccattgaacaaaaagaggaagctaaggaaaaatctgaacatcaagttcaattgatcagaacttaccgttcgaagatcgaatccgaattgactaagatctgtgatgatatcttgtcagtgttagatactcatttgattccaagtgctacaaccggtgaatccaaggtattctactataagatgaagggtgactaccaccgttatctggccgaattctcttccggtgacgttagagaaagtgctactcaagcctctttggaagcctacaaggaagcatccgatatcgccaccacagaattgccaccaactcatcctatcagattgggtttggccttaaacttctccgtgttctattacgaaattcaaaattccccagacaaggcttgtcatttggctaagcaagccttcgatgacgctattgctgaactagataccttatccgaagaatcatacaaggacagtactttgatcatgcaattgttgagagataacttgaccttgtggacttctgatatgtctgagactggtcaagaagaccaacctgctgaaggtgcttaa

SEQ ID NO: 148876 - protein, 250 aa, Kluyveromyces lactis NRRL Y-1140
MSLSREDSVYLAKLAEQAERYEEMVENMKNVASSGQELSVEERNLLSVAYKNVIGARRASWRIVSSIEQKEEAKEKSEHQVQLIRTYRSKIESELTKICDDILSVLDTHLIPSATTGESKVFYYKMKGDYHRYLAEFSSGDVRESATQASLEAYKEASDIATTELPPTHPIRLGLALNFSVFYYEIQNSPDKACHLAKQAFDDAIAELDTLSEESYKDSTLIMQLLRDNLTLWTSDMSETGQEDQPAEGA

SEQ ID NO: 148877 - DNA, 768 bp, Debaryomyces hansenii CBS767
  CDS (1)..(768)
atgcctaccttaagagaagattctgtttatcttgccaaattagccgaacaagctgaacgttatgaagaaatggtcgaaaacatgaagaccgttgcttcgtctgggcaagaattgtccgttgaagaacgtaacttgttatcggttgcttacaagaatgttattggtgcacgccgtgcatcatggagaattgtgtcgtcgatcgagcaaaaggaagaagctaagggcaatgaaagccaagtttcgttaattcgcgactaccgttctaagattgaggctgaattatccaagatctgtgaagacatcttgtcggttttaaccgaccacttgatttcatctgctcaaactggtgaatccaaggttttctactataaaatgaagggtgactaccaccgttacttggccgaattcgccatttctgaaaaacgtaaagatgccgccgacttgtcgttagaagcttacaagtccgcatcagatgttgctgtgaccgaattgccacctactcatccaattagattagggttagctttgaacttttctgttttctactacgaaattttaaattctccagacagagcctgccatttagccaaacaagccttcgatgatgctgttgctgacttggaaactttgtctgaagactcttacaaagattctacgttgattatgcaattattgagggataacttaactttatggactgacttgtccgaagccccagcgccaactgaagaacaacaaccttcagaaccaaaagccgatgaagaataa

SEQ ID NO: 148878 - protein, 255 aa, Debaryomyces hansenii CBS767
MPTLREDSVYLAKLAEQAERYEEMVENMKTVASSGQELSVEERNLLSVAYKNVIGARRASWRIVSSIEQKEEAKGNESQVSLIRDYRSKIEAELSKICEDILSVLTDHLISSAQTGESKVFYYKMKGDYHRYLAEFAISEKRKDAADLSLEAYKSASDVAVTELPPTHPIRLGLALNFSVFYYEILNSPDRACHLAKQAFDDAVADLETLSEDSYKDSTLIMQLLRDNLTLWTDLSEAPAPTEEQQPSEPKADEE

SEQ ID NO: 148879 - DNA, 831 bp, Yarrowia lipolytica CLIB122
  CDS (1)..(831)
atgtcttctgagagagaaaccaagaccttccttgcccggctctgtgagcaggctgaccgatacgacgagatggtcaactacatgaaggacgtcgctaagtccggtgaggagcttactgtcgacgagcgaaatctgctttccgtcgcttacaagaacgttatcggcgctcgacgagccagctggagagtcattttccccatagagcagaaggaggaggccaagggtgccacccaccatctcgagcttctcaagacctacagagccaagattgaggcagagctcgaagacatctgcagcgatgttcttgatatcctcaccaaccacctcctccccaaggccgagaacgccgagtctaaggtcttctactacaagatgaagggtgactaccatcgataccttgccgagttcacctccggcgagaagcgaaaagaggctgccactgccgctcacgagtcatacaagagcgccactgatgttgcccagactgagctcagctcaactcaccccatccgacttggtctcgctctcaacttctccgtcttctactacgagattctcaactcgccagaccgtgcttgccaccttgccaagcaggctttcgatgatgccatcgctgagctcgacactctctccgaggagtctttccgagactctaccgtcattatgcagcttctgcgagacaacctgaccctctggaagaacgacctcgaagagtctctgcaagcccagcagtctgaggagacccctgccaccgatgctgccgctgcttccaccgaggctgctgcccccaaggaggaggccaagcccgctgctgaggagcccaaggagtag

SEQ ID NO: 148880 - protein, 276 aa, Yarrowia lipolytica CLIB122
MSSERETKTFLARLCEQADRYDEMVNYMKDVAKSGEELTVDERNLLSVAYKNVIGARRASWRVIFPIEQKEEAKGATHHLELLKTYRAKIEAELEDICSDVLDILTNHLLPKAENAESKVFYYKMKGDYHRYLAEFTSGEKRKEAATAAHESYKSATDVAQTELSSTHPIRLGLALNFSVFYYEILNSPDRACHLAKQAFDDAIAELDTLSEESFRDSTVIMQLLRDNLTLWKNDLEESLQAQQSEETPATDAAAASTEAAAPKEEAKPAAEEPKE

SEQ ID NO: 148881 - DNA, 786 bp, Aspergillus nidulans FGSC A4
  CDS (1)..(786)
atgggtcacgaagatgctgtttacctggccaagctcgccgagcaggctgaacgctatgaggaaatggttgagaacatgaaggttgtcgccgcctctgacgtagagctcactgtggaagagcggaatctgctttctgttgcctacaagaacgtcatcggcgcccgccgtgcgtcctggagaattgttacctccatcgaacaaaaagaggagtccaagggcaacgagtcccaagttgctctcattaaggagtaccgccagaagattgagggcgagctcgccaaaatctgccaggacatcctggacgttctcgaccagcacctgatcaagtccgctcagagcggcgagtccaaggtcttctaccacaagatgaagggtgactaccaccgttaccttgccgagttcgctgttggcgacaaccgcaaggctgcggccgacgcctccctggaggcctacaagtctgccaccgaagtcgctcagaccgaccttgcccctactcaccccatccgtctcggcttggcccttaacttctctgtcttctactacgagattctcaactctcccgaccaggcttgccacctcgccaagcttgctttcgacgatgctattgccgagcttgacaccctgagcgaagagagctacaaggactccactcttattatgcagcttctcagggataacctgactctctggacctcctctgaggccgaacccgctgcagagaatgcccccgccgaaaagaaggaggaagcccccgccgctgagggcgaggagaagcccgctgaataa

SEQ ID NO: 148882 - protein, 261 aa, Aspergillus nidulans FGSC A4
MGHEDAVYLAKLAEQAERYEEMVENMKVVAASDVELTVEERNLLSVAYKNVIGARRASWRIVTSIEQKEESKGNESQVALIKEYRQKIEGELAKICQDILDVLDQHLIKSAQSGESKVFYHKMKGDYHRYLAEFAVGDNRKAAADASLEAYKSATEVAQTDLAPTHPIRLGLALNFSVFYYEILNSPDQACHLAKLAFDDAIAELDTLSEESYKDSTLIMQLLRDNLTLWTSSEAEPAAENAPAEKKEEAPAAEGEEKPAE

SEQ ID NO: 148883 - DNA, 801 bp, Aspergillus nidulans FGSC A4
  CDS (1)..(801)
atgacttctgagcgtgagaacaaaacattcctcgcccgcctctgcgagcaggccgagcgttacgatgagatggtcacgtatatgaagattggcggcgaacttaccgttgacgagcgtaaccttctctctgtcgcctacaagaacgtcgtcggtactcgacgtgcctcgtggcgtatcatctcctccattgaacagaaggaggaatctaagggctctgagcagcacgtcagcattatccgcgagtaccgtcaaaagatcgagaccgagcttgagaaggtctgccaagacgttctcgatgtactggacgagtccctcatccctaaggctgagacaggcgagtctaaggtgttctactacaagatgaagggtgactaccaccgctaccttgctgaattcgcgtctggcaacaagcgcaagcttgccgccaccgctgcccacgaggcttacaagaacgcaaccgacgttgctcagactgagcttacccccacgcaccccatccgcctgggacttgccctgaacttctccgtgttttactacgagatcctgaactcccctgaccgtgcctgccaccttgccaagcaggctttcgatgacgctattgcggagctggactcactttccgaggaaagctaccgtgatagcactctcatcatgcagttgctgcgtgataaccttactctgtggacttcgtccgacggcaacgaacccgagaacgtgtctgcccccaaggaggagaagcctgaggaggacgctgctgctcccgaggagaagcccgaggaagccaaggctcccgagtcgtaa

SEQ ID NO: 148884 - protein, 266 aa, Aspergillus nidulans FGSC A4
MTSERENKTFLARLCEQAERYDEMVTYMKIGGELTVDERNLLSVAYKNVVGTRRASWRIISSIEQKEESKGSEQHVSIIREYRQKIETELEKVCQDVLDVLDESLIPKAETGESKVFYYKMKGDYHRYLAEFASGNKRKLAATAAHEAYKNATDVAQTELTPTHPIRLGLALNFSVFYYEILNSPDRACHLAKQAFDDAIAELDSLSEESYRDSTLIMQLLRDNLTLWTSSDGNEPENVSAPKEEKPEEDAAAPEEKPEEAKAPES

SEQ ID NO: 148885 - DNA, 786 bp, Ustilago maydis 521
  CDS (1)..(786)
atgcccgaatcgcgtgaagactctgtctaccttgccaagctcgccgagcaggcggagcgctacgaggagatggtcgagaacatgaagcgcgttgcttcgtctgaccaggagcttactgtcgaggagcgcaaccttctctcggtcgcctacaagaacgtcattggtgctcgtcgtgcctcgtggcgcatcgtctcctccatcgagcagaaggaggagtccaagggtaacgagacccaagtttccatgatcaagacctaccgtgagaagatcgaggccgagctcgcccagatctgcgaggacatcctcgacgttttggacaagcacctcattccctcggccgcctcgggtgagagcaaggtcttctaccacaagatgaagggtgactaccaccgatacctcgccgagttcgccaccggtgacaagcgtaaggactctgccgacaagtcgctcgaggcctacaaggctgcttcggacgtcgctgtcaccgagctgccccctacccaccccatccgcctgggtcttgccctcaacttctcggtcttctactacgagatcttgaacagccccgaccgcgcttgccacctcgccaagcaggctttcgacgacgctatcgccgagctcgacaccctctcggaggagagctacaaggactcaaccctcatcatgcagttgctccgtgacaaccttaccctctggacttcggacatgcaagattccgagaagcccaccgaagccgccgctgccgacgctccggctgccgaggccaagggtgaggaggccgcctaa

SEQ ID NO: 148886 - protein, 261 aa, Ustilago maydis 521
MPESREDSVYLAKLAEQAERYEEMVENMKRVASSDQELTVEERNLLSVAYKNVIGARRASWRIVSSIEQKEESKGNETQVSMIKTYREKIEAELAQICEDILDVLDKHLIPSAASGESKVFYHKMKGDYHRYLAEFATGDKRKDSADKSLEAYKAASDVAVTELPPTHPIRLGLALNFSVFYYEILNSPDRACHLAKQAFDDAIAELDTLSEESYKDSTLIMQLLRDNLTLWTSDMQDSEKPTEAAAADAPAAEAKGEEAA

SEQ ID NO: 148887 - DNA, 1029 bp, Gossypium hirsutum
  CDS (35)..(796)
aaagatcaaagactcaaagagaaagaaagcggccatggagaaggaaagagagcaacaagtttacttggcaaggctcgctgagcaagctgaaagatacgatgagatggttgaggccatgaagagtgttgctaagttggatgttgagctgactgtggaggagaggaatctgttatctgtgggatataagaatgtgattggagcaagaagggcatcctggcggatactgtcttcaattgaacagaaggaggaggccaaaggtaacgaacaaaatgtgaagaggataaaggattataggcaaagggtcgaagatgaactctcaaagatatgcaatgacatactctcagtcattgataagcacctcattccatcttcctccaccggggaatcaactgttttctactataagatgaaaggagattattttcgttatttggcagaatttaaggcaggagatgatcgtaaagaagctgctgatcagtcacttaaggcttatgaggctgccacttccactgcaagctcagatttgcctccaactcacccaattagacttggcctggctttgaacttctcagttttctactatgagatattaaattctcccgagagggcttgtcatctggctaaacaagcatttgatgaggctattgctgagcttgatagccttaatgaagaatcttacaaggatagcacccttatcatgcagcttcttagggacaacctcaccttgtggacctcggatctgccagaggaaggaggtgagcaatcaaaagcagatgaacctcaggctgagagttaattggatgaaagagtattcttttaagactgggcttgtcgagataggaaaggggcttgctgctagagtgacctgctttcaactcatggtagtagtaccaggatttgttacctatgacatggttcgatttgtttatcagatgttttcagactgttgttctgtgttctcttctgtttaaacataattgaatcggttacactttatagtctttatgacttaaaaaaaaaaaaaaaaaa

SEQ ID NO: 148888 - protein, 253 aa, Gossypium hirsutum
MEKEREQQVYLARLAEQAERYDEMVEAMKSVAKLDVELTVEERNLLSVGYKNVIGARRASWRILSSIEQKEEAKGNEQNVKRIKDYRQRVEDELSKICNDILSVIDKHLIPSSSTGESTVFYYKMKGDYFRYLAEFKAGDDRKEAADQSLKAYEAATSTASSDLPPTHPIRLGLALNFSVFYYEILNSPERACHLAKQAFDEAIAELDSLNEESYKDSTLIMQLLRDNLTLWTSDLPEEGGEQSKADEPQAES

SEQ ID NO: 148889 - DNA, 1293 bp, Ipomoea nil
  CDS (154)..(942)
ggccacgcgccgcccccaactttctccaccctaacgcgttttctttataaaccgcctttcttctgtcagttcctctattgcatttcagtgtcggaaaaacgcagcggttgctgcttcagtttaagaattaggtattaattgagtatagcaaagatggtgtcaactgagtcatctcgtgaagagaatgtgtacatggccaagttggccgagcaggctgagaggtatgaggaaatggtggagttcatggagaaggttgccaagacggtggatgtggatgagctaaccgtggaggaaaggaaccttctctcggtggcgtacaagaatgtgattggtgcgaggagggcctcgtggagaatcatatcttctattgagcaaaaggaggagagccgtgggaatgaggagcttgttaagaccattaaggaatataggggtagaattgaggcagagctgagcaagatatgcgatggcatattgagccttctcgagtcccacctggttccctcggcttccactgctgagtccaaggtgttttacttgaagatgaaaggcgattaccataggtaccttgctgagtttaagaccggggctgagaggaaagaagctgccgagagcactttgttggcatataagtccgctcaggatattgcattgggtgaactggctccaacccaccctattaggctcggacttgcccttaacttttctgtgttctattacgaaatccttaactcacctgaccgtgcctgcaaccttgccaagcaggcctttgatgaagcaatcctcgagctagacacacttggtgaagaatcttacaaggacagcacattgatcatgcaacttctcagagacaacttaactctgtggacttctgataccgcggatgatggcggggacgagatcaaggaagcatcaaagcgggaatcaggcgaggggccgcagtaatatttagcgccattcttttgcactcccacaatctctctacgtttaatgttatgaatttaagaatgaatgatggtttgggtacttctctatagtgttgtgtttttaatacgatacagtcagtaatattcctattatcagttggttgggttgatgaagtagattatatgttagtggtttagccttgtgtctgttacaatgatgatggtaataccaatgttttttcaaatgttcttccctcctatgttggggatttgtgactattattgaaaaattttacagtttcaaaagtaatatttatgaagaataattcttgtacttagaaaaaaaaaaaaaaaaaaaaaaaaagcttgt

SEQ ID NO: 148890 - protein, 262 aa, Ipomoea nil
MVSTESSREENVYMAKLAEQAERYEEMVEFMEKVAKTVDVDELTVEERNLLSVAYKNVIGARRASWRIISSIEQKEESRGNEELVKTIKEYRGRIEAELSKICDGILSLLESHLVPSASTAESKVFYLKMKGDYHRYLAEFKTGAERKEAAESTLLAYKSAQDIALGELAPTHPIRLGLALNFSVFYYEILNSPDRACNLAKQAFDEAILELDTLGEESYKDSTLIMQLLRDNLTLWTSDTADDGGDEIKEASKRESGEGPQ

SEQ ID NO: 148891 - DNA, 819 bp, Aspergillus niger
  CDS (1)..(819)
atgacttctgagcgtgagaacaagacgttcctcgcccggctctgtgagcaggctgagcgctacgatgagatggtcacgtacatgaaggaagtcgccaacattggaggcgagctttccgtcgatgagcgtaaccttctctccgttgcttacaagaacgtggtcggtacccgccgtgcctcgtggcgtattatctcctccattgagcagaaggaggagtccaagggctctgagcagcacgtttcgatcatccgtgactaccgccagaagatcgagaccgagctcgagaaggtctgccaggatgtcctcgatgttctcgatgagtccctcatccccaaggccgagactggcgagtccaaggtcttctactacaagatgaagggtgactaccaccgctacctcgctgagtttgcctctggcaacaagcgcaaggttgctgccactgctgcccacgaggcttacaagaatgctaccgatgtcgcccagaccgatcttactcctacccaccccatccgccttggtctcgccctgaacttctccgtcttctactacgagatcctgaactcccccgatcgtgcctgccaccttgccaagcaggcgttcgatgacgccattgcggagctcgactcgctttcggaggagagctaccgtgatagcaccctgatcatgcagctcctgcgtgacaaccttactctgtggacctcttctgatggcaacgagcccgagggcgctgcccccaaggaggacaagcccgaggaggagaccgccgccgcccccgaggacaaggctgaggagcccaagcctgctgcccctgagtcctag

SEQ ID NO: 148892 - protein, 272 aa, Aspergillus niger
MTSERENKTFLARLCEQAERYDEMVTYMKEVANIGGELSVDERNLLSVAYKNVVGTRRASWRIISSIEQKEESKGSEQHVSIIRDYRQKIETELEKVCQDVLDVLDESLIPKAETGESKVFYYKMKGDYHRYLAEFASGNKRKVAATAAHEAYKNATDVAQTDLTPTHPIRLGLALNFSVFYYEILNSPDRACHLAKQAFDDAIAELDSLSEESYRDSTLIMQLLRDNLTLWTSSDGNEPEGAAPKEDKPEEETAAAPEDKAEEPKPAAPES

SEQ ID NO: 148893 - DNA, 1155 bp, Hordeum vulgare
  CDS (75)..(866)
aggagaccagcggcgacgcaggcgcaaaacgcagatttggcattcagaaaaaattaaagcagtaaactgtgaagatgtcggcaccaggggagctttcccgtgaggagaatgtgtacatggctaagctcgccgagcaggctgagaggtacgaggagatggttgagttcatggagaaggtggccaagaccgtcgactccgaggaactcactgtggaggagcgcaacctcctctctgttgcatacaagaatgtgattggagcccgccgtgcctcatggcgcatcatctcctccattgaacagaaggaggagagccgtggcaacgaggaccgggtcacactcatcaaggaataccgtggcaagatcgaaactgagcttagcaagatatgtgatggcattctcaagctgcttgaaacccaccttgttccgtcttccactgcccctgagtccaaggtcttctatcttaagatgaagggtgactactacaggtatcttgcggaattcaagagtgggcctgagaggaaggatgctgctgagaataccatggtggcatacaaggctgctcaggatattgctttggctgagctggctccaacacatccgattaggcttgggctggcactaaacttctcagtgttctattatgagatcctcaactcgcctgatcgtgcttgcaatcttgcaaagcaggcattcgatgaggccatttcggagctggacacactaagcgaagaatcctacaaggacagcaccttgatcatgcaactccttcgtgataacttgaccctctggacttccgacatcacggaggacaccgcggaggaggagatcagggaggctccgaagcatgactcgagcgaggggcagtaaagccggctttgcgacgccccgcaagctactagctagtgctcgctactgtcaatgacgttgcatgcaatgtggtctggatcgtgtcgtagccgtgtgttatggttgttgttgcaagatttggggctccccgtatgtgatgttgccggggaaggttgtggtcgctgcctgtaggcggctgcctcctggtctggcttgggggggagccacatgcactgctggtggtcgtggccgttcgtattttcgttctgccttaatgttgcttcttatcgtggaaaaaaaaaaaaaaaaa

SEQ ID NO: 148894 - protein, 263 aa, Hordeum vulgare
MSAPGELSREENVYMAKLAEQAERYEEMVEFMEKVAKTVDSEELTVEERNLLSVAYKNVIGARRASWRIISSIEQKEESRGNEDRVTLIKEYRGKIETELSKICDGILKLLETHLVPSSTAPESKVFYLKMKGDYYRYLAEFKSGPERKDAAENTMVAYKAAQDIALAELAPTHPIRLGLALNFSVFYYEILNSPDRACNLAKQAFDEAISELDTLSEESYKDSTLIMQLLRDNLTLWTSDITEDTAEEEIREAPKHDSSEGQ

SEQ ID NO: 148895 - DNA, 1083 bp, Fritillaria agrestis
  CDS (51)..(830)
gaacagctactcgctcccatccagggtttcaacgccttccaggtttcaggatgtcgccggcggagccatcgcgggaggagaacgtgtacatggcgaagctggcggagcaggccgagcgctacgaggagatggtggagttcatggagaaggtggcccgcacggtggacaccgaggagctcactgtcgaggagcgcaacctcctgtcagtggcgtacaagaacgtcatcggcgcccgccgcgcctcgtggcggatcatttcgtcgatcgagcagaaggaggagagccgcgggaacgaggatcatgtcgcgttgatcaaggattaccgcgggaagatcgaggccgagctgagcaagatctgtgatgggatcctcaagctgcttgactcgcatctggtgccgtcttcgacggcggcggagtcgaaggtgttttacctcaagatgaagggcgactaccacaggtaccttgcggagttcaagtctggggctgagaggaaggaggctgcggagagcacgctcttggcctacaagtcggctcaggacattgctctggcggagctggcgcctactcatccgatcaggctcgggctggcgcttaacttctcagtcttctactatgaaattctgaactctccggaccgtgcttgcaatctagcaaagcaggcctttgatgaggctatctcggagctagacactttgggtgaggaatcgtacaaggacagcacactgatcatgcagcttctccgagacaatctgactctgtggacctccgatatcaatgaggaggccggggatgagattaaggaagcctcaaaagcaggagagggacagtaatgaaccatggtaaaccgctgtgctgttggagtttttgttttttatttttgtttccgctggagttgtagttaggatatttatgctcaacaaacctattgtgtggcttttgaatttacctcccatcatttttattgtggattgttgttctagttgaacaaggtttggttcctatgcaatacttcatttcagttaatatcatgtgggctcgaaaacaagtgattttcaataattatgtagtgctgcataaaaaaaa

SEQ ID NO: 148896 - protein, 259 aa, Fritillaria agrestis
MSPAEPSREENVYMAKLAEQAERYEEMVEFMEKVARTVDTEELTVEERNLLSVAYKNVIGARRASWRIISSIEQKEESRGNEDHVALIKDYRGKIEAELSKICDGILKLLDSHLVPSSTAAESKVFYLKMKGDYHRYLAEFKSGAERKEAAESTLLAYKSAQDIALAELAPTHPIRLGLALNFSVFYYEILNSPDRACNLAKQAFDEAISELDTLGEESYKDSTLIMQLLRDNLTLWTSDINEEAGDEIKEASKAGEGQ

SEQ ID NO: 148897 - DNA, 1176 bp, Maackia amurensis
  CDS (31)..(816)
tcgaaaaacctaatttggaagagatcggtgatggcttcctccaaggagcgcgagaccttcgtctacgtcgccaagctcgccgagcaggccgagcgatacgaagagatggtggattcaatgaagaacgttgcgactctagatgttgagttgacagttgaagagaggaatttgctttctgttggttataagaatgtgattggtgctcgcagagcctcgtggagaatcctatcttccatagagcaaaaggaagaagcaaaaggaaatgaagtaaatgcgaaacggattaaggagtacaggcaaaaggttgaatctgagcttacaaacatctgtaacgatgttatgagagtgattgatgaacaccttataccttctgcttcagctggtgaatcaactgtgttttattataagatgaaaggagattattatcgttatcttgctgaatttaagacaggcaatgagaagaaggaggctggtgatcagtcaatgaaagcatacgagtctgctaccgctgcagctgaggctgaattaccccccacacatcccatccgtttgggtctggctttaaatttctctgttttttattatgagatcttgaattcaccagagagggcctgtcatcttgcaaagcaagcttttgatgaagctatttcagagcttgacaccttgaatgaggagtcatacaaagatagcaccttgatcatgcaacttctcagggacaaccttactttgtggacttctgacatcccagaagatggagaagatgcccagaaagcgaatggcactgccaagcttggcggaggcgaggatgcagagtgagactgattgtgggtggcaccttccttaggatttgatgcatgtgtttggaaatgaaaaaggagggctgattacccatctgtgtattagctagagatagggttccattgtttcttctttctctgtttcttgttgattggccacactcccccaatagggataaaagaaactccatttgtgctatatattatggtctgtttttatttatgtggtgtctggaaacggcctgtttcattcctaagcttttcctcctgtctgggggattgattgatgaggattgcttatggagttatggtgtatttcctgttccaatgaaatgatacaactttatatggagatactgctaaaaaaaaaaaaaaaaaa

SEQ ID NO: 148898 - protein, 261 aa, Maackia amurensis
MASSKERETFVYVAKLAEQAERYEEMVDSMKNVATLDVELTVEERNLLSVGYKNVIGARRASWRILSSIEQKEEAKGNEVNAKRIKEYRQKVESELTNICNDVMRVIDEHLIPSASAGESTVFYYKMKGDYYRYLAEFKTGNEKKEAGDQSMKAYESATAAAEAELPPTHPIRLGLALNFSVFYYEILNSPERACHLAKQAFDEAISELDTLNEESYKDSTLIMQLLRDNLTLWTSDIPEDGEDAQKANGTAKLGGGEDAE

SEQ ID NO: 148899 - DNA, 1107 bp, Solanum tuberosum
  CDS (25)..(789)
ggccgctcaaatattgaatccattatggcgcgtgaggagaatgtgtacatggcgaagcttgctgagcaagctgaaagatacgaagaaatggtgcagttcatggagaaagtttcaacttcattaggctcagaggaactcaccgttgaggaacggaatctcctttccgttgcttacaaaaacgttatcggggctcgtagagcctcgtggcgtattatctcttccattgaacagaaggaggagtcgaggggaaatgaggaacatgttaaatgtataaaggagtacagatctaagattgaatctgaactttctaatatttgtgatggaattctcaagctccttgattctaatctcattccttcagcttctaatggcgattctaaggtgttttaccttaaaatgaagggtgattatcatcgttatttggctgaatttaagaccggagctgaacgtaaggaagctgctgagagcactctctccgcctacaaagctgctcaggatattgcaaatactgaacttgccccaacacatccaatccgacttggactggctctcaacttctctgtgttttattatgagattttgaactctcctgaccgtgcttgcaatcttgctaaacaagcatttgatgaagcaattgccgagttggacacactgggagaagaatcttacaaggatagcactttgatcatgcaacttcttcgtgacaatctcactctctggacctctgatatgcaggatgatggtgctgatgaaattaaggaaaccaaacccgacaatgaacaacagtgagggaactggtcctcagattatcatttgacttcttcctggttgtttttattgggagaagctgcttctttttatttctttcacctgtgtttcaggtttccctttagcgttctcttatccatggcaacgaacaactttgaatattgatgttcaattgtttcatctttactttaatgtggttctttctggtgcttagtttctatgaaagcatttcagttgtatttgtgaactgaatttataaaatggtatgtcaaagtgatactcagcaatcgggtttcaatcaaaaaaaaaaaaaaaaaaaaaaaaaaaaaaaaaaaaaaa

SEQ ID NO: 148900 - protein, 254 aa, Solanum tuberosum
MAREENVYMAKLAEQAERYEEMVQFMEKVSTSLGSEELTVEERNLLSVAYKNVIGARRASWRIISSIEQKEESRGNEEHVKCIKEYRSKIESELSNICDGILKLLDSNLIPSASNGDSKVFYLKMKGDYHRYLAEFKTGAERKEAAESTLSAYKAAQDIANTELAPTHPIRLGLALNFSVFYYEILNSPDRACNLAKQAFDEAIAELDTLGEESYKDSTLIMQLLRDNLTLWTSDMQDDGADEIKETKPDNEQQ

SEQ ID NO: 148901 - DNA, 1163 bp, Solanum tuberosum
  CDS (174)..(953)
actctagaaataaaagtaaaaacaaaatcctaaaatctctctactcctctcaattcaaaaaaagccctctttctctcaattttaaattcaattcagaaaatcgaaaaactctctcatttcattcagatctcaaaaaacttatttccgagaacacagagaaaaaaaatctaaacatggcggtggcaccgacggcgcgtgaggagaacgtatacatggcaaagctggcggagcaggccgagaggtatgaagagatggttgaattcatggagaaggtctccaactcccttggctcggaagaactaaccgtggaggagagaaaccttctctccgtcgcatataagaatgtaatcggagcgcgtagggcatcgtggcgtatcatttcatcgatcgagcaaaaggaagagtctagaggaaatgaggaacatgttaactctatccgcgagtacagatctaagattgagaatgagctctctaagatctgtgatggcattctcaaattgcttgattctaagcttattccttctgcaacatctggtgattctaaggttttttacctgaaaatgaaaggagattaccaccgctatttggctgagttcaagaccggtgctgaacgtaaggaggctgctgagagtactctcactgcctacaaagctgctcaggatatcgcatctgctgagcttgccccaacacatcccatccgacttggactggctcttaacttctctgtgttttattatgagatcttgaactctcccgaccgtgcttgcaaccttgccaaacaggcctttgatgaagcaattgctgagttggacacattgggagaggagtcttacaaggatagcactttgatcatgcaacttcttcgtgacaatctcactctctggacctccgatatgcaggatgatggggctgatgaaatcaaggaagatcccaaacctgaagaaaaaaattgaggggaattgaaaccctctaatttgcttttcacttctcccccagttgttttaattgggagaagctgattatcataatttccttgctagtattatgattttccattaagaggttctcttcttattggcaaaaaacaacttttatattgatgttttaaaagttccatcttttaatttaatgtggttcttgaggttaaaaaaaaaaaaaaaaaa

SEQ ID NO: 148902 - protein, 259 aa, Solanum tuberosum
MAVAPTAREENVYMAKLAEQAERYEEMVEFMEKVSNSLGSEELTVEERNLLSVAYKNVIGARRASWRIISSIEQKEESRGNEEHVNSIREYRSKIENELSKICDGILKLLDSKLIPSATSGDSKVFYLKMKGDYHRYLAEFKTGAERKEAAESTLTAYKAAQDIASAELAPTHPIRLGLALNFSVFYYEILNSPDRACNLAKQAFDEAIAELDTLGEESYKDSTLIMQLLRDNLTLWTSDMQDDGADEIKEDPKPEEKN

SEQ ID NO: 148903 - DNA, 1319 bp, Triticum aestivum
  CDS (86)..(871)
ccgagatccgcagcccgaagcccgtgagaaaagcgaagcgcgagaggaaaggcactgaactagtttgcaacaaagaagagggaaaatgtctaccgctgaggcaacccgtgaggagaatgtgtacatggccaagcttgccgagcaggctgagcgttacgaagaaatggttgagttcatggagaaggtggcaaagaccgctgatgttggtgagctcactgttgaggagcgcaacctgctctctgttgcttacaagaatgtgattggtgcccggagggcttcctggaggatcatctcctccattgagcagaaggaggagagccgtgggaacgaggcctatgttgcttcaatcaaggagtaccgtaccaggattgaaactgagctcaacaagatctgtgatggcatcctcaagcttctggactcccaccttgtcccctctgccactgcagcagagtccaaggtgttctatctgaaaatgaagggtgactaccacaggtaccttgcggagttcaaggcaggcgctgagaggaaagaagcagctgagaacactcttgtagcatacaagtcagcccaggacatcgcgcttgctgacttgcctaccacccacccgataaggcttggacttgcactcaacttctcagtgttctactatgagatcctgaactctccagaccgtgcttgcaaccttgccaagcaggcatttgatgaagctattgctgagctggactccctcggcgaggaatcctacaaggacagcaccttgatcatgcaacttcttcgtgacaacttgactctctggacctccgataacgcagaggagggtggtgatgagatcaaggaagccgcctcaaagcctgagggagaggggcactgattggccctcgagcgtgcccaagtttatttctgagtccatttacgcagctacctgtatcattcggatcataagatgtactagggtcggttgcactatgtgaatcataagatgtggtaggatggtgctatgcgaagcgtgtcgagctgaagtacctagtggactacagtcatgagacggtcatgtgacatcgtcgcttcttagttcattagcagatttcaaactatttcctgtattgcagcacattattagtattgctgtattagcaattttcatggcttgttgatgattgatcatacttggcgtcaagcacccccaaagcttgcctttcttatgaagcaacaactgagtttttcttgtctacttccctctcaaaataattgacttctaggattcttctaattcaaaaagtttgatcattttgacatgaaattaaaaaaaaaaaaaaaaa

SEQ ID NO: 148904 - protein, 261 aa, Triticum aestivum
MSTAEATREENVYMAKLAEQAERYEEMVEFMEKVAKTADVGELTVEERNLLSVAYKNVIGARRASWRIISSIEQKEESRGNEAYVASIKEYRTRIETELNKICDGILKLLDSHLVPSATAAESKVFYLKMKGDYHRYLAEFKAGAERKEAAENTLVAYKSAQDIALADLPTTHPIRLGLALNFSVFYYEILNSPDRACNLAKQAFDEAIAELDSLGEESYKDSTLIMQLLRDNLTLWTSDNAEEGGDEIKEAASKPEGEGH

SEQ ID NO: 148905 - DNA, 1186 bp, Manihot esculenta
  CDS (89)..(883)
gggggacggacgagtgtgaactcttcatcaattcatcccaattccaaaacatttccaagaaattacgttttagtttgatatatcaaggatgttgcccactgaatcatcacgtgaggaaaatgtctacatggccaagttggctgaacaggctgaacgttatgaggaaatggtggagtttatggaaaaggttgcaaagacagtggatgtggaggagctaactgtggaggaaaggaatcttctctctgtcgcttacaagaacgtcattggggctagaagggcttcatggaggataatctcttccattgagcagaaggaagagagcagaggaaatgaggatcacgtgtcaataattaaggagtacagaggtaagattgaagctgagctgagcaagatttgtgatgggatcttgagcctccttgagtcgcatctcattccctctgcctcatctgctgagtctaaggtattctacctcaagatgaagggtgattatcaccggtatcttgcggagttcaagactgcagctgagaggaaggaagctgctgagagtactttgttggcatacaagtctgcccaggatattgcccttgctgatctcgctcctacccacccaataaggcttgggcttgcccttaacttctccgtgttctattatgagatcctaaactcacctgaccgtgcttgtaatctagccaagcaggcctttgatgaggctatttctgagctggatacattgggtgaggaatcttacaaggatagtacattgatcatgcaacttctccgagacaatctgacgctctggacttctgatatcacggacgaagctggggatgagatcaaggatgcatcaaaacgggaatcaggcgagggacagccgcaacagtgatgagttaaattcgtaggacgtgtaatgtgtacttctatatcttgtgacttctgagtagatgccatcatctggtggttgtagcttggattgcttgatgaatttggtaattctgagtgctgctgtgcactgaggattgaaatgttctggcaattatcaaccttctactattgattttagaatggaagttggtatttcttattgctcaagttcttccatgtgatgatgttgaaactaggaatttccataccgcataccccacacaattctttatataaaaaaaaaaaaaaaaaaaaaaaaaaaaaa

SEQ ID NO: 148906 - protein, 264 aa, Manihot esculenta
MLPTESSREENVYMAKLAEQAERYEEMVEFMEKVAKTVDVEELTVEERNLLSVAYKNVIGARRASWRIISSIEQKEESRGNEDHVSIIKEYRGKIEAELSKICDGILSLLESHLIPSASSAESKVFYLKMKGDYHRYLAEFKTAAERKEAAESTLLAYKSAQDIALADLAPTHPIRLGLALNFSVFYYEILNSPDRACNLAKQAFDEAISELDTLGEESYKDSTLIMQLLRDNLTLWTSDITDEAGDEIKDASKRESGEGQPQQ

SEQ ID NO: 148907 - DNA, 819 bp, Cleome spinosa
  CDS (1)..(819)
atgtcgccttctgattcgacccgggaagagaatgtttacatggccaagctggccgagcaagctgaacgctacgaggaaatggtggagttcatggaaaaggttgcaaacacaggcgacactgaggagcttactgtcgaagagaggaacctcttgtccgttgcttacaagaatgtgattggtgcgaggagggcttcgtggaggattatatcttccattgagcagaaggaagaaagcaggggaaacgaggaccacgtctcgatgatcaaggagtacagaggcaagatcgaagctgagctcagcaagatctgtgatggcattttgaaccttctcgagtctcacctcattccttctgcatcctctgccgagtccaaggtcttctacctcaaaatgaagggtgattatcacaggtacctcgccgagtttaagaccggagccgagaggaaggaagcggctgagagcactctgttggcctacaaatccgctcaggatatcgctctcactgaactggctcctactcacccgatcagattgggacttgcgcttaacttctctgtcttttactacgaaattctcaattcacctgatcgtgcttgtaaccttgctaagcaggcttttgacgaggcaatctctgagttggacacgttgggagaggaatcatacaaggacagtacattgatcatgcaactcctccgtgacaacctgaccctctggacttccgacatcaacgacgaggccggagatgagatcaaggatgcctcgaaaggggaatcggaagaggggcaacaggcggcgcaggcagcagctccaccagcgcagtga

SEQ ID NO: 148908 - protein, 272 aa, Cleome spinosa
MSPSDSTREENVYMAKLAEQAERYEEMVEFMEKVANTGDTEELTVEERNLLSVAYKNVIGARRASWRIISSIEQKEESRGNEDHVSMIKEYRGKIEAELSKICDGILNLLESHLIPSASSAESKVFYLKMKGDYHRYLAEFKTGAERKEAAESTLLAYKSAQDIALTELAPTHPIRLGLALNFSVFYYEILNSPDRACNLAKQAFDEAISELDTLGEESYKDSTLIMQLLRDNLTLWTSDINDEAGDEIKDASKGESEEGQQAAQAAAPPAQ

SEQ ID NO: 148909 - DNA, 849 bp, Medicago truncatula
  CDS (1)..(849)
atgtcgacagagaaagagcgagaaactcaggtttacatggccaagcttgctgaacaggccgaaagatacgaagaaatggttgagtgcatgaagacaatagcaaaacttgatgttgagctaactgtggaagagaggaatcttctctcggtgggatataaaaatgtcattggtgcaaggagagcctcgtggcgcattatgtcttcaattgaacagaaagaagaggctaagggaaatgagaacaacgtgaaactgatcaagagctattgccaaaaggttgaggaggaactatcgaaaatttgcagcgacattctcgaaattattgacaaacatctgattccttcttccaccacaggggaagctactgttttctactacaagatgaaaggtgactattatcgatatcttgctgagttcaagaacgatcaagataggaaggaggcagctgatcagtcactgaaggcatatgaggctgcttccgccactgcaagcacagatcttccatcaacacatccaatccgtcttggacttgcactcaacttctctgtcttctactatgagataatgaactctcctgaaagggcctgtcatttggctaaacaagctttcgatgaggcaattgcagatttagataccttgagtgaagagtcatacaaggacagtactttaatcatgcagttgttgagagacaacctaactctttggacctctgatttacctgaggatggaggtgaagaactcaaatcagaagaagtcaaacctgctgaaccagaggtatggcaacaaagcagggcggacatcttcctcgtccccaaacccaatggggttaggatatccatgtatctgtcttga

SEQ ID NO: 148910 - protein, 282 aa, Medicago truncatula
MSTEKERETQVYMAKLAEQAERYEEMVECMKTIAKLDVELTVEERNLLSVGYKNVIGARRASWRIMSSIEQKEEAKGNENNVKLIKSYCQKVEEELSKICSDILEIIDKHLIPSSTTGEATVFYYKMKGDYYRYLAEFKNDQDRKEAADQSLKAYEAASATASTDLPSTHPIRLGLALNFSVFYYEIMNSPERACHLAKQAFDEAIADLDTLSEESYKDSTLIMQLLRDNLTLWTSDLPEDGGEELKSEEVKPAEPEVWQQSRADIFLVPKPNGVRISMYLS

SEQ ID NO: 148911 - DNA, 1072 bp, Camellia sinensis
  CDS (68)..(850)
acgcggggaccctttttgtttcctctcccttcttcttctcagaccagatctcagccaaattcctccaatggcgacatcaaccccacgcgaagagagcgtctacatggccaaactggccgagcaagccgagcgctacgaagaaatggtggaattcatggaaaaagtctcctccaccgtcgtcgaatccgaggagctcacggtggaggagcgcaacctcctctccgtcgcctacaagaacgtgatcggcgctcgtcgtgcttcgtggcggatcatctcctcgatcgagcagaaggaggagtctcgcggcaacgccgaccatgtctccaccatcaaggactacaggtccaagattgagaacgagctctcttcgatctgcgacggcattctcaagcttctcgacaccaagttgatcccctccgccaccgccggtgactcgaaggtgttttatctgaagatgaagggtgattatcataggtatttggcggagttcaagactggttcggagaggaaggaggccgctgagaatactcttaatgcttataaggctgctcaggatatcgctaatacagagttggctccaacacatccaattcgactaggcctggctctcaacttttcggtgttttactacgaaattttgaattcacctgatcgagcatgcagtcttgcaaaacaggcctttgatgaagccattgcggagctggatacactggtggaggattcatacaaggacagcactttgataatgcaactccttcgtgataatctgactttgcggacctcagacacgcaggatgatggagcagaggagatcaaagaagcacccaagcacgaagaggagaagcagtaaactaactgattgttttcattttagtatttcacttctcttctgtttgtttttgaatggagaagttgtgtggaccctctatctatctggtgtggagcctctaggatttgatgtgattcttattgttttttaatttcggaatacgagtgtttacttttgtgatttaatgattagtgcctaaatccactttggtttcaaaaaaaaaaaaaaaaaaaaaaaaaaaaa

SEQ ID NO: 148912 - protein, 260 aa, Camellia sinensis
MATSTPREESVYMAKLAEQAERYEEMVEFMEKVSSTVVESEELTVEERNLLSVAYKNVIGARRASWRIISSIEQKEESRGNADHVSTIKDYRSKIENELSSICDGILKLLDTKLIPSATAGDSKVFYLKMKGDYHRYLAEFKTGSERKEAAENTLNAYKAAQDIANTELAPTHPIRLGLALNFSVFYYEILNSPDRACSLAKQAFDEAIAELDTLVEDSYKDSTLIMQLLRDNLTLRTSDTQDDGAEEIKEAPKHEEEKQ

SEQ ID NO: 148913 - DNA, 1423 bp, Chlamydomonas incerta
  CDS (23)..(802)
gttcctgagcgcggtagctgagatggcggtcgaccgggaggaatgcgtctacatggccaagctggccgagcaggctgagcgctatgacgagatggtggaggagatgaagaaggtggccaagctggtgcacgaccaggagctttcggtggaggagcgcaacctgctctcggtggcctacaagaacgtcattggcgctcgccgcgcttcctggcgcattatctcctccatagagcagaaggaggagagcaagggcaacgaggagcatgtccagcgcattcgcaagtaccgcactgtggtcgaggaggagctcagcaaaatctgcgccagcattctgcagctgttggacgaccacctgatccccactgcctccaccggcgagagcaaggtgttctacctgaagatgaagggcgactaccaccgctacctggcggagtttaagaccggcgctgaccgcaaggaggctgcggagcacaccctgctcgcctacaaggccgcgcaggacattgccctggtggacctcccgcccacgcaccccatccgcctgggcctggccctgaacttctccgtgttctactacgagattctgaactcgcccgagcgcgcgtgccacctggccaagcaggcgttcgatgaggccatcgccgagctggactcgctgggcgaggagtcctacaaggactcgacgctcatcatgcagctgctccgcgacaacctcacactgtggacctccgacatgcaggaccccgctgccggtgacgacagagagggcgctgacatgaaggttgaggacgctgagccctgaaaggagccccatgcagcagcagcagctggggccgggacggtagtctgagctcgttgaacaaggtattacgggagttccgtttttaggggttcaggggagtcagtcggtttcgaagtgcacacttccaacacggctggacgtgtggttcacgcacagtgctcatcacatgcattgttgtcgtggctacccggggtcgataaattctttgcctcaggtgactgggtccacacttaggaggagagatccggaggagagttgcgcttgtcgagtcggcgtgaagtggcgtttgagctttctcatcggagggctccagccacttgaaagagggccagcccaatgatgtgtctgcaaaacacgttgtgggggtgcgtacagggggccacttgacattgtgttggccgccacggcccaacgctcacgttgacgagtccgggtgcattccgtaaattcaatcgcaatgcgtaggttcatagacactagacgctcggtgttgggccgactccatacgttgggccagaccgtggcgacggcgctgtgagatggaacatgtgtgaagtgcgtgtggcgtgttgaagcgcactgatgcttgcaagatggattccattacgaaaaaaaaaaaaa

SEQ ID NO: 148914 - protein, 259 aa, Chlamydomonas incerta
MAVDREECVYMAKLAEQAERYDEMVEEMKKVAKLVHDQELSVEERNLLSVAYKNVIGARRASWRIISSIEQKEESKGNEEHVQRIRKYRTVVEEELSKICASILQLLDDHLIPTASTGESKVFYLKMKGDYHRYLAEFKTGADRKEAAEHTLLAYKAAQDIALVDLPPTHPIRLGLALNFSVFYYEILNSPERACHLAKQAFDEAIAELDSLGEESYKDSTLIMQLLRDNLTLWTSDMQDPAAGDDREGADMKVEDAEP

SEQ ID NO: 148915 - DNA, 1277 bp, Metarhizium anisopliae
  CDS (104)..(913)
ccacgtctgtcgtcccgtgttcagctccctcctcctgatccccctcctgaatactttctcgtccaactgccaactttccacattcgccaaaaccaccatcaaaatgggtcacgaagatgcagtctacctggccaagctcgccgagcaggctgagcgatacgaagagatggtcgagaacatgaagattgtcgcctctgaagaccgcgacctgactgtcgaggagcgcaaccttctgtctgtcgcctataagaacgtcattggtgcccgccgtgcctcctggaggatagtcacttctattgagcagaaggaggagtctaagggcaactcgtcccaggtcaccctcatcaaggagtaccgacagaagattgaggccgagctcgccaagatttgcgacgatattcttgatgtcctcgacaagcacctaattccttctgccaaatctggcgagtccaaggtcttctaccacaagatgaagggtgactaccaccgttacctcgccgagttcgccattggcgaccgccgcaaggactctgccgacaagtccctcgaggcttacaaggctgctactgaggttgctcagaccgagctccctcccactcacccgatccgcctgggtcttgccctcaacttctccgttttctactacgagatcttgaatgcccccgaccaggcttgccatcttgccaaacaggcctttgatgatgccattgctgaacttgacactttgagcgaggagagctacaaggactccactctcattatgcagcttctgcgtgacaatctgactttgtggacttcatccgaggccgagacctctggtgccgctggccaggccgatgctcccgccaaggaggagtctggggctgctgctgaggctcctgctgccgccgagcagactaaggcctctgagtaaaatgggtgattatgttgccaaaataaatgctttgatcactatggtatccggcgggctggtgtctacggagtggacggaagactcgttattttttttttgtgtttgatcaagagcttcggcatcttttaggtaaacgtgcgtatacaatggatggagacgtcgaatatgcccctacgggctggtactgaggcctaaaggagagcattttttcttggaagttctgcttttagacccttgatgcttgcgattgtctggacaaataaaaaatactaaaattgctttcaatacacgaaacaaatgggcccaaaaaaaaaaaaaaaaaaaaaaaaaaaaaaaaaaaaaaaaaaaaaaaaaaaaaaaaaaa

SEQ ID NO: 148916 - protein, 269 aa, Metarhizium anisopliae
MGHEDAVYLAKLAEQAERYEEMVENMKIVASEDRDLTVEERNLLSVAYKNVIGARRASWRIVTSIEQKEESKGNSSQVTLIKEYRQKIEAELAKICDDILDVLDKHLIPSAKSGESKVFYHKMKGDYHRYLAEFAIGDRRKDSADKSLEAYKAATEVAQTELPPTHPIRLGLALNFSVFYYEILNAPDQACHLAKQAFDDAIAELDTLSEESYKDSTLIMQLLRDNLTLWTSSEAETSGAAGQADAPAKEESGAAAEAPAAAEQTKASE

SEQ ID NO: 148917 - DNA, 884 bp, Glomus intraradices
  CDS (1)..(783)
atggaacgcgagaaccagacctccaacaaaaaggtttatatggctaagctcgctgagcaagccgaacgttatgatgaaatggtatcttatatgaaggatgttgcaaagcttggagtagaacttactgtagaagaacgcaatctcctctcagtcgcttataagaatgtaattggtgcccgtcgagcgtcttggagaattatttcatctatcgaacaaaaggaagaaaataagggtaatgaaacccaagttcagaagatcaaagcttaccgtcaaaaagttgaaaccgaactttcagaagtatgctcggatatccttgccgtattggacgagcatttgattccatctgctgaagccggtgaatctaaggtcttttattataagatgaaaggtgattatcaccgatatctcgctgaatttgcttcgggtgaaggacgaaaagaagccgccacccaggctcacgaagcttataaacacgcaacagatatcgcccaaactgaccttgctccaactcatcctattcgtcttggacttgcattaaacttttcagttttctactacgagattctcaattcacctgatcgcgcttgtcatcttgcaaaacaggcatttgatgatgctattgctgaactcgatactttaagtgaagaatcgtataaagatagcacattaattatgcaactacttagagataacttgaccctttggacttcagacttgcaagatgcagagggtgaaaaaccggaagaagctaaacaagaagttgaagctgaagaatctaagtagcaatagttagttaattttattaaaaaatatatatttcgcacttcatatatataaaaaaaaaaaaaaaaaaaaaaaaaaaaaaaaaaaaaaaaaaaaaaaaa

SEQ ID NO: 148918 - protein, 260 aa, Glomus intraradices
MERENQTSNKKVYMAKLAEQAERYDEMVSYMKDVAKLGVELTVEERNLLSVAYKNVIGARRASWRIISSIEQKEENKGNETQVQKIKAYRQKVETELSEVCSDILAVLDEHLIPSAEAGESKVFYYKMKGDYHRYLAEFASGEGRKEAATQAHEAYKHATDIAQTDLAPTHPIRLGLALNFSVFYYEILNSPDRACHLAKQAFDDAIAELDTLSEESYKDSTLIMQLLRDNLTLWTSDLQDAEGEKPEEAKQEVEAEESK

SEQ ID NO: 148919 - DNA, 786 bp, Aspergillus oryzae
  CDS (1)..(786)
atgggtcacgaagatgctgtttatctggccaagctcgccgagcaggccgagcgctacgaagagatggtcgagaacatgaaggttgtcgcctctgccgatgtagagcttaccgttgaggagcgcaatctcctgtccgtcgcctacaagaacgtcatcggtgcccgccgtgcttcctggagaatcgtcacctctattgagcaaaaagaagagtccaagggcaacgagtcccaggtcaccctcattaaggagtaccgtcagaagatcgagtctgagctcgctaagatctgcgatgatatcctcgaggttctcgacaagcacctgatcccctctgcccagagcggcgagtctaaggtcttctaccacaagatgaagggtgactaccaccgttatcttgccgagttcgccatcggtgaccgccgtaagggcgctgccgatgcctctcttgaggcctataaggccgccactgaagttgcccagactgaccttgctcctacccaccccatccgtcttggtctggctcttaacttctccgtcttctactacgagatcctcaactcccctgaccaggcttgccacctggccaagcttgctttcgatgatgccattgctgagcttgacaccctgagcgaggagagctacaaggactctaccctgatcatgcagcttctcagagacaacctgaccctctggacctcgtctgaggccgagccggctgctgagaacgcctccaccgagaagaaggaggaggcccccgctgctgagggcgagaagcccgccgctgagtaa

SEQ ID NO: 148920 - protein, 261 aa, Aspergillus oryzae
MGHEDAVYLAKLAEQAERYEEMVENMKVVASADVELTVEERNLLSVAYKNVIGARRASWRIVTSIEQKEESKGNESQVTLIKEYRQKIESELAKICDDILEVLDKHLIPSAQSGESKVFYHKMKGDYHRYLAEFAIGDRRKGAADASLEAYKAATEVAQTDLAPTHPIRLGLALNFSVFYYEILNSPDQACHLAKLAFDDAIAELDTLSEESYKDSTLIMQLLRDNLTLWTSSEAEPAAENASTEKKEEAPAAEGEKPAAE

SEQ ID NO: 148921 - DNA, 822 bp, Aspergillus oryzae
  CDS (1)..(822)
atgacttctgagacattcctcgcccgcctttgcgagcaggctgagcgctacgatgatcgcttcccccgcaccccttttcttgccttgctgaccccgcatcagattggaggcgagcttaccgtcgatgagcgtaaccttctttccgttgcctacaagaacgtggtcggcacccgccgtgcttcctggcgtatcatctcctccattgaacagaaggaggagtccaagggctctgagcaacacgtctcgatcatccgtgactaccgacagaagatcgaaaccgagctggagaaggtctgccaggatgttcttgacgttctggacgagtccctcattcccaaggccgagactggcgagtccaaggttttttactacaagatgaagggcgactaccaccgttatcttgctgaatttgcttctggcaacaagcgtaaggttgctgctactgctgcccacgaggcctacaagaacgccaccgacgttgcccagactgatctcacccccactcaccccatccgcttgggtcttgccttgaacttctccgtgttctactacgagatcctgaactctcccgatcgtgcctgccaccttgccaagcaggctttcgatgatgccatcgccgagcttgattcgctctcggaggaaagctaccgtgacagcacccttatcatgcagctcctgcgtgacaaccttaccctttggacttcttccgatggccaggagcccgagggtgctgcttctaaggaagacaagcctgaagaggagtctgcccctgcccccgaggacaagggtgaggaatccaagcctgccgcccctgagtcttaa

SEQ ID NO: 148922 - protein, 273 aa, Aspergillus oryzae
MTSETFLARLCEQAERYDDRFPRTPFLALLTPHQIGGELTVDERNLLSVAYKNVVGTRRASWRIISSIEQKEESKGSEQHVSIIRDYRQKIETELEKVCQDVLDVLDESLIPKAETGESKVFYYKMKGDYHRYLAEFASGNKRKVAATAAHEAYKNATDVAQTDLTPTHPIRLGLALNFSVFYYEILNSPDRACHLAKQAFDDAIAELDSLSEESYRDSTLIMQLLRDNLTLWTSSDGQEPEGAASKEDKPEEESAPAPEDKGEESKPAAPES

SEQ ID NO: 148923 - DNA, 1166 bp, Cucurbita pepo
  CDS (99)..(926)
ggcacgagaaatactccaactccttcggttccttctcctcgatttcgattccgccctcttgaactcataagatctaatcgttcctctttgtttctgcaatggcgggtcgctcttcccctcgcgaggagtttgtttaccttgctaagcttgccgagcaggccgagcgctacgaggagatggttgagtttatggaaaaggtctccgccgccgtagacaacgaggagcttaccgtcgaggagcggaaccttctctctgttgcttacaagaatgttattggagcgcgtagagcttcctggaggattatttcctccattgagcagaaggaggagagccgagggaacgatgatcatgtctcgatcatccgagattacagatccaagattgagactgagctgtctaacatctgcggattccggatccttaatcttcttgactcgcgccttattccctccgctgcgtccggagactccaaggtgttttatctcaaaatgaagggcgattatcatagatacctggctgaattcaagaccggagccgaacgaaaggaagctgccgaaagtaccctcactgcttataaatctgctcaggatattgcaaatgctgaacttcctcctactcaccccatacgacttgggctggctttgaacttctcagtgttctactatgagattctgaattcccctgatcgtgcttgcagccttgctaaacaggctttcgacgaggcaattgctgaattggatactctgggcgaagaatcatacaaagatagcactttgatcatgcaacttcttcgtgacaacctcaccctatggacttcggacatcagaggtagtagggatgacatcaaagaagcagctcccaaacgcgattgtacgaatagtagtgagcaaatcgatttgcacgtgcaggattcaacttctccttaacatgttttattctggagaagtgcttgtttggaactttggcttttccattgttatctaggtatttcttagccttataataatcatcaccacactctggaaaaaacgtgctcgtttgtctttcccccgacccctcgtttctttttcttctattgaccaatcaattccatgtctctgaattggcttttttaatccaatataaatgctacatattattaagcaaaaaaaaaaaaaaaaaactca

SEQ ID NO: 148924 - protein, 275 aa, Cucurbita pepo
MAGRSSPREEFVYLAKLAEQAERYEEMVEFMEKVSAAVDNEELTVEERNLLSVAYKNVIGARRASWRIISSIEQKEESRGNDDHVSIIRDYRSKIETELSNICGFRILNLLDSRLIPSAASGDSKVFYLKMKGDYHRYLAEFKTGAERKEAAESTLTAYKSAQDIANAELPPTHPIRLGLALNFSVFYYEILNSPDRACSLAKQAFDEAIAELDTLGEESYKDSTLIMQLLRDNLTLWTSDIRGSRDDIKEAAPKRDCTNSSEQIDLHVQDSTSP

SEQ ID NO: 148925 - DNA, 1056 bp, Paxillus involutus
  CDS (70)..(834)
gaaaccatcatcttccccactttctctcttcacactcgtaccgtttacccctcttcaacaccacctacaatgcctgaatcgcgcgaagactccgtctaccttgccaagctcgctgaacaagctgagcgttatgaagagatggtcgagaacatgaagcgcgtggcttcgtcggaccaggagctcactgtcgaggagcgcaatctcctctcagtcgcgtacaagaatgtcattggtgcacgccgtgcatcttggcgtatcgtctcgtcgattgagcagaaggaggagtccaagggtaacgaggcccaggttgccatgatcaagggttaccgggagaagatcgagactgagctcgccaagatttgcgaggatatcctcgatgtccttgacaagcacctcatcccttccgctgcttctggcgagtccaaggtcttctaccacaagatgatgggtgactaccaccgctacctcgccgagttcgcgactggtgacaagcgcaaggacagcgctgacaaatctttggccgcctacaaggatgcctccgacgttgccgtcactgagctcccaccgacgcaccctatccgtctcggtctggcattgaacttctccgtgttctactacgaaatcctcaacagccccgaccgcgcttgccaccttgccaagcaggcattcgatgatgctattgctgagctcgacaccctctcggaggagagttacaaagactcaacgctcatcatgcaactactacgggacaaccttaccctctggacgtcggacatgcaagacactgacaagacagactcgaaagatgagggtgagaatgctggggatgactaaatggtctcgtcgtgcatcttggctctgctcttccgcttctacacacatcgactgatgtgcaacgactgcacacgttccttgggtgcttgcctccattacatatcatttgcatcgtctcacctcccgcatcctttccttacctttcccacctttgttgttattataccgtagtatgctgcggtggctcgttgtctctggtgccatagaggcgaatacaaagaa

SEQ ID NO: 148926 - protein, 254 aa, Paxillus involutus
MPESREDSVYLAKLAEQAERYEEMVENMKRVASSDQELTVEERNLLSVAYKNVIGARRASWRIVSSIEQKEESKGNEAQVAMIKGYREKIETELAKICEDILDVLDKHLIPSAASGESKVFYHKMMGDYHRYLAEFATGDKRKDSADKSLAAYKDASDVAVTELPPTHPIRLGLALNFSVFYYEILNSPDRACHLAKQAFDDAIAELDTLSEESYKDSTLIMQLLRDNLTLWTSDMQDTDKTDSKDEGENAGDD

SEQ ID NO: 148927 - DNA, 1020 bp, Haematococcus pluvialis
  CDS (49)..(783)
cacctagcgtgccaagtagcaagagctagagcaaactagacaccaacaatggcgacagaacgcgagcttgccctgtactcggcaaaactatccgagcaggcagaacgctacccagatatggtgtcagaaatgaagaagattgctgctggcgctcaagaccaagagctgtcagtggaggagcgtaacctgctatccgtggcttacaagaacctcgttggagctcgccgtgcttcctggcgcattcttcagagcgtggagcaaagcgagctggccaaaggcaacgagaagcgggtaaaactcattcagaaataccgcactgtcgtggagaaggagttggacgaggtctgcggcgagatcctcagcctgcttgacacttaccttgtgccatcagctagcagtgttgaggcatccgtcttctacctgaagatgaaggctgactaccaccggtacctcgctgaattcaaggtggacgaggatagaaggagtgcagcagagaagacactggaggcctacaaggcggcacagaacaaggccacgtctgagcttccctccaccaaccccatccgtttaggcctggcactcaacttctctgtgttctactatgaagtgctgaaccagcctgatcaggcatgctctttggcaaagcaggcctttgatgaggccatctctgacctggacaccctgggcgaggattcttacaaggattcagccctgatcatgcagctgcttcgtgacaacctgaccctgtggacatcagaaatgcaggactctaagccagagtagctggagccgctcatgcagcacatgagagcaagcagcatccgtggcgctgcatactagcgcacatgaatggcactcgctcttgctatctgttgtgaggcatgctagaagtggcatggtagcacagaacttgatgtgacatagcaacagggtgtgttgcactctgcaaactggcatagcaagtaggataacctgatggagttcatctgtcagtgttgtctggatctaaaaaaaaaaaaa

SEQ ID NO: 148928 - protein, 244 aa, Haematococcus pluvialis
MATERELALYSAKLSEQAERYPDMVSEMKKIAAGAQDQELSVEERNLLSVAYKNLVGARRASWRILQSVEQSELAKGNEKRVKLIQKYRTVVEKELDEVCGEILSLLDTYLVPSASSVEASVFYLKMKADYHRYLAEFKVDEDRRSAAEKTLEAYKAAQNKATSELPSTNPIRLGLALNFSVFYYEVLNQPDQACSLAKQAFDEAISDLDTLGEDSYKDSALIMQLLRDNLTLWTSEMQDSKPE

SEQ ID NO: 148929 - DNA, 1081 bp, Phanerochaete chrysosporium
  CDS (1)..(768)
atggcccagtcgcgtgaagactctgtctacctcgccaagctcgctgagcaggctgagcggtatgaggagatggttgagaacatgaagcgcgttgcctcgtccgaccaggagctcactgtcgaggagcgtaaccttctttccgccgcatacaagaacgtcatcggcgcgcgccgtgcgtcgtggcgcatcgtctcctccattgagcagaaggaggagtccaagggcaacgaggcccaggttgccatgattaagggctaccgggagaagattgagagcgagcttgcgaagatctgcgaggacatcctcgacgttcttgagaagcacctcatcccctcggcggcatctggcgagtcgaaggtcttctaccacaagatgatgggtgactaccaccgttacctcgccgagttcgccaccggtgacaagcgcaaggagagcgccgacaagtccctggaggcttacaaggcggcgtccgatgttgctgtcactgagctcccaccaacacaccccatccgcctcggtctcgccctcaacttctccgtcttctactatgagatcctcaacagccccgaccgcgcctgccacttggcgaagcaggcgttcgacgacgcgattgctgagctcgacacactatcggaggagagctacaaggactcgacgctcatcatgcagctcccccgtgacaacctcacactctggacctcagacatgcaggactctgacaagcctgctgatgagaagccctcggatgaggccgacaacgagtcttaaaggcttcgttgtttctgcttgtccggtctgaacggttcacgatgaaccggaggacgttgtcgcccgtcgctgtcgtctttctcattgtttcccagtaatcatctgcattctctcgcatctcgtaccatatcgcatccgtaacgaccgcatatttcttcaggccgattctcctccttgtcgtccatgccgttctctgttgagttttcttatcttgatacttaatagtctggggcagtggctgtgtcgtacaagaggaagtgtgaacaaataaacatcagaatatctgaaaaaaaaaaaaaaaaaaaaaaaaaaa

SEQ ID NO: 148930 - protein, 255 aa, Phanerochaete chrysosporium
MAQSREDSVYLAKLAEQAERYEEMVENMKRVASSDQELTVEERNLLSAAYKNVIGARRASWRIVSSIEQKEESKGNEAQVAMIKGYREKIESELAKICEDILDVLEKHLIPSAASGESKVFYHKMMGDYHRYLAEFATGDKRKESADKSLEAYKAASDVAVTELPPTHPIRLGLALNFSVFYYEILNSPDRACHLAKQAFDDAIAELDTLSEESYKDSTLIMQLPRDNLTLWTSDMQDSDKPADEKPSDEADNES

SEQ ID NO: 148931 - DNA, 1485 bp, Dunaliella salina
  CDS (86)..(862)
ctttactctagagggtctgacctcacacaaagccgctccacaccagtctcagcaggtcagcccacaccagctcacacagcgcaccatggctgaggcgagagaggagtgcacctacctggccaagttggcggagcaggcggagcggtacgatgagatggtggaggagatgaagaaggtcggccgcatggtgcacgaccaggagctgtccgtggaggagcgcaacctgctgtcggtggcgtacaagaacgttattggcgcacggcgtgcctcctggcgcatcatctccagcatagagcagaaggaggagagcaaaggcaacgaggagcatgtgcagcgcatcaggagctaccgcaagatggtggagaaggagctgagcgacatctgcagcagcatcctgcagctactggatgagcacctcatccccacagcgtccaccggcgagtcgaaggtgttctacctgaagatgaagggcgactaccaccgctacctggccgagttcaagaccggctccgaccgcaaggaggccgcggagcacacgctgctggcttacaaggccgcccaggacatcgcgctggttgacctgccccccacgcaccccatccgcctgggcctggcgctcaacttctccgtcttctactacgagatcctcaactcgcccgagcgtgcctgccacctggccaagcaggccttcgatgaggccattgcagagctggacaccctgggcgaggagagctacaaggacagcacccttatcatgcagctgctgcgggacaacctgacgctgtggacctcagacatgcagggacctgacgctgagggtggtggcggtggtgagatgaaggttgaggaggccgatgcctaagccactgtcgcaaggtgaagcaagtgctctggagggctctctgttgtgcagaacctcttctgagctggcttctcgcgtttgcttctggcccctccagcgtctgccaggccgcgggtggcaacagcgtgattcggggtggctcgctgtcagctcgcccgtttgtttggcactccaccatcaaagttgctttcaggcttcgcctggtctatcgagtttaacccccttgctgcatgcaagacagcccctgcgtttgtgtgttataccagatgcctggttgtgtgagaaatggtttgggacgcctgcgttccccacccaacttctggatctgccatttatcgggacagaggagggttacttccatgagaaaattaggaggttcatcaggcttggtaggcttagcacctgcacgttcaattgtatactcagcaggccccaaggatatggcctgcctgtgtctctttcattcttagctgtgcgattacagtgtgtgctgatgggtgtttgactcaagtgtgtgacaggctgctgtgcctgaaactgtatgacctattggattcaagtaactggatgctgctgaatgctgttaatgctccctacatgaaaaaaaaaaaaaaaaaaaaaaa

SEQ ID NO: 148932 - protein, 258 aa, Dunaliella salina
MAEAREECTYLAKLAEQAERYDEMVEEMKKVGRMVHDQELSVEERNLLSVAYKNVIGARRASWRIISSIEQKEESKGNEEHVQRIRSYRKMVEKELSDICSSILQLLDEHLIPTASTGESKVFYLKMKGDYHRYLAEFKTGSDRKEAAEHTLLAYKAAQDIALVDLPPTHPIRLGLALNFSVFYYEILNSPERACHLAKQAFDEAIAELDTLGEESYKDSTLIMQLLRDNLTLWTSDMQGPDAEGGGGGEMKVEEADA

SEQ ID NO: 148933 - DNA, 762 bp, Aspergillus flavus
  CDS (1)..(762)
atgggtcacgaagatgctgtttatctggccaagctcgccgagcaggccgagcgctacgaaatggtcgagaacatgaaggttgtcgcctctgccgatgtagagcttaccgttgaggagcgcaatctcctgtccgtcgtctacaagaacgtcatcggtgcccgccgtgcttcctggagaatcgtcacctctattgagcaaaaagaagagtccaagggcaacgagtcccaggtcacacttattaaggagtaccggcagaagatcgagtctgagcttgctaagatctgcgatgatatccttgagggtcttgacaagcacctgatcccctctggccagagcggcgagtctaagggcttctaccacaagataggtgactaccaccgttatcttgccgagttcgccatcggtgaccgccgtaagggcgctgccgatgcctctcttgaggcctataaggccgccactgaagttgcccagactgaccttactcctacccaccccatccgtcttggtctggctcttaacttctccgtcttctactacgagatcctcaactcccctggccaggcttgccacctggccaagcttgctttcgatgatgccattgctgagcttgacaccctgagcgaggagagctacaaggactctaccctgatcatgcagcttctcagagacaacctgcttgacaccctgagcgaggagagctacaaggactctaccctgatcatgcagcttctcagagacaaccaccctctggacctcgtctga

SEQ ID NO: 148934 - protein, 253 aa, Aspergillus flavus
MGHEDAVYLAKLAEQAERYEMVENMKVVASADVELTVEERNLLSVVYKNVIGARRASWRIVTSIEQKEESKGNESQVTLIKEYRQKIESELAKICDDILEGLDKHLIPSGQSGESKGFYHKIGDYHRYLAEFAIGDRRKGAADASLEAYKAATEVAQTDLTPTHPIRLGLALNFSVFYYEILNSPGQACHLAKLAFDDAIAELDTLSEESYKDSTLIMQLLRDNLLDTLSEESYKDSTLIMQLLRDNHPLDLV

SEQ ID NO: 148935 - DNA, 1054 bp, Tropaeolum majus
  CDS (90)..(869)
acgggggatctccttcttccctctttctttccatctccatttttgttcttcttcaacttttcaaacaaatccacaatctctaacaacccatggcgtcagctcgtgaggagagcgtttacatggctaagcttgccgagcaagctgagcggtacgaggagatggttgagtttatggaaaaggtttctgcatctgctgaaggtgaggaactcaccgtcgaggaacgaaacttgctctctgttgcttacaagaacgtgattggtgctaggcgtgcctcgtggcgtactatctcttccatcgagcagaaggaggaaggacgcggtaacgaggatcatgttactgtgatccgtgactataggtctaagatcgagtctgagctctcgaatatctgcgatgggatcttgaaattgcttgacactaggcttatcccgtctgcatcttctggtgattccaaggtgttttaccttaagatgaagggagattaccataggtacttggctgagtttaagactggcgcagagagaaaggaagctgctgagagtactctaactgcttacaaagctgctcaggatattgctaactcagaattggccccaactcatcccatccgtcttggattagctctcaacttctctgtcttttactatgagatcctcaattcccctgatcgtgcctgcaaccttgccaaacaggcatttgatgaggccattgctgagttggatactctcggcgaggaatcatacaaggacagcaccttgatcatgcagcttctgcgtgacaatctcactctgtggacctcagacatgcaggatgatggagcggatgagattaaggaagcagcagcacctaagcctgctgaagaacagcagtgagactggtttggctccaaaaattaggactgaactttctcctctatatgtttttgataggagaggttgtttgtttctattttccatgattatcatcgccaagttttctatctttaggcattcttgttgtggtttactgaatcatgaatgtactgtttattttttccttacaaaaaaaaaaaaaaaaa

SEQ ID NO: 148936 - protein, 259 aa, Tropaeolum majus
MASAREESVYMAKLAEQAERYEEMVEFMEKVSASAEGEELTVEERNLLSVAYKNVIGARRASWRTISSIEQKEEGRGNEDHVTVIRDYRSKIESELSNICDGILKLLDTRLIPSASSGDSKVFYLKMKGDYHRYLAEFKTGAERKEAAESTLTAYKAAQDIANSELAPTHPIRLGLALNFSVFYYEILNSPDRACNLAKQAFDEAIAELDTLGEESYKDSTLIMQLLRDNLTLWTSDMQDDGADEIKEAAAPKPAEEQQ

SEQ ID NO: 148937 - DNA, 1079 bp, Solanum chacoense
  CDS (54)..(821)
caactttctctctctaaaacccctctttctctctctagaacacagaaccatcaatggcgtctccacgtgaagagaacgtgtacatggcgaagcttgctgagcaagctgaacgctatgaggagatggtagaattcatggagaaggttgtcgccgccttggacggcgaggaactaaccgtcgaggaacgcaaccttctctccgtcgcatacaaaaacgtgatcggagctaggagagcatcctggcgtataatttcatcgatcgagcagaaagaggagagtcgtggtaacgaagatcacgttgcctccattaaaaaatacagatctcagatcgagaatgagctgacttcgatctgtaacggcatcctcaagttgcttgattcaaaactcatcgggtcagctgctaccggagactccaaagttttctatttgaaaatgaagggagattattaccggtacttggctgagttcaaaaccggaactgagagaaaagaagctgcagagaatactctttcggcctacaagtctgctcaggatattgctaatggcgaattggccccaacacatcccatccgattgggtctagctctcaatttctcagtgttttactatgaaatattgaattctcctgaccgtgcttgtaatctcgccaaacaggcctttgatgaggcaattgcggagcttgacaccctgggagaggagtcctacaaggatagcactttgattatgcaacttctgcgtgataacctcactttgtggacctcggatatgcaggatgatggaactgatgagatcaaagaaccatcaaaagctgataatgagtagtaacaacgtgagtgaaacctctttgcttaggattgaaaaccgatgatgtaattttactcattgatcaaaattggctgtttgtagtccttatcctgtgatttgtaatacctattacctaaaggcgttgtttcttgccatttgttgttttcatcaaagattactttttgtctcagtatttctcttgtatttggatgctctgatgaagctctcttatttcgtggaaatgaattcttatttttaaaaaaaaaaaaaaaaaaa

SEQ ID NO: 148938 - protein, 255 aa, Solanum chacoense
MASPREENVYMAKLAEQAERYEEMVEFMEKVVAALDGEELTVEERNLLSVAYKNVIGARRASWRIISSIEQKEESRGNEDHVASIKKYRSQIENELTSICNGILKLLDSKLIGSAATGDSKVFYLKMKGDYYRYLAEFKTGTERKEAAENTLSAYKSAQDIANGELAPTHPIRLGLALNFSVFYYEILNSPDRACNLAKQAFDEAIAELDTLGEESYKDSTLIMQLLRDNLTLWTSDMQDDGTDEIKEPSKADNE

SEQ ID NO: 148939 - DNA, 798 bp, Paracoccidioides brasiliensis
  CDS (1)..(798)
atgggttacgaagatgctgtatatctcgccaagctcgccgagcaggccgagcgctacgaagaaatggtggaaaacatgaagattgtggcttctgcagacaaggagctatccgtcgaggagcgcaatctgctttccgttgcctataagaacgtgattggcgcccgacgtgcctcgtggagaatcgttacttcgatcgaacaaaaggaggagtcgaaaggcaacgaggcgcaggttgctcttatcaaggagtaccgccaaaacatcgagactgagttggccaagatctgtgaggatatcttggatgtgcttgacaagcaccttatcgcctctgcggaaactggagaatccaaggttttctaccacaagatgaagggggactaccaccgttatctcgccgagttcgctcttggagacaagcgcaaggactccgctgacaagtcgctggaggcttacaagaacgcaactgaggttgctcagaccgatcttgcccctacccaccccatccgtctgggtcttgctctcaacttctccgtcttctactatgaaatcctgaattctccagaccaggcttgccacctcgccaaacaagctttcgatgacgctattgctgaacttgacacacttagcgaggagagctacaaggactccactcttattatgcaactcttgagagacaacctgactctctggacatcatctgaggctgaacccgcccccgaggtggcccctgccccatctgagcaaaaggatgaagcccctgctgctactagcgaggatgctcctaaggccgctgagtag

SEQ ID NO: 148940 - protein, 265 aa, Paracoccidioides brasiliensis
MGYEDAVYLAKLAEQAERYEEMVENMKIVASADKELSVEERNLLSVAYKNVIGARRASWRIVTSIEQKEESKGNEAQVALIKEYRQNIETELAKICEDILDVLDKHLIASAETGESKVFYHKMKGDYHRYLAEFALGDKRKDSADKSLEAYKNATEVAQTDLAPTHPIRLGLALNFSVFYYEILNSPDQACHLAKQAFDDAIAELDTLSEESYKDSTLIMQLLRDNLTLWTSSEAEPAPEVAPAPSEQKDEAPAATSEDAPKAAE

SEQ ID NO: 148941 - DNA, 1021 bp, Nicotiana tabacum
  CDS (22)..(804)
gttttttcacaaacaacaaatatggccgagtcatcgcgtgaagaaaatgtgtacatggccaagctagctgagcaggccgagcgatatgaggaaatgattgagtttatggaaaaggttgcaaagacaggtgatgtcgaggagctgactgttgaggaaaggaatcttctttctgtggcatacaaaaatgtgattggcgcaagaagggcctcgtggaggataatctcttcaattgagcagaaagaggagagtcgtggaaatgaagatcatgtcaaaactattaaagaatacagagccaaaattgaggctgaactcagcaagatatgtgatgggattttgggtctccttgagtcccatttaataccatcagcctccacagctgagtccaaagttttttacttgaagatgaaaggtgattaccacaggtacctggctgagtttaaaacaggttcagagaggaaagaagctgctgagaacaccttattggcatacaagtctgctcaggatattgctttgactgagctggctcctactcacccaatcaggctgggacttgcccttaacttttctgtgttctattatgagattcttaattcacctgatcgtgcttgtaaccttgcgaaacaggcctttgatgaagctatctcagagttggatacgctgggcgaggaatcttacaaggacagtacattgatcatgcaacttctcagagacaatcttacactttggacttcagataatgcggaggatgctgaggatgatatcaaggaagctccaaagcatgagtcaggcgaggggcagcagtgatgagttagtagcatagtcttttagtctttattttatagggtgctgcttgaggatatagccagatcgtgaattagatacttcaatggctgtgtgtgtcactgtctaaatggttcaatataaaacatgtcgtagtgtgatagaatatgtggtcaagatagtcgcttagtgctatggtgattaaaatttgacatggtggcattaaaaaaaaaaaaaaaaa

SEQ ID NO: 148942 - protein, 260 aa, Nicotiana tabacum
MAESSREENVYMAKLAEQAERYEEMIEFMEKVAKTGDVEELTVEERNLLSVAYKNVIGARRASWRIISSIEQKEESRGNEDHVKTIKEYRAKIEAELSKICDGILGLLESHLIPSASTAESKVFYLKMKGDYHRYLAEFKTGSERKEAAENTLLAYKSAQDIALTELAPTHPIRLGLALNFSVFYYEILNSPDRACNLAKQAFDEAISELDTLGEESYKDSTLIMQLLRDNLTLWTSDNAEDAEDDIKEAPKHESGEGQQ

SEQ ID NO: 148943 - DNA, 1145 bp, Nicotiana tabacum
  CDS (50)..(832)
atcagaaaccacccgctgcataaccctaggtttttcacaaacaacaaacatggccgattcatcgcgtgaagaaaatgtgtacatggccaagctagctgagcaggccgagcgatatgaggaaatgattgagtttatggagaaggttgcaaagacaggtgatgtcgaggagctgactgttgaggaaaggaatcttctttctgtggcctacaaaaatgtgattggtgcaagaagggcctcgtggaggataatctcttcaattgagcagaaagaggagagtcgtggaaatgaagatcatgtcaaaactattaaagaatacagagccaaaattgaggctgaactcagcaagatctgtgatgggattttgggtctccttgagtcccatttaataccatcagcctcagcagctgagtccaaagttttttacttgaagatgaaaggtgattaccacaggtacctggctgagtttaaaacagggtcagagaggaaagaagctgctgagaacaccttattggcatacaagtctgctcaggatattgctttgactgagctggctcctactcacccaatcaggctgggacttgcccttaacttttctgtgttctattatgaaattcttaattcacctgatcgtgcttgtaaccttgcaaaacaggcctttgatgaagctatctcagagttggatacacttggcgaggaatcttacaaggacagtacattgatcatgcaacttctccgagacaatcttacactttggacttcagataatgcggaggatgctggggatgatatcaaggaagctccaaaacatgagtcaagcgaggggcagcagtgatgagttagtagcatagtcttgtagtctttattttatagggtgctgcatggggatatagcaagatcgtgaattagatacttcaatggctgtgtgtgtcactgtcgaaatggtttaatataaaacatgtagtgtgatagaatgtggtcaagctagtcgcatagtgctatggtgattaaaatttgatatggtggcagtatttgcttgtgttggtgactttgctcgtatttatagtcttatttgcatgttgcgtaatcatctttgtattttcaaattctttgaaatccttgaattaattgttaacatctaaaaaaaa

SEQ ID NO: 148944 - protein, 260 aa, Nicotiana tabacum
MADSSREENVYMAKLAEQAERYEEMIEFMEKVAKTGDVEELTVEERNLLSVAYKNVIGARRASWRIISSIEQKEESRGNEDHVKTIKEYRAKIEAELSKICDGILGLLESHLIPSASAAESKVFYLKMKGDYHRYLAEFKTGSERKEAAENTLLAYKSAQDIALTELAPTHPIRLGLALNFSVFYYEILNSPDRACNLAKQAFDEAISELDTLGEESYKDSTLIMQLLRDNLTLWTSDNAEDAGDDIKEAPKHESSEGQQ

SEQ ID NO: 148945 - DNA, 1047 bp, Nicotiana tabacum
  CDS (65)..(841)
tttctctccatttttctctttctacaaaattccctctctcatttcctctctcacagaaacatcaatggcgtcgccacgcgaagagaacgtgtacatggcaaagcttgccgagcaagccgagcgttacgaggagatggttgagttcatggagaaagtcgtcgccgccgccgacggcgctgaggaactaaccgtcgaagaacggaacctcctctccgtcgcatacaaaaatgttatcggagcacgacgagcctcgtggcgtatcatctcctccattgagcaaaaagaggagagccgcggtaacgaggatcacgttgcctccatcaaggagtacagatctaagatcgagaccgaactcacctcgatctgtaacggcattctcaagctcctcgattctaagctcattggcgccgctgctaccggcgattctaaggtgttttacttgaaaatgaaaggagattatcatcgttatttggccgagtttaagaccggtgccgagcgaaaggaagctgccgaaaacactctctcggcttacaaatccgctcaggatattgcaaataccgagcttgctcctacgcatccaattcgattgggacttgctctcaatttctctgtattctactacgagattttgaattcacctgatcgtgcttgtaatctcgccaaacaggcctttgatgaggccattgctgagctggacaccttgggcgaagagtcctacaaggatagcactctgatcatgcagcttcttcgcgataacctcactttatggacttcagatatgcaggatgatggaactgatgagatcaaagaagcagcaaaaccagataatgagcagcagtaaactggtgacatttctttaggattgaactgccatgttgtaactttttatttttcaattgtctgagttcagctcttttagttctagatcttatgatttgtaacacctaaaacaactgtttcttgttatttgttgcttttgtttgtttctttgtggatttatcttgtatttggataatttcctttttctcaaaggaatgacttattggg

SEQ ID NO: 148946 - protein, 258 aa, Nicotiana tabacum
MASPREENVYMAKLAEQAERYEEMVEFMEKVVAAADGAEELTVEERNLLSVAYKNVIGARRASWRIISSIEQKEESRGNEDHVASIKEYRSKIETELTSICNGILKLLDSKLIGAAATGDSKVFYLKMKGDYHRYLAEFKTGAERKEAAENTLSAYKSAQDIANTELAPTHPIRLGLALNFSVFYYEILNSPDRACNLAKQAFDEAIAELDTLGEESYKDSTLIMQLLRDNLTLWTSDMQDDGTDEIKEAAKPDNEQQ

SEQ ID NO: 148947 - DNA, 1134 bp, Nicotiana tabacum
  CDS (62)..(844)
gaaaatcgaaaaactccctcattcagatctccaaagaaaatacagagaaacaaatctaaacatggcggtggcaccgacggcgcgtgaggagaacgtgtatatggcaaagcttgcagagcaagctgagaggtacgaagaaatggttgaattcatggagaaggtctccaactccctgggctcagaagaactcaccgtggaagaacgaaacctcctctccgtggcgtataagaacgtgatcggagcgcgtagggcatcgtggcgtattatctcatcgattgagcaaaaggaagagtccagagggaacgaggaacacgtgaactctatccgcgagtacagatctaagattgagaatgagctctctaagatctgtgatggcattctgaaattgctcgatgcaaagcttatcccttctgcagcatctggtgattctaaggtgttttacctgaaaatgaaaggagattaccaccgctatttggctgagttcaagaccggtgctgaacgtaaggaggctgctgagagcactctcactgcctacaaagctgctcaggacattgctactactgaacttgccccaacacatcccatccgacttggactggctcttaacttctctgtgttttactatgagatcttgaactctcctgaccgcgcttgcaatcttgctaaacaggcctttgatgaagcaattgctgagttggatacattgggcgaggagtcttacaaggatagcactttgatcatgcaacttcttcgtgacaatctcactctctggacatctgatatgcaggatgatggggctgatgaaatcaaggaagatcccaaacctgatgaatccaaaaattgaaggaattgaaactctctaatttgcttttcacttcttcctggttgtttttattggaagaagctgattatcgttatttccttactattatggttttcaactagggggttgtcttcttattggaaatgaacaactttaatattgatgtttcagaagttccatctttaatttaatgtggttttctggtggttagttttcttctaaagcgtttgacttgttattgtgcactggatatatcaaatacatctgaagtgaaacccaacaatggtaatcaagctttcaaaaaaaaaaaa

SEQ ID NO: 148948 - protein, 260 aa, Nicotiana tabacum
MAVAPTAREENVYMAKLAEQAERYEEMVEFMEKVSNSLGSEELTVEERNLLSVAYKNVIGARRASWRIISSIEQKEESRGNEEHVNSIREYRSKIENELSKICDGILKLLDAKLIPSAASGDSKVFYLKMKGDYHRYLAEFKTGAERKEAAESTLTAYKAAQDIATTELAPTHPIRLGLALNFSVFYYEILNSPDRACNLAKQAFDEAIAELDTLGEESYKDSTLIMQLLRDNLTLWTSDMQDDGADEIKEDPKPDESKN

SEQ ID NO: 148949 - DNA, 1068 bp, Nicotiana tabacum
  CDS (78)..(845)
ccacgcgtccgctttccacattctctcaactttctctttctaaaactcttcctctttttctagcacacagaccttcaatggcatcgccgcgcgaggagaacgtgtacctggcgaagcttgctgagcaagccgaacgctacgaggagatggtagagttcatggagaaagtcgtcggcgccggcgacgacgaactcaccgtcgaggaacgcaacctcctctccgtcgcgtacaaaaatgtgatcggagcgaggcgagcgtcgtggcgcataatctcatcgatcgagcagaaagaagagagtcgcggtaacgaagatcacgtggcctccattaaaacctacagatctaagatcgaatctgaattgacttcgatctgcaatggtatccttaagttgctcgattcaaaactcattggcaccgctgctaccggtgactctaaggttttctatttgaaaatgaagggagattattacaggtacttggctgagttcaaaaccggagctgagagaaaagaagccgccgagaatactctttcggcttacaagtcggctcaggatattgctaatgttgaattagcccctacacatccaatccgattggggctagctctcaatttctcagtgttttactatgagatattgaactctcctgaccgtgcttgtaatctcgccaaacaggcatttgatgaggctattgcggagcttgacaccctgggagaggagtcctacaaggatagcactttgattatgcaacttcttcgtgataacctcactttgtggacctcggatatgcaggatgatggaactgatgagatcaaagaaccatcaaaagcggaggagcagcagtaatgtgagtgaagcctctttgcttaggattgaatcctatggcataactttgctcattgatcgaaatttgctgtttgtgtagttctgaattccctgaattgtaatacctaaaagcactgtttcttgccatttgttgttttcagcaaagattactttttctctcggtatttcccttgtatttggatgctccagtgaaactctcttatttcgtggaaatgaatgcttg

SEQ ID NO: 148950 - protein, 255 aa, Nicotiana tabacum
MASPREENVYLAKLAEQAERYEEMVEFMEKVVGAGDDELTVEERNLLSVAYKNVIGARRASWRIISSIEQKEESRGNEDHVASIKTYRSKIESELTSICNGILKLLDSKLIGTAATGDSKVFYLKMKGDYYRYLAEFKTGAERKEAAENTLSAYKSAQDIANVELAPTHPIRLGLALNFSVFYYEILNSPDRACNLAKQAFDEAIAELDTLGEESYKDSTLIMQLLRDNLTLWTSDMQDDGTDEIKEPSKAEEQQ

SEQ ID NO: 148951 - DNA, 750 bp, Triticum aestivum
  CDS (1)..(750)
atggctaagctcgccgagcaggctgagaggtacgaggagatggttgagttcatggagaaggtggccaagaccgtcgactccgaggaactcactgtggaggagcgcaacctgctctctgttgcatacaagaatgtgattggagcccgccgtgcctcatggcgcatcatctcctccattgagcagaaggaggagagccgtggcaacgaggaccgggtcacgctcatcaaggagtaccgtggcaagatcgagactgagcttagcaagatctgtgatggcatcctcaagctgctcgaaacccaccttgtcccgtcttccactgcccctgagtccaaggtcttctatcttaagatgaagggtgactactacagatatcttgccgaattcaagagtgggcctgagaggaaggatgctgctgagaataccatggtggcatacaaggctgctcaggatattgctttggctgagctggctccaactcatccgattaggcttgggctggcactaaacttctcggtgttctattatgagatcctcaactcgcctgatcgtgcttgcaatctcgcaaaacaggcattcgatgaggccatttcggagctggacaccttgagcgaagaatcctacaaggacagcaccttgatcatgcaactccttcgtgataacttgaccctctggacttccgacatcacggaggacaccgcggaggaggagatcagggaggctccgaagcatgactccagcgaggggcagtaa

SEQ ID NO: 148952 - protein, 249 aa, Triticum aestivum
MAKLAEQAERYEEMVEFMEKVAKTVDSEELTVEERNLLSVAYKNVIGARRASWRIISSIEQKEESRGNEDRVTLIKEYRGKIETELSKICDGILKLLETHLVPSSTAPESKVFYLKMKGDYYRYLAEFKSGPERKDAAENTMVAYKAAQDIALAELAPTHPIRLGLALNFSVFYYEILNSPDRACNLAKQAFDEAISELDTLSEESYKDSTLIMQLLRDNLTLWTSDITEDTAEEEIREAPKHDSSEGQ

SEQ ID NO: 148953 - DNA, 1579 bp, Paracoccidioides brasiliensis
  CDS (79)..(987)
cgcttccgcttcttccactcccacgctgtttagatcccaccatcccacaccgtctcccgttatccccctactgccaccatgacttcagaacgtgaaagcaagacgtttctcgccaggctctgcgagcaggctgaacgctacgatgaaatggttacatacatgaaggaagttgccaatttgggaggcgaactcaccgtcgacgaacgcaatcttctctctgttgcttacaaaaacgtcgttggtacccgtcgtgcttcttggcgcattatctcctccatcgagcagaaggaggactccaaaggctctgagaagcatgttgctatcatcagcgagtaccgccagaagatcgaaactgagctcgagcgcgtctgccaggatgttcttgatgttttggaccagtctttgattcccaaggcggagtctggtgaatccaaggttttctaccacaaaatgaagggggactatcaccgttatctcgctgagtttgcttcaggtaacaagcgcaaggttgccgccactgccgcccacgaggcttacaagaacgccaccgacgtcgcccaaactgaactgacaccaacccacccaatccgtctcggactcgccctcaacttctcagtcttctattacgagatcctcaactctcctgatcgcgcttgccacctggctaagcaggcgttcgatgatgctattgctgaactcgactcactctctgaagagtcttaccgcgatagcacgttgatcatgcagctgctgcgagacaacttgacgttgtggacgtcgtcggatggcgcagaacctgagccagttgctgctggtgatggaaaagatgataagacggctgagggtgaggaaggaccggcgactgcgactactactgatgcccctgctcctgaagaagtggctgcaccagctgctgcagatgaggagccaaaaaaggagggcacaaacggagtcttaaagtatgggtttaaaaagaatttattttaaaatgttttctattcccctgcttatgattcctgcttgctcctaaggttgtgtgtgtgtgcgagatataccatttgtgtgtgagagcgggaggaaaggggagcagggatgtccctgttgaaaacaaaaaaaattaaaccaaactaaccaacctaaagcaaaacaaacacacccaaaaaattgttttattttttcacatcaaatggggacgggaaaagcggaaagaaagcagagcgggcagaacaaggtcgatttgaaaatgggaatctgatgttgttatttggcgtgcgggcttgggtttctcagcggaatgccttctctcccaaggcgtgtgtctttgagcttttcactcaaataagggtttttttcaattggtacaagacaccagacaccagaggggtggatggagttttgcgattatttttttcttaaattatttatttgcaagagcgatgagaatgaacgggtggcggagatattatttcttttctttcttttcttccagtctccccccagtttatttctttcactgattaaatgtgtgttgattggtggtccctagatcaagggaaattctaacactcaaaaaaaaaaa

SEQ ID NO: 148954 - protein, 302 aa, Paracoccidioides brasiliensis
MTSERESKTFLARLCEQAERYDEMVTYMKEVANLGGELTVDERNLLSVAYKNVVGTRRASWRIISSIEQKEDSKGSEKHVAIISEYRQKIETELERVCQDVLDVLDQSLIPKAESGESKVFYHKMKGDYHRYLAEFASGNKRKVAATAAHEAYKNATDVAQTELTPTHPIRLGLALNFSVFYYEILNSPDRACHLAKQAFDDAIAELDSLSEESYRDSTLIMQLLRDNLTLWTSSDGAEPEPVAAGDGKDDKTAEGEEGPATATTTDAPAPEEVAAPAAADEEPKKEGTNGVLKYGFKKNLF

SEQ ID NO: 148955 - DNA, 807 bp, Arabidopsis thaliana
  CDS (46)..(807)
atgtcatcatcaggatccgacaaagagagagagacttttgtctatatggctaagctctccgaacaagccgagcgatacgacgagatggtggagacgatgaagaaagtggcgagggttaatagcgagctgactgtggaagagaggaatctgttgtcggttggttacaagaacgtgatcggagcaagaagagcttcgtggaggataatgtcgtccatcgagcagaaagaagagtctaaaggcaatgaatcaaacgtgaaacaaatcaagggttatcgccaaaaggtagaagatgagctcgctaacatttgccaagacattctcaccatcattgatcagcatctcatccctcacgctacctcaggggaagctaccgtcttctactacaagatgaaaggagattattaccgttacttggctgagtttaagaccgagcaagagaggaaggaagctgctgaacagtctctcaaaggctatgaggctgcaacacaagctgcaagcactgagcttccttcgacccatccaattcgtcttggccttgctcttaacttctctgttttctactatgagatcatgaactctcctgaaagagcttgccatttggctaagcaagccttcgatgaggcgattgcagagttagatactctaagtgaggagtcgtacaaggacagcactttgatcatgcagctcctgagagacaacctcaccctctggacttctgatcttcctgaagatggaggagaagacaacatcaagactgaagaatccaagcaagaacaggccaagcctgccgatgccactgagaactga

SEQ ID NO: 148956 - protein, 253 aa, Arabidopsis thaliana
MAKLSEQAERYDEMVETMKKVARVNSELTVEERNLLSVGYKNVIGARRASWRIMSSIEQKEESKGNESNVKQIKGYRQKVEDELANICQDILTIIDQHLIPHATSGEATVFYYKMKGDYYRYLAEFKTEQERKEAAEQSLKGYEAATQAASTELPSTHPIRLGLALNFSVFYYEIMNSPERACHLAKQAFDEAIAELDTLSEESYKDSTLIMQLLRDNLTLWTSDLPEDGGEDNIKTEESKQEQAKPADATEN

SEQ ID NO: 148957 - DNA, 1090 bp, Nicotiana tabacum
  CDS (65)..(841)
ttttctctctctacaaaacttcctctttatttcctctctcatttcctctctcacagcaacatcaatggcgtcgccacgcgaggagaacgtgtacatggcaaagcttgccgagcaagccgagcgttacgaggagatggttgagttcatggagaaagtcgtcgctgctgccgacggcgccgaggaacttaccgtcgaagaacgcaacctcctctccgtcgcgtacaaaaacgtaatcggagcacggcgagcctcgtggcgtatcatctcctccattgagcaaaaagaggagagccgcggcaacgaagatcacgttgcctccattaaggagtacagatctaagatcgagaccgaactcacctcgatctgtaacggcattctcaagctcctcgattctaagctcattggcgccgctgctaccggtgactctaaggtgttttacttgaaaatgaaaggagattatcatcgctatttggctgagtttaaaaccggtgccgagcgaaaggaagccgccgaaaacactctctcggcttacaaatccgctcaggatattgcaaataccgagctcgctcctacacatccaatccgattgggacttgctctcaatttctctgtattttactacgagattttgaattcttctgatcgtgcttgtaatctcgccaaacaggcctttgatgaggcaattgccgagctggacacattgggcgaagagtcctacaaggatagcactctgatcatgcagcttcttcgtgataacctcactttatggacttcagatatgcaggatgatggaactgatgagatcaaagaagcagcaaaaccagacaatgagcagcagtaaactggtgacatttatttaggattgaaattccatgttgcaactttttatttttcaattgtctgagttcagctcttttagttctagatattgtgatttgtaatacctaaaacaactgtttcttgttatttgttgtttttgtttgtttctctgtggatttatcttgtatttggacaatttcctttttctcaaaggaatgacttattgggaatttgatctaccttttcaattcacaaaaaaaaaaaaaaaaaa

SEQ ID NO: 148958 - protein, 258 aa, Nicotiana tabacum
MASPREENVYMAKLAEQAERYEEMVEFMEKVVAAADGAEELTVEERNLLSVAYKNVIGARRASWRIISSIEQKEESRGNEDHVASIKEYRSKIETELTSICNGILKLLDSKLIGAAATGDSKVFYLKMKGDYHRYLAEFKTGAERKEAAENTLSAYKSAQDIANTELAPTHPIRLGLALNFSVFYYEILNSSDRACNLAKQAFDEAIAELDTLGEESYKDSTLIMQLLRDNLTLWTSDMQDDGTDEIKEAAKPDNEQQ

SEQ ID NO: 148959 - DNA, 1154 bp, Thellungiella halophila
  CDS (16)..(834)
ctcgatctaaaaacaatggcgacacaaccaccatcttcatcctcagccagggaagaattcgtctacatggcgaaactcgcggagcaagccgagcgttacgaagaaatggtcgaattcatggagaaagtcgcaaaagccgtcgacaaagaagaactcaccgtcgaagaacgtaacctcctctccgtcgcctacaaaaacgtgatcggagctcgccgtgcctcgtggcgaatcatctcctcgatcgagcaaaaggaagagagccgaggaaacaacgaccacgtctccctgatccgtgactacagaaccaaaatcgaaaccgagctctccggcatctgcgacggtatcctcaaattgctcgatactatgcttattcccgctgctgcttctggagattcaaaggttttctacctgaagatgaaaggagattatcataggtacttggctgagtttaaaactagccaagagaggaaagacgctgcagaacatacactcaatgcctacaaagctgctcaggatattgctaatgccgaattggctccaacacacccgattcgtctcggtcttgcgttgaatttctctgtgttttactacgagattctcaattctccagaccgtgcttgcaatctcgctaagcaggcttttgatgatgcaattgctgaattggatactcttggtgaagaatcgtacaaggacagtactttgatcatgcagcttcttcgtgacaacctcactctctggacctctgatatgcaggacgatgatgatgtaattaaagaagcagcagcagcagcgccagcagcgccgaagcctgctgaagaacagcagcaatcctaagctttctcgcgacttcattgttgtttcagtatcaaaaatttctccattattatgtttttccttggagaagtttctttgtgtgttggtttctgatttttccgttttcctaatcccgaagcttctaaggccgtctaattcctgtccttgtttgctcttttcaaattgtggattcttattattttcttgtgatttgacttcgtctttgttttctctgtttgtattgaaattcaccttcttctcttatcaatggcttggcttttatctaattattcattttaatgtcacgaaagatcttggattaaaaaaaaaaaaaaaaaaaa

SEQ ID NO: 148960 - protein, 272 aa, Thellungiella halophila
MATQPPSSSSAREEFVYMAKLAEQAERYEEMVEFMEKVAKAVDKEELTVEERNLLSVAYKNVIGARRASWRIISSIEQKEESRGNNDHVSLIRDYRTKIETELSGICDGILKLLDTMLIPAAASGDSKVFYLKMKGDYHRYLAEFKTSQERKDAAEHTLNAYKAAQDIANAELAPTHPIRLGLALNFSVFYYEILNSPDRACNLAKQAFDDAIAELDTLGEESYKDSTLIMQLLRDNLTLWTSDMQDDDDVIKEAAAAAPAAPKPAEEQQQS

SEQ ID NO: 148961 - DNA, 1094 bp, Phaseolus angularis
  CDS (60)..(839)
tctctctttgtccctctttaatccctaaccagatctcgctctctctccaagattcgacaatggcggccgctcctacgcctcgcgaagagaacgtgtacatggcgaagctcgctgagcaggccgagcgctacgaagagatggtggagttcatggagaaggtgtccgctgccgcagacaacgaggaactcaacgtcgaagagaggaatctcctctctgtagcctacaagaacgtgatcggagcgcgccgcgcctcgtggcgcatcatctcctcgatcgagcagaaggaagagagccgcggcaacgaggatcacgtcaccgtcatccgcgactaccgatccaagatcgagtccgagctctccaacatctgcgacggtattctcaagctcctcgactctcgccttattccctcggcttcctccggcgattctaaggtattctacctcaagatgaagggcgattaccacaggtacctcgccgagttcaagaccggcgctgagcgcaaggaggctgccgagagcactctcgctgcatacaaatcggctcaggacattgcaaatgccgaactgcctccaactcatccaattaggctcggccttgctctgaacttctccgtattttactatgaaatccttaactctcctgatcgcgcctgcaaccttgcaaaacaggcttttgatgaagcgattgctgaattggatacactgggagaggaatcatacaaggatagcactttgatcatgcaactgcttcgtgataacctcaccctttggacctcggacatgcaggatgatggagcagatgaaattaaagaagcagcaccgaaacaggatgatcagtagagatgttttactgctaattagaattgaacttctcctctatatctttttgaagggaggtgtttgttgctatatctttgatgctggaattttaggcattcatgtctgttatgaattgtggatgtactgggccgttttagtttgtccttccattttcaagtgttttccaaattgcctattttattaaggacgctgaagtttttattttacggaattggaattttaagattctcttctatctaaaaaaaaaaaaaaaaa

SEQ ID NO: 148962 - protein, 259 aa, Phaseolus angularis
MAAAPTPREENVYMAKLAEQAERYEEMVEFMEKVSAAADNEELNVEERNLLSVAYKNVIGARRASWRIISSIEQKEESRGNEDHVTVIRDYRSKIESELSNICDGILKLLDSRLIPSASSGDSKVFYLKMKGDYHRYLAEFKTGAERKEAAESTLAAYKSAQDIANAELPPTHPIRLGLALNFSVFYYEILNSPDRACNLAKQAFDEAIAELDTLGEESYKDSTLIMQLLRDNLTLWTSDMQDDGADEIKEAAPKQDDQ

SEQ ID NO: 148963 - DNA, 1126 bp, Pneumocystis carinii
  CDS (151)..(957)
aagaggtcctcctttttttctaggacttatttatatttgggttaagcaaatcaatttagaaaagaattagggaaattattaaagaataatattaggagatcaatataaaggtcaagtcaatatattttaaagtaagaagatttatacgtaatgacaagtcgtgagaatttagtttatcttgcaaaactcgccgaacaggcggagcgatatgaagaaatggttgaaagcatgaagaaagtagcgtcatcagaccaagaacttacggttgaggaaaggaatcttctttcagtagcgtataaaaatgtaattggtgcacgtcgtgcatcatggcgtattgtatcatctattgagcagaaagaagaaaataagggaaatctttctcaggctggtttgattaaagaatatcgttctaaaatcgaatcggagttaactagcatatgcaatgatattttggccgttctggacgctcatttgatcgcctctgcaagtacgggagaaagtaaagtattttattacaaaatgaagggtgattattatcgttatttggctgaatttgcagttggagataagcgcaaagcaccttctgatgcttctttggcagcatataaggaagcatcagatattgcaggtacggatcttccaccaacacatcctattcgtcttgggttggctcttaatttctctgttttttactacgagatattaaattcacccgattgtgcttgtcacttagctaaacaagcattcgacgatgctattgctgagttagatacattatctgaggagtcttataaagattctacgttgattatgcaacttttaagagataatcttacgttgtggacatctgacatgcaggattccaatgagaaaaatgactctaaagaggctgtttcagaagttcctgatccaggaaaaccttctgaaactgaagcttcaaaaacagatgacatttgagttcattatttgtttttaagtataaaatataaaattaactatttaacaattattgattaaaattgtatttatgtatacaagagtgtatcgttttcggattttttaaacattttttacttttattcttactcaaaaaaaaaaaaaaaaaaaaaaaaaaaaaaaaaaaaaa

SEQ ID NO: 148964 - protein, 268 aa, Pneumocystis carinii
MTSRENLVYLAKLAEQAERYEEMVESMKKVASSDQELTVEERNLLSVAYKNVIGARRASWRIVSSIEQKEENKGNLSQAGLIKEYRSKIESELTSICNDILAVLDAHLIASASTGESKVFYYKMKGDYYRYLAEFAVGDKRKAPSDASLAAYKEASDIAGTDLPPTHPIRLGLALNFSVFYYEILNSPDCACHLAKQAFDDAIAELDTLSEESYKDSTLIMQLLRDNLTLWTSDMQDSNEKNDSKEAVSEVPDPGKPSETEASKTDDI

SEQ ID NO: 148965 - DNA, 1129 bp, Brassica napus
  CDS (75)..(857)
aattcggcacgaggattcgtcaagaataatcaatcacataagatcagatctcagatctctgaagaaggaagaagatggcggtttctgcgcgtgaggagttcgtgtacatggccaagctcgccgagcaagcggagaggtacgaggaaatggtagagttcatggagaaagtctccgccgccgtcgacggcgatgaactcaccgtcgaggagcgaaatctcctctccgtcgcttacaaaaacgtgatcggcgcccgccgtgcctcgtggcgcatcatttcgtcgatcgagcagaaggaagagagccgcggcaacgacgaccacgtcacggcgatccgcgattacagatctaagatcgagacggagctctctggaatctgcgacgggatccttaagctcctcgattcgaggctcgtccccgccgctgcttccggcgattccaaggtgttttacctcaagatgaaaggtgattaccacaggtacttggctgagttcaagactggtcaggagaggaaagacgccgctgagaatactctctccgcttacaaagctgctcaggatattgcgaatgcagagctagctccaactcacccaatccgtctaggtctggcattgaacttctctgtgttctactacgagatccttaactctcctgatcgtgcctgcagcctcgccaaacaggcctttgatgacgcgatagccgagttggacactctaggtgaagggtcgtacaaagacagcaccttgatcatgcagcttctccgtgacaacctcactctctggacatccgacatgcaggatgatgctgcggatgagatcaaggaagcatcagctccaaaaccaacagaggaacagcagtaacaatcttttgagtgaactgctaagtttctagggggtttgaaactttgttttctctttcgtccatatgtttcctaggtcgtcgcttgcccattcgcttttattcattcatcatgatttctggcaagtctgaaccatcaatcatcttctatctcagttgcttgaatgtgggttaatgatttcagtgtctgccatcgaaccttgctttgtgtgtttctcatcaatttgaagatacttttgtccgtcttaaaaaaaaaaaaaaaaaaaaaaaaaaa

SEQ ID NO: 148966 - protein, 260 aa, Brassica napus
MAVSAREEFVYMAKLAEQAERYEEMVEFMEKVSAAVDGDELTVEERNLLSVAYKNVIGARRASWRIISSIEQKEESRGNDDHVTAIRDYRSKIETELSGICDGILKLLDSRLVPAAASGDSKVFYLKMKGDYHRYLAEFKTGQERKDAAENTLSAYKAAQDIANAELAPTHPIRLGLALNFSVFYYEILNSPDRACSLAKQAFDDAIAELDTLGEGSYKDSTLIMQLLRDNLTLWTSDMQDDAADEIKEASAPKPTEEQQ

SEQ ID NO: 148967 - DNA, 1066 bp, Schizophyllum commune
  CDS (99)..(872)
ggcacgagctcgtgccgaattcggcacgagtcaacatcgaccatctccagccactcttcatcgtcgccccacctccttccacctaaacaccatccataatgcctgaatcgcgtgaggactctgtctaccttgccaagctcgctgagcaggctgagcgctatgaggagatggtcgagaacatgaagcgcgttgcgtcttccgaccaggagctcaccgttgaggagcgcaacctcttgtctgtcgcgtacaagaacgtcatcggcgcgcgccgcgcgtcctggagaatcgtctcctccatcgagcagaaggaggagtcgaagggcaacgaggcccaggtctccatgatcaagggctaccgggagaagatcgagggcgagctcgcaaagatctgcgaggacatcctcgacgtcctcgagaagcatctcatcccgtcggccgcgtctggcgagtcgaaggtcttctaccacaagatgatgggtgactaccaccgctacctcgccgagttcgcgactggcgacaagcgtaaagacagcgccgacaagtccctggaggcttacaaggctgcgtctgacgttgccgtcaccgagctcccgcccacacatcccatccgcctcggcctcgccctcaacttctccgtcttctactacgagatcctcaacagccccgaccgtgcttgccacctcgccaagcaggcgttcgacgatgccatcgccgagctcgacaccttgtccgaggagagctacaaggactcgaccttgatcatgcagctcttgagggacaacctcaccctatggacctcggacatgcaggactctggcgagaagcccgccgactccaaggatgaggcccccgaagcgccgggcgacgagtaaacgctttttacccgtcatgtatatcccgtcgtcgcatcgcacttgcatgtcctccattcattggaacgttgtcacgatcgctctgttgcattgaccttctttccatctgagtttacctattttttatttccttcgtagttgtggctcgcggtttatcaatcaaagaatcagaagtcaaaaaaaaaaaaaaaaaa

SEQ ID NO: 148968 - protein, 257 aa, Schizophyllum commune
MPESREDSVYLAKLAEQAERYEEMVENMKRVASSDQELTVEERNLLSVAYKNVIGARRASWRIVSSIEQKEESKGNEAQVSMIKGYREKIEGELAKICEDILDVLEKHLIPSAASGESKVFYHKMMGDYHRYLAEFATGDKRKDSADKSLEAYKAASDVAVTELPPTHPIRLGLALNFSVFYYEILNSPDRACHLAKQAFDDAIAELDTLSEESYKDSTLIMQLLRDNLTLWTSDMQDSGEKPADSKDEAPEAPGDE

SEQ ID NO: 148969 - DNA, 786 bp, Emericella nidulans
  CDS (1)..(786)
atgggtcacgaagatgctgtttacctggccaagctcgccgagcaggctgaacgctatgaggaaatggttgagaacatgaaggttgtcgccgcctctgacgtagagctcactgtggaagagcggaatctgctttctgttgcctacaagaacgtcatcggcgcccgccgtgcgtcctggagaattgttacctccatcgaacaaaaagaggagtccaagggcaacaagtcccaagttgctctcattaaggagtaccgccagaagattgagggcgagctcgccaaaatctgccaggacatcctggacgttctcgaccagcacctgatcaagtccgctcagagcggcgagtccaaggtcttctaccacaagatgaagggtgactaccaccgttaccttgccgagttcgctgttggcgacaaccgcaaggctgcggccgacgcctccctggaggcctacaagtctgccaccgaagtcgctcagaccgaccttgcccctactcaccccatccgtctcggcttggcccttaacttctctgtcttctactacgagattctcaactctcccgaccaggcttgccacctcgccaagcttgctttcgacgatgctattgccgagcttgacaccctgagcgaagagagctacaaggactccactcttattatgcagcttctcagggataacctgactctctggacctcctctgaggccgaacccgctgcagagaatgcccccgccgaaaagaaggaggaagcccccgccgctgagggcgaggagaagcccgctgaataa

SEQ ID NO: 148970 - protein, 261 aa, Emericella nidulans
MGHEDAVYLAKLAEQAERYEEMVENMKVVAASDVELTVEERNLLSVAYKNVIGARRASWRIVTSIEQKEESKGNKSQVALIKEYRQKIEGELAKICQDILDVLDQHLIKSAQSGESKVFYHKMKGDYHRYLAEFAVGDNRKAAADASLEAYKSATEVAQTDLAPTHPIRLGLALNFSVFYYEILNSPDQACHLAKLAFDDAIAELDTLSEESYKDSTLIMQLLRDNLTLWTSSEAEPAAENAPAEKKEEAPAAEGEEKPAE

SEQ ID NO: 148971 - DNA, 819 bp, Trichoderma reesei
  CDS (1)..(819)
atggccaccgagcgtgaaagcaagaccttcctggcccgcctctgcgagcaggccgagcgctacgatgagatggtcacctacatgaaggaggtggcccagctcggcggtgagctcagcgtcgacgagcgcaacctcctcagcgtcgcctacaagaacgtcgtcggcacccgccgtgcctcgtggcgcatcatctcctccatcgagcagaaggaggagtccaagggctccgacaagcacgttgccaccatcaaggagtaccgcagcaagatcgagctcgagctcgagaaggtctgcgaggatgtcctcaacgtcctggacactagcctcatccccaacgccgccactggcgagtccaaggtcttttaccacaagatgaagggtgactaccaccgctaccttgccgagttcgcctctggcgagaagcgcaaggtcgctgccactgccgctcacgaggcctacaagaacgctaccgacgttgcccagaccgagctgactcccactcaccccatccgcctgggtctcgccctcaacttctccgtgttctactacgagatcctcaactcccccgaccgtgcttgccaccttgccaagcaggccttcgatgatgccatcgccgagctcgactccctctctgaggagtcctaccgcgacagcactctcatcatgcagctcctgcgtgacaacctgaccctgtggacttcatccgacagcggtgaggccgagcaggccggcgaggccaagaaggacgagggtgaagcggccaagcctgccgaggaagaacccaaggctgaggagcccgctcccgaggctacttcctaa

SEQ ID NO: 148972 - protein, 272 aa, Trichoderma reesei
MATERESKTFLARLCEQAERYDEMVTYMKEVAQLGGELSVDERNLLSVAYKNVVGTRRASWRIISSIEQKEESKGSDKHVATIKEYRSKIELELEKVCEDVLNVLDTSLIPNAATGESKVFYHKMKGDYHRYLAEFASGEKRKVAATAAHEAYKNATDVAQTELTPTHPIRLGLALNFSVFYYEILNSPDRACHLAKQAFDDAIAELDSLSEESYRDSTLIMQLLRDNLTLWTSSDSGEAEQAGEAKKDEGEAAKPAEEEPKAEEPAPEATS

SEQ ID NO: 148973 - DNA, 795 bp, Trichoderma reesei
  CDS (1)..(795)
atgggtcacgaagatgctgtttacctggccaagctcgccgagcaggctgagcgatatgaggagatggttgagaacatgaagattgtcgcctccgaggaccgcgacctcaccgtcgaggagcgcaacctgctctccgtcgcctacaagaacgtcattggcgcccgccgtgcctcttggagaatagtcacctctatcgagcagaaggaggagtctaagggcaactcttcccaggtcgcccttatcaaggagtaccgccagaagatcgaggccgagctcgccaagatctgcgacgacatcctcgaggtcctcgaccagcacctgattccctctgccaagtccggagagtccaaggtcttctaccacaagatgaagggtgactaccaccgttaccttgccgagttcgccattggcgaccgccgcaaggactctgccgacaagtccctcgaggcctacaaggcggccaccgaggttgcccagaccgagctgcctcccacccaccccatccgcctgggtctcgccctcaacttctccgtcttctactacgagatcctcaacgcccccgaccaggcttgccaccttgccaagcaggcctttgacgatgccattgccgagctcgacaccctcagcgaggagagctacaaggactcgactctcatcatgcagctcctccgcgacaaccttactctctggacctcttctgaggctgagacctctgccggccaagttgaggctccccctaaggaggacacccctgccgaggccgctgctcctgctgaggagcccaaggctgagtaa

SEQ ID NO: 148974 - protein, 264 aa, Trichoderma reesei
MGHEDAVYLAKLAEQAERYEEMVENMKIVASEDRDLTVEERNLLSVAYKNVIGARRASWRIVTSIEQKEESKGNSSQVALIKEYRQKIEAELAKICDDILEVLDQHLIPSAKSGESKVFYHKMKGDYHRYLAEFAIGDRRKDSADKSLEAYKAATEVAQTELPPTHPIRLGLALNFSVFYYEILNAPDQACHLAKQAFDDAIAELDTLSEESYKDSTLIMQLLRDNLTLWTSSEAETSAGQVEAPPKEDTPAEAAAPAEEPKAE

SEQ ID NO: 148975 - DNA, 1098 bp, Euphorbia esula
  CDS (76)..(855)
gctctctctctctcctcacttgctcaactgagtcaattttagctctgtacacagaagattctactaagatctgccatggattcttctaaagatcgcgaaaccttcgtctatctcgccaagcttgccgagcaagccgagcgctacgatgaaatggtagagtcgatgaagaaagtagcgaatctcgatgttgaattgacagtagaggagaggaatcttctatctgttggttacaagaatgtagtgggctcacggcgggcctcttggaggatcttgtcctcgattgaacagaaggaggagtcgaaagggaacgaaattaatgctaagaggattaaggagtacaggaacaaagtggaatcggagctgtctactatttgcagcgacattatgactgtgatcgatgagcatctcattccatcttgtaacgctggggaatccactgtgttctactataagatgaaaggtgattattatcgttatctagctgagttcaaggctggtaatgacaagaaagaggcagctgatcagtcccttaaggcataccagactgcctcaaccactgcagagactgatttacctcccacccatcccattcgattgggtttagcgctcaacttttctgtcttctattacgagattatgaactcgcctgaaagggcctgccacctggcaaagcaagcttttgatgaagctatttcagagctggatacattgagcgaagaatcttacaaggacagcaccttgatcatgcagctattgagggacaacttgactttgtggacctctgacatcccagaggatggagaccagaaaatggaaacctctggaaaagctagtgggggagaagatgcagagtgaagcagaagctagtaggagtttgttagtgttcaatgtgtggaagggagaagtatgatttcccctcaactttatactattgttgtttgagagaggattttggagattttctcttgtgttgttgtatccttgttgttgttgttgttttctggtgtaatctgtttgtaggaaaatttgggatgttgtagaggtgtttgtgattattttggtttctcaaaatacctactaaaaaaaaaaaaaaaaaaa

SEQ ID NO: 148976 - protein, 259 aa, Euphorbia esula
MDSSKDRETFVYLAKLAEQAERYDEMVESMKKVANLDVELTVEERNLLSVGYKNVVGSRRASWRILSSIEQKEESKGNEINAKRIKEYRNKVESELSTICSDIMTVIDEHLIPSCNAGESTVFYYKMKGDYYRYLAEFKAGNDKKEAADQSLKAYQTASTTAETDLPPTHPIRLGLALNFSVFYYEIMNSPERACHLAKQAFDEAISELDTLSEESYKDSTLIMQLLRDNLTLWTSDIPEDGDQKMETSGKASGGEDAE

SEQ ID NO: 148977 - DNA, 869 bp, Pisum sativum
  CDS (68)..(850)
tctcaatcgctttctctctctaaactccctaaaaccagatctcgctttctctctctaggtttcaacaatggcggccgctcatactcctcgggaagagaacgtctacatggctaagctcgccgagcaagccgagcgctacgaagaaatggtggagttcatggaaaaggtttccgctaacgccgatagcgaagaactcaccgtggaggagaggaatcttctctccgtggcttacaaaaacgtgatcggagctagacgtgcctcgtggcgtatcatttcgtcgatcgagcagaaggaagagagccgcggcaacgaggatcacgtcgacgtcatccgtgattaccgatctaaaatcgagtctgagctctctaacatctgcgacggtatcctcaagctcctcgatactcgtctcattccatcagcttcctctggcgattctaaggttttctaccttaagatgaagggagattaccacaggtacctcgctgagtttaagaccggagccgagcgtaaggaggctgcagagagcactcttgccgcttacaaatctgctcaggacattgcaaatgctgaattaccaccaactcatccaattaggcttggccttgctctgaacttctccgttttttactatgaaatccttaactctcctgatcgtgcctgcaatcttgcaaaacaggcttttgatgaagctattgctgaattggatacccttggagaggaatcatacaaggatagcactttgatcatgcaacttcttcgtgataatctcaccctatggacctctgacatgcaggatgatggtgctgatgaaattaaagaagcagccccaaaagcagatgaacagcagtaaacaaattcaactgccaatt

SEQ ID NO: 148978 - protein, 260 aa, Pisum sativum
MAAAHTPREENVYMAKLAEQAERYEEMVEFMEKVSANADSEELTVEERNLLSVAYKNVIGARRASWRIISSIEQKEESRGNEDHVDVIRDYRSKIESELSNICDGILKLLDTRLIPSASSGDSKVFYLKMKGDYHRYLAEFKTGAERKEAAESTLAAYKSAQDIANAELPPTHPIRLGLALNFSVFYYEILNSPDRACNLAKQAFDEAIAELDTLGEESYKDSTLIMQLLRDNLTLWTSDMQDDGADEIKEAAPKADEQQ

SEQ ID NO: 148979 - DNA, 1108 bp, Lentinula edodes
  CDS (65)..(835)
ccatcatctcctcatcgtatccaacaatcaccaccctcccaatcttataacattatctctcatcatgcctgaaactcgtgaagactctgtctacctcgccaagctcgctgagcaagccgagcgctacgaagagatggtcgagaacatgaaacgcgttgcctcgtcagaccaagagcttactgttgaggagagaaatttgttatctgtcgcgtacaagaatgttatcggagctcgtcgtgcttcgtggagaattgtatcgtcgatcgagcaaaaggaggaatccaagggcaatgaggcccaagtctccatgattaagggctaccgggagaagatcgaaaccgaactcgcagagatttgcgaggacattctcgatgttcttgacaagcaccttattccttccgccgcttcgggcgagtcgaaggttttctaccacaagatgatgggtgactaccaccgttatctcgccgaatttgccactggcgacaaacggaaagagagtgctgacaagtccctcgaggcatacaaagcggcctctgacgttgctgtcactgaactccctcccacgcaccctatccgtctcggtctcgcattgaacttctccgtgttctactacgagatcctcaacagccccgaccgtgcatgtcatcttgccaagcaggcattcgatgatgctattgcagagcttgacaccctctcggaagaaagctacaaggactctactctcatcatgcagctcctcagggacaatctcactctctggacttctgacatgcaggattctgccgacaaacctgcagaaaaagatgaagccgccgacgcacctgctgatgagtagattcgagttttttattgatcaaattgtattccttgtgttatatcgctctcgcatccctccaccaccatcatgcttatatccggaacgccgtcctcccttccccgggctcctcaccacgttgatctcgccttcgcactcattcctcatatccgtacttgacgtccaataactctacacttattatggctacatactacatagtatttgacttttcttttgcatggtctcctgtgatgaattaaaagcgtaaaacatgataaaaaaaaaaaaaaa

SEQ ID NO: 148980 - protein, 256 aa, Lentinula edodes
MPETREDSVYLAKLAEQAERYEEMVENMKRVASSDQELTVEERNLLSVAYKNVIGARRASWRIVSSIEQKEESKGNEAQVSMIKGYREKIETELAEICEDILDVLDKHLIPSAASGESKVFYHKMMGDYHRYLAEFATGDKRKESADKSLEAYKAASDVAVTELPPTHPIRLGLALNFSVFYYEILNSPDRACHLAKQAFDDAIAELDTLSEESYKDSTLIMQLLRDNLTLWTSDMQDSADKPAEKDEAADAPADE

SEQ ID NO: 148981 - DNA, 1051 bp, Populus tremula x Populus alba
  CDS (9)..(794)
ctaaaacaatggcggccacaccatcagctcgcgaggaaagtgtttacatggcaaaactcgccgagcaagccgaacgttacgaagaaatggtggagtacatggagaaagtctctgcctccctcgagaacgaggaactcaccgtggaagagcgaaacctcctctccgtggcttacaaaaacgtgatcggagctagacgtgcttcgtggaggattatttcctcgatcgagcagaaagaagagagtcgtggtaacgaagaccacgtgtctgtgatccgtgactacagggccaagattgagaccgaactgtcttcgatctgtgacgggatcttgaagttgctcgattcgaggttgattccaacggcctcggctggtgattcgaaggtgttctatttgaagatgaagggagattatcacaggtacttggccgagtttaaaactggtgctgaaaggaaagaggctgctgagagcactctcactgcttacaaagccgctcaggacattgcaaatgcagagctagctcccactcacccaatccgtctaggattggctcttaacttctctgtcttttactatgaaattctcaactctccagatcgtgcttgcagtctcgctaaacaggcttttgacgaggccattgcggagctggatacgttgggtgaggagtcatacaaggacagcactttgatcatgcaactccttcgtgacaatcttactctttggacctctgacatgcaggacgacggtgctgatgagattaaagaagcagcacccaaacctggtgatgaacagcagtgaaggtgctctactgcaaattagggttgaacttctcctctatatgtttttaataggagaaggtgcttgttgctaatttgcttgttattctgatcttttaggcattcttgtcttggttatgaatcatggacgcgccaagcttttctttcttattttcttttagtttgtcatatcaatttgtgtttctggatggcccttgttttcgtaatgatatctggttttgccattaaaaaaaaaaaaaaaaaaaaaaaaaaaaaaaa

SEQ ID NO: 148982 - protein, 261 aa, Populus tremula x Populus alba
MAATPSAREESVYMAKLAEQAERYEEMVEYMEKVSASLENEELTVEERNLLSVAYKNVIGARRASWRIISSIEQKEESRGNEDHVSVIRDYRAKIETELSSICDGILKLLDSRLIPTASAGDSKVFYLKMKGDYHRYLAEFKTGAERKEAAESTLTAYKAAQDIANAELAPTHPIRLGLALNFSVFYYEILNSPDRACSLAKQAFDEAIAELDTLGEESYKDSTLIMQLLRDNLTLWTSDMQDDGADEIKEAAPKPGDEQQ

SEQ ID NO: 148983 - DNA, 1081 bp, Picea glauca
  CDS (180)..(959)
acgaggcactgcccttcattgtctcgctgtgcttctttcacagaaaatccattcacagttcacagtccttggtttggtttcgccattttagtgtacttcttccttttagtggccgtttgttgaagatccagaggtaaagttgggcgtttaagatctgtgcagagatggcggcagcggcgatggtggagtcatcgcgggaggagaatgtatacatggcgaagctggctgagcaggcggagcgctacgaggagatggtggagttcatggagaaagttaccaaaggcgtggaggtggaggagctcacagtcgaggagcgcaaccttctctctgtggcctacaagaacgtgatcggtgcccgccgggcctcctggaggatcatttcctccattgagcagaaggaggagagcaggggcaacgacgaacacgtggtcaccatccgggagtacaggtccaaggtggaatcggagctttccaagatctgcgagggcattctccgcctcctcgactcccatctcatcccttcttccaccgccgcggagtccaaggtcttctatctcaagatgaagggcgattaccatcgataccttgccgagtttaaaacaggcgccgagaggaaggaggccgctgagaacactttgcttgcttacaagtctgcccaggatattgctgcggcagagttggctccaacgcatcctattaggctagggctggctcttaacttctctgtattttactatgagattttgaattcgccagatagagcctgtaatcttgcaaaacaggcatttggtgaggcaattgcggaattagatactttaggtgaagattcttacaaggatagcactctcatcatgcagctgcttcgtgacaatttgacattgtggacctcagacatgcaggaggatgctggggatgagatcaaagagacttctaagcgtgatgaaggagaggagcaatagtgaaatatgatgatctattagtatattaggattagattagcaggctatcctgcattgtttggtaaaggaggctatgtgcacgaatgtgtttattagatctcatgctctgcagtatttagttg

SEQ ID NO: 148984 - protein, 259 aa, Picea glauca
MVESSREENVYMAKLAEQAERYEEMVEFMEKVTKGVEVEELTVEERNLLSVAYKNVIGARRASWRIISSIEQKEESRGNDEHVVTIREYRSKVESELSKICEGILRLLDSHLIPSSTAAESKVFYLKMKGDYHRYLAEFKTGAERKEAAENTLLAYKSAQDIAAAELAPTHPIRLGLALNFSVFYYEILNSPDRACNLAKQAFGEAIAELDTLGEDSYKDSTLIMQLLRDNLTLWTSDMQEDAGDEIKETSKRDEGEEQ

SEQ ID NO: 148985 - DNA, 832 bp, Pisum sativum
  CDS (45)..(830)
tttctctcactctctctcctccgattccgaaactagattctccgatggccaccgcaccaacaccgcgtgaagagttcgtctacatggcgaaactcgccgaacaagccgaacgttacgaagagatggtggagttcatggaaaaagtaaccgccgccgtcgaaagcgaggaactcaccgtcgaggaaaggaacctcctctccgtcgcttacaaaaacgtgatcggagcacgacgcgcttcgtggaggatcatctcctccatcgaacagaaggaagaaagcagaggcaacgacgaacacgtgacggtcatccgtgattacagatctaagatcgagactgaactttccaacatctgtaacggtattctcaaacttcttgactcacgcctcatcccttctgctgcgctaggtgactccaaggttttctaccttaagatgaaaggtgattatcataggtatcttgctgagtttaagagcggcgctgagcgtaaagatgccgctgaaagcactctcactgcttataaatctgctcaggacattgcaaacactgagctgcctccaactcaccctatcaggcttggtcttgctctgaacttctccgtgttttactatgagattcttaactctcctgacagggcttgtggccttgcaaaacaggcttttgatgaggctattgctgagttggatacattgggagaggagtcatacaaggatagcaccttgattatgcaacttctccgcgataaccttaccctttggacctctgatatgcaggatgatggtgctgatgaaatcaaagaagctgcacctaaaggcaatgatgaaccacagtaaaa

SEQ ID NO: 148986 - protein, 261 aa, Pisum sativum
MATAPTPREEFVYMAKLAEQAERYEEMVEFMEKVTAAVESEELTVEERNLLSVAYKNVIGARRASWRIISSIEQKEESRGNDEHVTVIRDYRSKIETELSNICNGILKLLDSRLIPSAALGDSKVFYLKMKGDYHRYLAEFKSGAERKDAAESTLTAYKSAQDIANTELPPTHPIRLGLALNFSVFYYEILNSPDRACGLAKQAFDEAIAELDTLGEESYKDSTLIMQLLRDNLTLWTSDMQDDGADEIKEAAPKGNDEPQ

SEQ ID NO: 148987 - DNA, 1020 bp, Solanum tuberosum
  CDS (51)..(830)
gcggcgctgtcagagacatcaatcaccaggtaactttacagacaacaaacatggccgattcacgtgaagaaaatgtgtacatggccaagttggctgagcaggctgagaggtatgaggaaatggttgagtttatggagaaggttgcaaaggtagatgttgaagagctgactgtggaggaaaggaatcttctttctgtggcttacaagaatgtcattggtgcaagaagggcttcgtggaggataatatcttcaattgagcagaaagaggagagccgtggaaatgaagaccatgttagcagcattaaagaatatagagtcaaaattgaggccgagctcagcaagatctgtgatgggattttgagccttctcgagtctcatttagtaccatcagcctcaacagccgagtccaaagtgttttacttgaagatgaaaggtgattaccataggtacttggctgagttcaagacgggggccagagagaggaaagaggctgcagagaacactttattagcctacaagtctgctcaggatatagcattggctgaactgactcctactcatccaatcagactgggacttgcccttaacttttcagtgttctattatgaaattcttaactcacctgatcgtgcttgtaaccttgcaaagcaggcctttgatgatgccatcgcagagctggatacattgggtgaggaatcttacaaggacagtacattgattatgcagcttctccgagacaatctcacactttggacctctgataccacagatgatgccgaggatgagatcagggaaggttcaaaacaagagtcgggtgatggacagcagtgatatctaagtagcctagtcttgtactccttattttgtgattttcgacgactcttcgtatcactgctgaagttgtttgatataaaaacaggttttagtctgataaaagaaacatgtttagtacaatttgtttgtgatgctattgcatcgccatttaataattagagttggaataaaaaaaaaaaaaaaaaaa

SEQ ID NO: 148988 - protein, 259 aa, Solanum tuberosum
MADSREENVYMAKLAEQAERYEEMVEFMEKVAKVDVEELTVEERNLLSVAYKNVIGARRASWRIISSIEQKEESRGNEDHVSSIKEYRVKIEAELSKICDGILSLLESHLVPSASTAESKVFYLKMKGDYHRYLAEFKTGARERKEAAENTLLAYKSAQDIALAELTPTHPIRLGLALNFSVFYYEILNSPDRACNLAKQAFDDAIAELDTLGEESYKDSTLIMQLLRDNLTLWTSDTTDDAEDEIREGSKQESGDGQQ

SEQ ID NO: 148989 - DNA, 789 bp, Oryza sativa
  CDS (1)..(789)
  misc_feature (300)..(300): y is t or c
atgtcggcacaggcggagctttcccgtgaggagaatgtgtacatggccaagctcgctgagcaagccgagaggtacgaggagatggtcgaattcatggagaaggtggccaagacggttgactctgaggagctcaccgtggaggagcgcaacctcctgtctgttgcatacaagaatgtgattggagcccgccgtgcgtcatggcgcattatctcctccattgagcagaaggaggaaagccgtggtaacgaggaccgtgtcacactcatcaaggactaccgtggcaagatcgagactgagctyaccaagatttgcgacggcattctcaagctgcttgaatcccaccttgtcccctcttccactgcccctgagtccaaggtcttctacctcaaaatgaagggtgactactacaggtaccttgccgaatttaagaccggggctgagaggaaggatgctgctgagaataccatggtggcatacaaggctgctcaggacattgctttggctgagctgcctcctactcatccaattaggcttgggctagctcttaacttctcagtgttctactatgagatcctcaactcgcctgatcgtgcttgcaacctcgcaaagcaggcttttgatgaggccatctcggagctggacaccctgagcgaggagtcctacaaggacagcactttgatcatgcaactcctccgtgataacctgaccctgtggacttcagacatctcggaggacaccgcggaagagatcagggaagctccgaagcgcgactccagcgaggggcagtaa

SEQ ID NO: 148990 - protein, 262 aa, Oryza sativa
MSAQAELSREENVYMAKLAEQAERYEEMVEFMEKVAKTVDSEELTVEERNLLSVAYKNVIGARRASWRIISSIEQKEESRGNEDRVTLIKDYRGKIETELTKICDGILKLLESHLVPSSTAPESKVFYLKMKGDYYRYLAEFKTGAERKDAAENTMVAYKAAQDIALAELPPTHPIRLGLALNFSVFYYEILNSPDRACNLAKQAFDEAISELDTLSEESYKDSTLIMQLLRDNLTLWTSDISEDTAEEIREAPKRDSSEGQ

SEQ ID NO: 148991 - DNA, 1120 bp, Solanum lycopersicum
  CDS (80)..(844)
gccgctctcagatctcaaaaaaaaaaaaaaattgcattttcataaaaaagaaaagagatcccaaaatattgaatccattatggcgcgtgaggagaatgtgtacatggcgaagcttgctgagcaagctgaaagatacgaagaaatggtgcagttcatggagaaagtttcaacttcattaggctcagaggaacttactgttgaggaacggaatcttctttccgttgcttacaaaaacgttatcggggctcgtagagcctcgtggcgtattatctcttcaattgaacagaaggaggagtcgaggggaaatgaggaacatgttaaatgtataaaggagtatagatctaagattgaatctgaactttcggatatttgtgatggaattctcaagctccttgattctaatctcattccttcagcttctaatggcgattctaaggtgttttaccttaaaatgaagggtgattatcatcgttatttggctgaatttaagaccggagctgaacgtaaggaagctgctgagagcacactctccgcctacaaagctgctcaggatattgcaaatactgaacttgccccaacacatccaatccgacttggactggctctcaacttctcagtgttttattatgagattttgaactctcctgaccgtgcttgcaatcttgctaaacaagcatttgatgaagcaattgccgagttggacacactgggagaagaatcttacaaggatagcactttgatcatgcaacttcttcgtgacaatctcactctctggacctctgatatgcaggatgatggtgccgatgaaattaaggaaaccaaaaacgacaatgaacaacagtgagggaactggtcctcagattatcatttggcttctttcttcctggctgtttttattgggagaagctgcttcttttttatttcctttctcctgtctttcgggtttcctctttatccgtggcaacgaacaactttgaatattgatgttcaattgtttcatctgtaccttaatgtggttcttgctggtgcttagtttctatggaagcatttcagttgtatttgtgaactggatatataaaatggtacatccaagtgatactcagcaaccgggtttcaatca

SEQ ID NO: 148992 - protein, 254 aa, Solanum lycopersicum
MAREENVYMAKLAEQAERYEEMVQFMEKVSTSLGSEELTVEERNLLSVAYKNVIGARRASWRIISSIEQKEESRGNEEHVKCIKEYRSKIESELSDICDGILKLLDSNLIPSASNGDSKVFYLKMKGDYHRYLAEFKTGAERKEAAESTLSAYKAAQDIANTELAPTHPIRLGLALNFSVFYYEILNSPDRACNLAKQAFDEAIAELDTLGEESYKDSTLIMQLLRDNLTLWTSDMQDDGADEIKETKNDNEQQ

SEQ ID NO: 148993 - DNA, 1106 bp, Solanum tuberosum
  CDS (61)..(825)
attttctcaactttctctctctaaaacccctctttctctctctagaacacagaaccatcaatggcgtctccacgtgaagagaacgtgtacatggcgaacgttgctgcaagagctgaacgctatgaggagatggtagaattcatggagaaggtcgtcgccgccttggacacggaactaaccgtcgaggaacgcaatcttctctccgtcgcatacaaaaacgtgatcggagctaggagagcatcctggcgtataatttcatcgatcgagcagaaagaggagagtcgtggtaacgaagatcacgttgcctccattaaaaaatacagatctcagatcgagaatgagctgacttcgatctgtaacggcatcctcaagttgcttgattcaaaactcatcgggtcagctgctaccggagactccaaagttttctatttgaaaatgaagggagattattaccggtacttggctgagttcaaaaccggaaccgagagaaaagaagctgcagagaatactctttcggcctacaagtctgctcaggatattgctaatggcgaattggctccaacacatccaatccgattgggtctagctctcaatttctcagtgttttactatgagatattgaattctcctgaccgtgcttgtaatctcgccaaacaggcttttgatgaggcaattgcggacgttgacaccctaggagaggagtcctacaaggatagcactttaattatgcaacttctgcgtgataacctcactttgtggacctctgatatgcaggatgatggagctgatgagatcaaagaaccatcaaaagctgataatgagtagtaacaacgtgagtgaaacctctttgcttaggattgaaaaccgatgatgtaattttactcattgatcaaaattggctgtttgtagtccttatcctgtgatttgtaatacctattactaaaggcgctgtttcttgccatttgttgttttcatcaagattactttttgtctctgtatttcttttgtatttggatgctctgatgaaactctcttatttcgtggaaatgaatatttatttttacgaagcaaaaaaaaaaaaaaaaaactcgagactacttctctca

SEQ ID NO: 148994 - protein, 254 aa, Solanum tuberosum
MASPREENVYMANVAARAERYEEMVEFMEKVVAALDTELTVEERNLLSVAYKNVIGARRASWRIISSIEQKEESRGNEDHVASIKKYRSQIENELTSICNGILKLLDSKLIGSAATGDSKVFYLKMKGDYYRYLAEFKTGTERKEAAENTLSAYKSAQDIANGELAPTHPIRLGLALNFSVFYYEILNSPDRACNLAKQAFDEAIADVDTLGEESYKDSTLIMQLLRDNLTLWTSDMQDDGADEIKEPSKADNE

SEQ ID NO: 148995 - DNA, 768 bp, Arabidopsis thaliana
  CDS (1)..(768)
atgtcgacaagggaagagaatgtttacatggcgaaattagccgaacaagctgaacgttacgaagaaatggttgaattcatggagaaagttgcgaaaactgttgatgttgaggaactttcagttgaagagaggaatcttctctctgttgcttacaagaacgtgattggagcgagaagagcttcgtggagaatcatttcttcgattgagcagaaagaagagagcaaagggaacgaagatcatgttgctattatcaaggattacagaggaaagattgaatccgagcttagcaaaatctgtgatgggattttgaatgttcttgaagctcatcttattccttctgcttcaccagctgaatctaaagtgttttatcttaagatgaagggtgattatcataggtatcttgctgagtttaaggctggtgctgaaaggaaagaagctgctgaaagcactttggttgcttacaagtctgcttccgacattgccactgctgagttagctcctactcacccgataaggcttggtcttgcactcaacttctctgtgttttactatgaaatcctcaactcgcctgatcgtgcttgcagcctcgcaaagcaggcgtttgatgatgcaatcgctgagttagatacattgggtgaggaatcatacaaggacagtacactgattatgcagcttcttagagacaatctcactctctggacttcagatatgactgacgaagcaggagatgagattaaggaggcatcaaagcccgatggtgccgagtaa

SEQ ID NO: 148996 - protein, 255 aa, Arabidopsis thaliana
MSTREENVYMAKLAEQAERYEEMVEFMEKVAKTVDVEELSVEERNLLSVAYKNVIGARRASWRIISSIEQKEESKGNEDHVAIIKDYRGKIESELSKICDGILNVLEAHLIPSASPAESKVFYLKMKGDYHRYLAEFKAGAERKEAAESTLVAYKSASDIATAELAPTHPIRLGLALNFSVFYYEILNSPDRACSLAKQAFDDAIAELDTLGEESYKDSTLIMQLLRDNLTLWTSDMTDEAGDEIKEASKPDGAE

SEQ ID NO: 148997 - DNA, 1169 bp, Oryza sativa
  CDS (93)..(863)
gtccgaacaaaaagcattcgcatccacgagaccagtcgaacccgacccgcctcgccgccgtcgccaccgaagtaatcccttaattggtcaaaatgtctagggaggagaatgtctacatggccaagctggccgagcaggctgaaaggtatgaggagatggttgagtacatggagaaggttgcaaagactgtagatgtggaagagctcactgttgaggagcgcaacctcttgtctgttgcttacaagaatgtgattggtgcccgccgtgcctcctggcgtattgtctcatccattgaacagaaggaggagggtcgtggcaatgaggaacatgttactctgatcaaggagtaccgtggcaagattgaagctgagctgagcaagatttgcgatggtatcctgaagttgcttgactcacaccttgtgccctcatctactgctgcagaatctaaggtgttttacctcaagatgaagggtgattaccacaggtaccttgcggaatttaagactggtgccgagagaaaggaagctgctgagagcacaatggtggcttacaaggctgctcaggatattgctctggcggatcttgctcccacccatcccataaggcttggactggcacttaacttctctgtgttctactacgagattctaaactctccagacaaggcttgcaaccttgctaagcaggcgtttgacgaagccatctccgagttggataccctcggggaggagtcttacaaggacagcactttgatcatgcagctcctgagggacaacttgaccctctggacctctgacctcacggaggacggtggtgatgaggtgaaagaagcctccaagggcgacgcctgcgagggccagtaaaatgggaagatcgatcgatcgatggctccgcatgttattggagaccatcgatttagatgcctcatgctgctgtcaccatgatggatggattcttctcctgttctactagaatgtttttcttcctgtctccccttcctctctcttctctggtttttactagggtggtagcggtcgaattagttcttcccattgctttgcatttggtgctagtggtccgtctgggctgattgttttcctctggatatgactctcgtgtgtgttgtctgcagatagtgttttattgagcaatatttaaagttgtcgtcc

SEQ ID NO: 148998 - protein, 256 aa, Oryza sativa
MSREENVYMAKLAEQAERYEEMVEYMEKVAKTVDVEELTVEERNLLSVAYKNVIGARRASWRIVSSIEQKEEGRGNEEHVTLIKEYRGKIEAELSKICDGILKLLDSHLVPSSTAAESKVFYLKMKGDYHRYLAEFKTGAERKEAAESTMVAYKAAQDIALADLAPTHPIRLGLALNFSVFYYEILNSPDKACNLAKQAFDEAISELDTLGEESYKDSTLIMQLLRDNLTLWTSDLTEDGGDEVKEASKGDACEGQ

SEQ ID NO: 148999 - DNA, 987 bp, Oryza sativa
  CDS (70)..(858)
gcggccgcgtcgacctccacctgagcacaggagaagccgcagccactgagaaaaacacaaacagtgaagatgtcgcagcctgctgagctttcccgtgaggagaatgtgtacatggctaagcttgcagagcaggccgagaggtatgaggagatggttgagttcatggagaaggttgctaagacagttgactctgaggagctcactgttgaggagcgcaaccttctatcggttgcttacaagaatgttattggtgctcgccgtgcgtcatggcgcatcatatcatccattgaacagaaggaagagagccgtggtaatgaggatcgttgcacgctcatcaaggaatacaggggaaagattgaaactgagctctccaagatctgtgatggcatcctcaagcttcttgactcccaccttgtgccttcatccactgctccagagtccaaggtcttctacctcaagatgaaaggcgactactacaggtacctcgcagagtttaagactggagctgagaggaaggatgctgctgagaacaccatggtggcatacaaagccgctcaggatattgccctggcagagttgcccccaactcatcctatcagacttgggctggccctcaacttctcggtgttttattacgagatcctcaactctcctgaccgtgcttgcaatcttgcaaagcaggctttcgatgaggctatctcagagctggacactctgagtgaggaatcctacaaggacagcactttgatcatgcagcttctgcgtgataacctgacgctgtggacttccgatatctcggaggatgctgctgaggaaatcaaggaggcccccaagggcgaatcaggagatggacagtgaacatgatcgaatgcgtgcgcccacaaactagaatagtgacgctgcaaatgtgctgtgggttatcgtttcattttatagattgtaatgtctcgtgatttgtcggaaacaggaggagctctctgattacta

SEQ ID NO: 149000 - protein, 262 aa, Oryza sativa
MSQPAELSREENVYMAKLAEQAERYEEMVEFMEKVAKTVDSEELTVEERNLLSVAYKNVIGARRASWRIISSIEQKEESRGNEDRCTLIKEYRGKIETELSKICDGILKLLDSHLVPSSTAPESKVFYLKMKGDYYRYLAEFKTGAERKDAAENTMVAYKAAQDIALAELPPTHPIRLGLALNFSVFYYEILNSPDRACNLAKQAFDEAISELDTLSEESYKDSTLIMQLLRDNLTLWTSDISEDAAEEIKEAPKGESGDGQ

SEQ ID NO: 149001 - DNA, 783 bp, Oryza sativa
  CDS (1)..(783)
atgtcgcctgctgaggcatcgcgtgaggagaatgtgtacatggcaaagcttgccgagcaggctgagcgttacgaggaaatggtcgaattcatggagaaggtggcaaagaccactgatgttggtgagctcaccgttgaggagcggaacctgctttctgtggcttacaagaacgtgattggtgctcggagggcatcgtggaggatcatctcttctattgagcagaaggaggagagccgtgggaatgaggcatatgttgcatcaattaaggagtaccgtagcaggattgaaactgagctcagcaagatctgtgatggtatccttaagcttctggattcccaccttgtcccatctgccactgctgcagagtccaaggtgttctacctgaaaatgaagggtgactaccacaggtaccttgctgagtttaagtcaggagctgagaggaaggaagcagctgagaacactcttgtggcatacaagtctgcccaggatattgcactcgctgacctgcctacaactcacccgataaggcttggacttgcactgaacttctcagtgttctactatgagatactgaactcaccagaccgtgcttgcaaccttgcaaagcaggcgttcgacgatgctattgctgaactggacactcttggcgaggagtcttacaaggacagcaccttgatcatgcaacttcttcgtgacaatctgactctctggacctctgacaatgcggaggatggtggtgacgagatcaaggaagcagcgaagcctgaaggagagggccactaa

SEQ ID NO: 149002 - protein, 260 aa, Oryza sativa
MSPAEASREENVYMAKLAEQAERYEEMVEFMEKVAKTTDVGELTVEERNLLSVAYKNVIGARRASWRIISSIEQKEESRGNEAYVASIKEYRSRIETELSKICDGILKLLDSHLVPSATAAESKVFYLKMKGDYHRYLAEFKSGAERKEAAENTLVAYKSAQDIALADLPTTHPIRLGLALNFSVFYYEILNSPDRACNLAKQAFDDAIAELDTLGEESYKDSTLIMQLLRDNLTLWTSDNAEDGGDEIKEAAKPEGEGH

SEQ ID NO: 149003 - DNA, 798 bp, Arabidopsis thaliana
  CDS (1)..(798)
atgtcgtcttctcgggaagagaatgtgtacttagccaagttagctgagcaagctgaacgttatgaggaaatggttgagttcatggagaaagttgcaaagactgttgacaccgatgagcttactgtcgaagagagaaacctcttgtctgttgcttacaagaacgtcattggtgctaggagagcttcctggaggatcatatcttccattgaacagaaggaagaaagcagaggaaacgatgatcatgtttccattatcaaggactacagaggaaagatcgaaactgaactcagcaaaatctgtgatggaatactcaatcttctggattctcaccttgttcccactgcatctttggccgagtccaaagtcttttacctcaaaatgaaaggagattaccacaggtaccttgctgagtttaagactggagctgagaggaaagaagctgctgagagcactctggttgcttacaagtcagctcaggatattgcacttgctgatttagctcctactcatccgattagactgggacttgctcttaacttctctgtcttctactacgagattctcaactcacctgatcgtgcctgcagtctcgcaaaacaggcttttgatgaggccatttctgagctggatacattaggagaagaatcatacaaagacagtacgttgataatgcaacttctccgtgacaatctgaccctttggaactctgacatcaatgatgaggcgggcggtgatgagatcaaggaggcgtcaaaacatgagccggaagaggggaaaccagctgagacagggcagtga

SEQ ID NO: 149004 - protein, 265 aa, Arabidopsis thaliana
MSSSREENVYLAKLAEQAERYEEMVEFMEKVAKTVDTDELTVEERNLLSVAYKNVIGARRASWRIISSIEQKEESRGNDDHVSIIKDYRGKIETELSKICDGILNLLDSHLVPTASLAESKVFYLKMKGDYHRYLAEFKTGAERKEAAESTLVAYKSAQDIALADLAPTHPIRLGLALNFSVFYYEILNSPDRACSLAKQAFDEAISELDTLGEESYKDSTLIMQLLRDNLTLWNSDINDEAGGDEIKEASKHEPEEGKPAETGQ

SEQ ID NO: 149005 - DNA, 946 bp, Vicia faba
  CDS (13)..(798)
ccagattctccgatggccaccgcaccaacaccgcgtgaagagttcgtctacatggcgaaactcgccgaacaagccgagcgttacgaagagatggtggagttcatggaaaaagtaaccgccgccgtcgagagcgaggaactcaccgtcgaagaacggaacctcctctccgttgcttacaaaaacgtgatcggagcacgacgcgcttcgtggaggatcatctcctccatcgagcagaaggaagaaagcagaggcaacgacgaacacgtgtcggtcatccgtgattacagatctaagatcgagactgaactctccaacatctgtaacggtattctcaaactcctagattcgcgtctcatcccgtctgctgcgctcggtgattcgaaggttttctacctgaagatgaaaggtgattatcataggtatcttgctgagtttaagagcggcgctgaacgtaaagatgccgccgaaagcactctcactgcttataaatctgctcaggacattgcaaacactgagttgcctccaactcatcctatcaggcttggtcttgctctgaacttctccgtgttttactatgagattctcaactctcccgacagggcttgcggccttgcaaaacaggcttttgatgaagctattgctgagttggatacattgggagaggagtcatacaaggatagcactttgattatgcaacttctccgtgataacctcaccctttggacctctgatatgcaggatgacggtgctgatgaaatcaaagaagctgcacctaaaggcaatgatgaaccacagtaaaatgtgtgactgctaattagttattaaacttctcttctatcatgtttttaaagggagaaggtgctgattgataatgttgaagctactgagattttaggcgttcatggtctattttatgatatatggatgcactgggcttttttagttt

SEQ ID NO: 149006 - protein, 261 aa, Vicia faba
MATAPTPREEFVYMAKLAEQAERYEEMVEFMEKVTAAVESEELTVEERNLLSVAYKNVIGARRASWRIISSIEQKEESRGNDEHVSVIRDYRSKIETELSNICNGILKLLDSRLIPSAALGDSKVFYLKMKGDYHRYLAEFKSGAERKDAAESTLTAYKSAQDIANTELPPTHPIRLGLALNFSVFYYEILNSPDRACGLAKQAFDEAIAELDTLGEESYKDSTLIMQLLRDNLTLWTSDMQDDGADEIKEAAPKGNDEPQ

SEQ ID NO: 149007 - DNA, 1136 bp, Hordeum vulgare
  CDS (64)..(852)
gacagccgcccgtcttgctcgagattgacctttggtgaccattagaaaccagagacactgaagatggcgcagcctgctgagctttcccgtgaggagaatgtgtacatggctaagcttgcagagcaggctgagaggtacgaggagatggttgagttcatggagaaggtggccaagacggttgactccgaggagctcaccgtcgaagagcgcaaccttctatcagttgcttacaagaatgttattggtgcccgccgtgcctcgtggcgcatcatttcctccatcgagcagaaggaagagagccgtggcaacgaggaccgtgtcacactcatcaaggactaccgtggaaagattgaagttgagctcactaagatttgtgatggtatcctcaagcttcttgattcccaccttgtcccctcatctaccgctccagagtccaaggtcttctacctgaagatgaagggtgattactacaggtaccttgcagagttcaagagtggaactgagaggaaggatgctgctgagaacaccatggtggcatacaaagctgctcaggagattgcactggcagagctgcccccgactcatcctattaggcttgggctggcactcaacttctcggtgttctactatgagatcctcaactctcctgaccgtgcttgcgacctcgccaagcaggcttttgacgaggccatctcggaattggactcactgagcgaggagtcctacaaggacagcactttgatcatgcagcttctccgtgataacctgacgctgtggacttccgacatctcggaggacgctgctgaagaaatgaaggatgctcccaagggtgaatctggagatggacagtaaacattgtctatgtgtccagaaacttgtctttcttgcttgttcagtgtagattgtaatgtcgtcagtgtggttgttggtaattggaggctccaatttgtgttgtgatagggaagcttgtagctgcctgccttgcttggttatcgggctgcactggttattgcctcttgttgaaccttcctgttactttggtggttctagaaatttctgctgctcttgtctgtgtggccccttgtctattcatctgcttttcttctttaggaagggcgtcttctgaaccctttcca

SEQ ID NO: 149008 - protein, 262 aa, Hordeum vulgare
MAQPAELSREENVYMAKLAEQAERYEEMVEFMEKVAKTVDSEELTVEERNLLSVAYKNVIGARRASWRIISSIEQKEESRGNEDRVTLIKDYRGKIEVELTKICDGILKLLDSHLVPSSTAPESKVFYLKMKGDYYRYLAEFKSGTERKDAAENTMVAYKAAQEIALAELPPTHPIRLGLALNFSVFYYEILNSPDRACDLAKQAFDEAISELDSLSEESYKDSTLIMQLLRDNLTLWTSDISEDAAEEMKDAPKGESGDGQ

SEQ ID NO: 149009 - DNA, 1027 bp, Nicotiana tabacum
  CDS (71)..(853)
cccattcagaaaatcggaaaactccctcattcagatctccaaaaaaaaatacagagaaacaaatctaaacatggcggtggcaccgacggcgcgtgaggagaacgtgtacatggcaaagcttgcagagcaagctgagaggtacgaagaaatggttgaattcatggaaaaggtctccaactccctcggctcagaagaactcaccgtggaggaacgaaacctcctctccgtcgcgtacaagaacgtgatcggagcgcgtagggcatcgtggcgtattatctcatcgattgagcaaaaggaagagtccagagggaacgaggaacacgtaaactctatccgcgagtacagatctaagattgagaatgaactctctaagatctgtgatggcattctgaaattgctcgatgcaaagcttatcccttctgcagcatctggtgattctaaggtgttttacctgaaaatgaaaggagattaccaccgctatttggctgagttcaagaccggtgctgaacgtaaggaggctgctgagagtactctcactgcctacaaagctgctcaggatattgcaactactgagcttgccccaacacatcccatccgacttggactggctcttaacttctctgtgttttactatgagatcttgaactctcctgaccgcgcttgcaatcttgctaaacaggcctttgatgaagcaattgctgagttggacacactgggcgaggagtcttacaaggatagcactttgatcatgcaacttcttcgtgacaatctcactctctggacatctgatatgcaggatgatggggctgatgaaatcaaggaagatcccaaacctgatgaagccaaaaattgaaggaattgaaactctctaatttgcttttcacttcttcctggttgtttttattggaagaagctgattatcgtaatttcctttactattatggttttccgctagggggttgtcttattggaaatgaacaacttttaatattgatgtttcagaagttccatctttaaaaaaaaaaaa

SEQ ID NO: 149010 - protein, 260 aa, Nicotiana tabacum
MAVAPTAREENVYMAKLAEQAERYEEMVEFMEKVSNSLGSEELTVEERNLLSVAYKNVIGARRASWRIISSIEQKEESRGNEEHVNSIREYRSKIENELSKICDGILKLLDAKLIPSAASGDSKVFYLKMKGDYHRYLAEFKTGAERKEAAESTLTAYKAAQDIATTELAPTHPIRLGLALNFSVFYYEILNSPDRACNLAKQAFDEAIAELDTLGEESYKDSTLIMQLLRDNLTLWTSDMQDDGADEIKEDPKPDEAKN

SEQ ID NO: 149011 - DNA, 1157 bp, Glycine max
  CDS (13)..(798)
gaaagatcggcgatgactgcctccaaggatcgcgagaacttcgtctacatcgccaaactcgccgagcaggccgagcgttacgaagagatggtggaatcaatgaagaacgttgcgaatctcgacgttgaactgacggtggaggagcggaatttgctttctgttgggtacaagaatgtgattggtgctcgcagagcgtcctggaggatcctgtcttccattgagcagaaggaagaaacaaaagggaacgagttgaatgcgaagcggattaaggagtacagacagaaggttgaattggagctatcgaacatctgtaatgatgttatgagagtgattgatgagcaccttatcccttcggctgcagctggtgaatccactgtgttttactataagatgaaaggagattattatcgttatcttgctgaatttaagtcaggcaatgagaagaaggaagctgctgatcagtctatgaaagcatatgagtctgctaccgctgcagcagaggctgatttacctcccacacatcccatccgattgggtctagctttaaatttctctgttttctattatgagatcttgaactcccctgaaagagcctgtcatcttgcgaagcaagcttttgatgaagctatttctgagcttgacaccttgaatgaggagtcatacaaagatagcaccttaatcatgcaacttctcagggacaacctaactttgtggacttctgacatcccagaagatggagaagatgcccagaaagtgaatggcactgccaagcttggtggaggtgaggatgcagagtgagtccgatggatgatggaatcttccataggattcgatgcatgcgtttgggaatgaaacatgagggccgattacttatctgtgtattagctagagacagggattctattgtttcctctttgtttcctgttggattgcccaatacttcccgataggggcaaagagatactccatttgtgctatatttatggtatgtttttatttgtgtggtgtctggaaatggcctatttcattcccttaccgtttcctccagtctctgggggatttgattgatgagaattgcttatggtgggtgtatttccttttccaatgaaatgctacaacatttactgcaaaaaaaaaaaaaaaaaaaaaaaaaaaaa

SEQ ID NO: 149012 - protein, 261 aa, Glycine max
MTASKDRENFVYIAKLAEQAERYEEMVESMKNVANLDVELTVEERNLLSVGYKNVIGARRASWRILSSIEQKEETKGNELNAKRIKEYRQKVELELSNICNDVMRVIDEHLIPSAAAGESTVFYYKMKGDYYRYLAEFKSGNEKKEAADQSMKAYESATAAAEADLPPTHPIRLGLALNFSVFYYEILNSPERACHLAKQAFDEAISELDTLNEESYKDSTLIMQLLRDNLTLWTSDIPEDGEDAQKVNGTAKLGGGEDAE

SEQ ID NO: 149013 - DNA, 795 bp, Candida albicans
  CDS (1)..(795): transl_table=12
atgccagcctcccgtgaagattccgtttaccttgctaaattagccgaacaagcagaacgttatgaagaaatggttgaaaacatgaaagccgttgcttcctctggccaagaattgtctgttgaagaacgtaatttattatctgttgcttacaagaatgtcattggtgctcgtcgtgcttcttggagaattgtttcatcaattgaacaaaaagaagaagccaaaggaaatgagagccaagttgctttgatcagagattaccgtgccaagattgaagctgaattgtctaaaatttgtgaagatattctctctgtgttgagcgaccatttaattacatctgcccaaactggtgaatcaaaagtattttactacaagatgaaaggtgattaccacagatacttggctgaatttgctatcgctgaaaaacgtaaggaagctgctgatttatcattagaggcttataaagctgcttctgacgttgctgtgaccgagttgccaccaacccatccaatcagattaggtttagcattgaacttctctgttttctactatgaaattttgaactccccagatagagcttgtcatttagctaaacaagctttcgatgatgctgttgctgatttagaaaccttatctgaagattcatacaaggattcaactttgattatgcaattattgagagataacttgactttatggaccgatttatctgaagccccagctgccactgaagaacaacaacaatccagtcaagctccagctgctcaaccaacagaaggtaaggctgatcaagaatag

SEQ ID NO: 149014 - protein, 264 aa, Candida albicans
MPASREDSVYLAKLAEQAERYEEMVENMKAVASSGQELSVEERNLLSVAYKNVIGARRASWRIVSSIEQKEEAKGNESQVALIRDYRAKIEAELSKICEDILSVLSDHLITSAQTGESKVFYYKMKGDYHRYLAEFAIAEKRKEAADLSLEAYKAASDVAVTELPPTHPIRLGLALNFSVFYYEILNSPDRACHLAKQAFDDAVADLETLSEDSYKDSTLIMQLLRDNLTLWTDLSEAPAATEEQQQSSQAPAAQPTEGKADQE

SEQ ID NO: 149015 - DNA, 1464 bp, Chlamydomonas reinhardtii
  CDS (69)..(848)
agacaccgtgcttcacacagtctcacacacaccttgcatttagcccgctacagagagcactagctgagatggcggtcgaccgggaggaatgcgtctacatggccaagctggccgagcaggctgagcgctatgacgagatggtggaggagatgaagaaggtggccaagctggtgcacgaccaggagctgtccgtggaggagcgcaacctgctttcggtggcttacaagaacgtcattggcgctcgccgcgcgtcctggcgcattatctcctccatagagcagaaggaggaggctaagggcaacgaggagcatgtccagcgcattcgcaagtaccgcactgtggtcgaggaggagctcagcaaaatctgcgccagcattctgcagctgttggacgaccacctgatccccactgcctccactggcgagagcaaggtgttctacctgaagatgaagggcgactaccaccgctacctggctgagtttaagaccggcgctgaccgcaaggaggctgccgagcacaccctgctcgcgtacaaggccgcgcaggacattgccctggtggacctcccgcctacgcaccccattcgcctgggcctggccctcaacttctccgtcttctactacgagattctgaactcgcccgagcgcgcgtgccacctggccaagcaggcgttcgacgaggccattgccgagcttgactcgctgggcgaggagtcctacaaggactcgacgctcatcatgcagctgctgcgcgacaacctcacactgtggacctccgacatgcaggaccccgctgccggtgacgacagagagggcgctgacatgaaggttgaggacgctgagccctgaaaggagcttctgcagcagccggggccgggtcagtagcctgaagctcgttctacacgtaatacggggaatcgtttttagggtttgggagtgggcctgttctgaagtgcacgcttcaaacatggctgcacgtgtggtccacgcacggtgttcgtcacatgcattgttgtcgtggctacccggggtcgataaattctttgcctcaggtgactggtcccacacataggcggggagatccggtggggagttgcgcttgtcgaggtcggcgtgaagtggcgttacagctatctcgtcggagaaccctaactacgagagtggcgggtccgaagacgtgtcatgcaaaacacgttgtgtgggtgcgtacagagggcctcttgacattgtgttggccatcacggcccaatgcgcacgttgacgagtccgggtacattccgtaaattcaatcgcaatgcgtaggttcttagacattagaccgccatgagtggtggggccgactgcatacgttggaccagaccgtggcgctggcgctgtgagatggaacatatgtgaagtgcgtgaggcgtgttgaagcgcactaatgcttgcaaaatggcttccatggaaaaaaaaaaaaaaaaaa

SEQ ID NO: 149016 - protein, 259 aa, Chlamydomonas reinhardtii
MAVDREECVYMAKLAEQAERYDEMVEEMKKVAKLVHDQELSVEERNLLSVAYKNVIGARRASWRIISSIEQKEEAKGNEEHVQRIRKYRTVVEEELSKICASILQLLDDHLIPTASTGESKVFYLKMKGDYHRYLAEFKTGADRKEAAEHTLLAYKAAQDIALVDLPPTHPIRLGLALNFSVFYYEILNSPERACHLAKQAFDEAIAELDSLGEESYKDSTLIMQLLRDNLTLWTSDMQDPAAGDDREGADMKVEDAEP

SEQ ID NO: 149017 - DNA, 780 bp, Helianthus annuus
  CDS (1)..(780)
atggcagccgcatcatctcctcgcgaagagaacgtatacctagcaaaactcgcagaacaagccgaacgctacgaagaaatggtcgaattcatggaaaaagtcgtcgccgccgcagacggcggagaagaactaaccatcgaagaacgaaacctcttatccgtcgcctacaagaacgtcatcggagcacgaagagcctcgtggcggatcatctcttcaatcgagcagaaagaggagagccgtggcaacgaaggacacgtgtccaccatccgtgactacagatctaagatcgagtcggagttatcgtcgatttgcgacggtattttgaaggttctggattccaaacttattggatctgcatctggtggtgattcaaaggtgttctatttgaagatgaaaggtgattattataggtatttggctgagtttaagaccggagatgagaggaagctggctgctgagaatactctttcggcttataaggctgctcaggatattgcgaatgcggaactagctcccacccatccgatcagattaggactggcactcaacttctctgtgttttactatgagatccttaactcacctgatcgcgcttgtaatcttgcaaaacaggcttttgatgaagcaattgctgaattggatactttaggagaggactcatacaaggacagcactctcatcatgcagctacttcgcgataaccttactttgtggacttctgatatgcaggatgacactgctgaagaagttaaagaagcacctaagcctgatgatcagtaa

SEQ ID NO: 149018 - protein, 259 aa, Helianthus annuus
MAAASSPREENVYLAKLAEQAERYEEMVEFMEKVVAAADGGEELTIEERNLLSVAYKNVIGARRASWRIISSIEQKEESRGNEGHVSTIRDYRSKIESELSSICDGILKVLDSKLIGSASGGDSKVFYLKMKGDYYRYLAEFKTGDERKLAAENTLSAYKAAQDIANAELAPTHPIRLGLALNFSVFYYEILNSPDRACNLAKQAFDEAIAELDTLGEDSYKDSTLIMQLLRDNLTLWTSDMQDDTAEEVKEAPKPDDQ

SEQ ID NO: 149019 - DNA, 1153 bp, Lilium longiflorum
  CDS (97)..(876)
ctggcacgagccctattcctctttttagtgcctccccacctctcccccaaaatccgaacagctcctcgttcctatctaggtttcaacgcgttcaggatgtcgccggcggagccatcgcgggaggagaacgtgtacatggcgaagctggcggagcaggcggagcgctacgaggagatggtggagttcatggagaaggtggcccgcacggttgacaccgaggagctcactgttgaggagcgcaacctcctgtcagtggcgtacaagaacgtcatcggcgcccgccgcgcctcgtggcggatcatttcctcgatcgagcagaaggaagagagccgcgggaacgaggatcatgtcgcgttgatcaaggattaccgcgggaagatcgaggccgagctgagcaagatctgtgacgggatcctcaagctacttgattcgcatctggtgccgtcttcgacggcgccggagtcgaaggtgttttacctcaagatgaagggagactaccacaggtaccttgcggagttcaaatctggagctgagaggaaggaggctgcggagagcacgctcttggcctacaagtctgctcaggacattgctctggcggagctggctcctactcatccgatcaggctcgggctggcgcttaacttctctgtcttctactatgaaatcctgaactcgccggaccgtgcttgcaatctagcaaagcaggcctttgatgaggctatctcagagctagacactttgggtgaggaatcgtacaaggacagcacactgatcatgcagcttctccgagacaatctgactctgtggacctccgatatcaacgaggaggccggggatgagattaaggaagcctcaaaagcagtagagggacagtaatgaaccgtggtgaaccgctatgctgttggagtctatgttttttatttttgtgtccggtggagttatagttaggatatttatgctcagcaaacctattgtgtggcttttgaatgtacctcccatcatttttattgtggattgttgttctagttgaacaaggttttgttcgtatgcaatacttcatttcagtttatatcatgtgggcttgaaaacaagtgattttcaataattatatagtactggcatatctttatgaatgatttggcaaaagttggct

SEQ ID NO: 149020 - protein, 259 aa, Lilium longiflorum
MSPAEPSREENVYMAKLAEQAERYEEMVEFMEKVARTVDTEELTVEERNLLSVAYKNVIGARRASWRIISSIEQKEESRGNEDHVALIKDYRGKIEAELSKICDGILKLLDSHLVPSSTAPESKVFYLKMKGDYHRYLAEFKSGAERKEAAESTLLAYKSAQDIALAELAPTHPIRLGLALNFSVFYYEILNSPDRACNLAKQAFDEAISELDTLGEESYKDSTLIMQLLRDNLTLWTSDINEEAGDEIKEASKAVEGQ

SEQ ID NO: 149021 - DNA, 1242 bp, Mesembryanthemum crystallinum
  CDS (55)..(849)
tctctctctcaattccgtaataaccgattttgagatttgtttggcatagtgaaaatgtcgtccgaatcctccagggaagaaaatgtttacatggccaagctggccgagcaggcggagcgctatgaggaaatggtggagttcatggagaaagttgcaaagatgacagataccgaggaacttagcgttgaggagagaaacctcttgtctgtggcttacaagaatgtgattggtgctaggagggcttcgtggaggattatttcctctattgagcagaaggaggaaagcaggggaaacgaggatcacgtttcaaccatcaaggagtacaggggtaagattgaaactgagttgagcaagatctgtgatgggatcttgaacctccttgagtcacacctcatcccttcagcctccactgctgaatcaaaggtcttttacctcaagatgaagggtgactaccataggtaccttgccgagttcaagactggagccgagaggaaggaggctgctgagaacaccctgttggcttacaagtccgctcaggacattgctttggcagaattggccccgactcatcctattaggcttggacttgctcttaacttttctgtcttctattacgaaattttgaactcacctgaccgtgcttgcaatctagcgaaacaggcttttgatgaggctatctctgagcttgatactttgggtgaggagtcatacaaggacagcacattgatcatgcagcttctccgagacaatctaaccttgtggacttcagataatgcggaggagggaggcgatgagatcaaggaggctgctgccaaacgggaatcaggcgaggagaagcctcagcagtgataaatttaaaggagttctgctatgtatttgtcgcacggggctcctatatagatgtcatttgggtggttgtagctaggattattagtgaatcatattatctttagcacctgattgctgggtagcactcagatttagcggtcatcatgtcatttccatagacttataaacagcttctgctcgtggtcgtatttcagtgttgtgagagttttagcttatattcaacttgtttgcgtgcccaaagaggaggtattttgatttatctcagcctaaaggttgtacttatacttctgttcttgtttgtccatgttgaagtaactatctgctttgtactactattattcgcttgtggtttgcacctaaaagagtgattacaatgcaagtaagcattttaat

SEQ ID NO: 149022 - protein, 264 aa, Mesembryanthemum crystallinum
MSSESSREENVYMAKLAEQAERYEEMVEFMEKVAKMTDTEELSVEERNLLSVAYKNVIGARRASWRIISSIEQKEESRGNEDHVSTIKEYRGKIETELSKICDGILNLLESHLIPSASTAESKVFYLKMKGDYHRYLAEFKTGAERKEAAENTLLAYKSAQDIALAELAPTHPIRLGLALNFSVFYYEILNSPDRACNLAKQAFDEAISELDTLGEESYKDSTLIMQLLRDNLTLWTSDNAEEGGDEIKEAAAKRESGEEKPQQ

SEQ ID NO: 149023 - DNA, 1017 bp, Oenothera hookeri
  CDS (39)..(821)
ctaacctctctctctctctctctctccctccctcaacaatggcgactgcaccttcaccgcgcgaggagaacgtctaccttgccaagctcgccgagcaagccgagcgctacgaggagatggttgagttcatggagaaggtctgcgccgctgctgactccgaggagctcacagtcgaggagcgcaacctcctctccgttgcctataagaacgtcatcggcgctcgtcgtgcttcctggcgtatcatctcctccatcgagcagaaggaggagagccgcggtaacgacgaccatgtctccaccatccgcgattaccgctccaagattgagaccgagctctctaacatctgtggtggaatcctcaagcttcttgattcccgtctcattccctccgctgcctctggtgactccaaggttttttatttgaagatgaagggagattaccacaggtacttggctgagttcaagacaggagctgagcgcaaagaagccgccgagagcaccctgtctgcctacaaagctgctcaggatattgcaaatgccgaattggctccaactcacccaatcagactcggattggcccttaacttttctgtcttctactatgagatcctcaactctcctgatcgtgcttgcaaccttgcaaacgaggcatttgatgaagcaattgctgaactggatactctggaagaggagtcgtacaaggacagcactctgatcatgcaacttcttcgtgacaatctcaccctctggacatccgacatgcaggatgatggaggtgatgagattaaagaagcggctccaaagcctgacgaacagtactgattaatgctcggtttgggtcaatgaagaaatattgaagcactccattgagtttttcagtaggagaagttgcttatttgtgactgctttctttttttttttgttcctctcttatgccgaagatgtcaaggcacgacctttgttactgaattgaattatgtcatgctgtgttaattgaatctcttctcttttttttttt

SEQ ID NO: 149024 - protein, 260 aa, Oenothera hookeri
MATAPSPREENVYLAKLAEQAERYEEMVEFMEKVCAAADSEELTVEERNLLSVAYKNVIGARRASWRIISSIEQKEESRGNDDHVSTIRDYRSKIETELSNICGGILKLLDSRLIPSAASGDSKVFYLKMKGDYHRYLAEFKTGAERKEAAESTLSAYKAAQDIANAELAPTHPIRLGLALNFSVFYYEILNSPDRACNLANEAFDEAIAELDTLEEESYKDSTLIMQLLRDNLTLWTSDMQDDGGDEIKEAAPKPDEQY

SEQ ID NO: 149025 - DNA, 1113 bp, Pisum sativum
  CDS (86)..(868)
tttttttctctctcacaatctcaatcgctttctctctctaaactccctaaaaccagatctcgctttctctctctaggtttcaacaatggcggccgctcatactcctcgggaagagaacgtctacatggctaagctcgccgagcaagccgagcgctacgaagaaatggtggagttcatggaaaaggtttccgctaacgccgatagcgaagaactcaccgtggaggagaggaatcttctctccgtcgcttacaaaaacgtgatcggagctagacgtgcctcgtggcgtatcatttcgtcgatcgagcagaaggaagagagccgcggcaacgaggatcacgtcgccgtcatccgtgattaccgatctaaaatcgagtctgagctctctaacatctgcgacggtatcctcaagctcctcgatactcgtctcattccatcagcttcctctggcgattctaaggttttctaccttaagatgaagggagattaccacaggtacctcgctgagtttaagaccggagccgagcgtaaggaggctgcagagagcactcttacaggctacaaatctgctcaggacattgcaaatgctgaattaccaccaactcatccaattaggcttggccttgccctgaacttctccgttttttactatgaaatccttaactctcctgatcgtgcctgcaatcttgcaaaacaggcttttgatgaagctattgctgaattggatacccttggagaggaatcatacaaggatagcactttgatcatgcaacttcttcgtgataatctcaccctatggacctctgacatgcaggatgatggtgctgatgaaattaaagaagcagccccaaaagcagatgaacagcagtaaacaaattcaactgccaattagaatcgaacttctcctcctctataagttaatgaatgaaggaagaaggtgcttgttgccaatctctttgggttctgagattttaggcattcatgtctgttgagttctggagtcctgggctgttttagtttgtccttccatttttaagtgttttacaaattattgcctattttattgaggacactgaagttttattatatggaattggaaatttaagattcaaaccg

SEQ ID NO: 149026 - protein, 260 aa, Pisum sativum
MAAAHTPREENVYMAKLAEQAERYEEMVEFMEKVSANADSEELTVEERNLLSVAYKNVIGARRASWRIISSIEQKEESRGNEDHVAVIRDYRSKIESELSNICDGILKLLDTRLIPSASSGDSKVFYLKMKGDYHRYLAEFKTGAERKEAAESTLTGYKSAQDIANAELPPTHPIRLGLALNFSVFYYEILNSPDRACNLAKQAFDEAIAELDTLGEESYKDSTLIMQLLRDNLTLWTSDMQDDGADEIKEAAPKADEQQ

SEQ ID NO: 149027 - DNA, 1093 bp, Nicotiana tabacum
  CDS (25)..(780)
cccaaatagagagagagcggagaaatggacaaggaaagagagaaacaggtttacttggctaggctggctgaacaagctgagagatatgatgaaatggtagaagcaatgaagacggttgctaagatggatgtcgaactgactgttgaggagaggaatttggtgtcagttgggtataagaatgttattggagcaagaagggcttcatggcggatattgtcttcaattgaacaaaaggaggagagtaagggtcatgaccagaatgttaagagaataaagacttaccaacagagggttgaagatgagcttacaaaatatgcattgacattgtccgtgatagatgagcacgttgttccttcgtccactagtggagaatctactgtcttctactataagatgaagggagactactatcgctatttagcagagttcaaatcaggggatgatcgtaaagaggcagctgatcagtcacttaaagcttatgaggctgctactgccacagctagcgcagatcttgctcctactcacccaattagacttggacttgcattgaacttctcagtcttctactatgagattctaaattcacctgagagggcatgtcacttggccaagcaagcatttgacgaagctattgccgagcttgatagccttagtgaagaatcctacaaggacagtacccttatcatgcagcttctaagggataacttcactttgtggacctcagaccttgaagagggaggtgaacattctaagggtgatgagcgtcaaggggagaactagctgaagttttaaaggagagaaatctttgtgaagctggctccttgtggaaagtctgtttttcatttaatgtttcagggattcatcgctattggcttgtatctacataaacattaccagagtgcttgaaaaccttttttattcttatattttaaattattaagtcaacttttttatggatggttttttacaccgtgaatatcaaaagttaaaaattttcataggatggtgctcgtcaatgagagctacaagaattacataccaaaaattgagataatacattatggcttttcaccagtaaaaaaaaaaaaaaaaa

SEQ ID NO: 149028 - protein, 251 aa, Nicotiana tabacum
MDKEREKQVYLARLAEQAERYDEMVEAMKTVAKMDVELTVEERNLVSVGYKNVIGARRASWRILSSIEQKEESKGHDQNVKRIKTYQQRVEDELTKYALTLSVIDEHVVPSSTSGESTVFYYKMKGDYYRYLAEFKSGDDRKEAADQSLKAYEAATATASADLAPTHPIRLGLALNFSVFYYEILNSPERACHLAKQAFDEAIAELDSLSEESYKDSTLIMQLLRDNFTLWTSDLEEGGEHSKGDERQGEN

SEQ ID NO: 149029 - DNA, 1101 bp, Trichoderma harzianum
  CDS (35)..(823)
caccaaaaaaaaagttcaaaaatctaccgtcaaaatgggtcacgaagatgctgtttacctggccaagctcgccgagcaggctgagcgatatgaggagatggttgagaacatgaagatcgtcgcctccgaggaccgcgacctgaccgtcgaggagcgcaaccttctctccgtcgcctacaagaacgtcattggtgctcgccgcgcctcttggagaatagtcacttctatcgagcagaaggaggagtctaagggcaactcttcccaggtcacccttatcaaggagtaccgccagaagatcgagaacgagcttgccaagatctgcgacgatatccttgaggttctcgaccagcacctgatcccctctgccaagtctggcgagtccaaggtcttttaccacaagataaagggtgactaccaccgttacctcgctgagttcgctattggcgaccgccgcaaggactctgccgacaagtccctcgaggcttacaaggctgccaccgaggttgcccagactgagctgcctcccacccaccccatccgccttggacttgccctcaacttctccgtcttctactacgagatcctcaacgctcccgaccaggcttgccacctcgccaagcaggcctttgacgatgctattgctgagctcgacaccctcagcgaggagagctacaaggactccactctcatcatgcagctgctccgtgacaacctcaccctctggacctcctccgaggccgagactccggccaggctgatgcccctgctaaggaggagacccctgctgaggctgccgtcccgccgccgaagagcccaaggctgagtaagttcaggggagcacggtataaatctctaggcttgggtcgctttgttatcggatgggctggtgtctacggtgtggatggaagacttcgtttttgatcaagagcttcggcatcgttttaggtaaaactcgcaaactattttcgggaaggaatcgatttggttccccctttacggactggcagggaggatgaagaagaagagcatattggaggttctgcttttagactcttgatgcgtagccgtctggacaaataaaaactactaaaattgcttttt

SEQ ID NO: 149030 - protein, 262 aa, Trichoderma harzianum
MGHEDAVYLAKLAEQAERYEEMVENMKIVASEDRDLTVEERNLLSVAYKNVIGARRASWRIVTSIEQKEESKGNSSQVTLIKEYRQKIENELAKICDDILEVLDQHLIPSAKSGESKVFYHKIKGDYHRYLAEFAIGDRRKDSADKSLEAYKAATEVAQTELPPTHPIRLGLALNFSVFYYEILNAPDQACHLAKQAFDDAIAELDTLSEESYKDSTLIMQLLRDNLTLWTSSEAETPARLMPLLRRRPLLRLPSRRRRAQG

SEQ ID NO: 149031 - DNA, 822 bp, Saccharomyces cerevisiae
  CDS (1)..(822)
atgtcccaaactcgtgaagattctgtttacctagctaaattagctgaacaagccgaacgttatgaagaaatggtcgaaaacatgaaggccgttgcttcatcaggtcaagagttatctgtcgaagaacggaatctattgtcggttgcttacaagaacgtcatcggtgctcgccgtgcttcatggagaatagtttcttcgatcgaacaaaaagaagaatcaaaggagaaatctgaacatcaagttgaattaatccgttcttaccgttctaaaattgaaactgaattgaccaaaatctctgacgacattttatctgtgttagattctcatttaatcccttctgctactactggtgagtctaaagtattttactataagatgaagggtgactaccaccgttatttagctgaattttccagcggagatgcaagagaaaaggcaaccaactcctctttggaggcttataaaaccgcttccgaaatcgccacaactgaattgcctccaactcacccaattcgtttaggtctagctttgaatttctccgtcttctattacgaaattcaaaactctcctgataaggcttgccacttggccaaacaagcctttgatgatgctattgctgagttagatactttatctgaagaatcatacaaggatagcactttgatcatgcaattattaagggacaacttgaccttatggacctctgatatttctgaatctggtcaagaagatcaacaacaacaacaacaacagcaacagcaacagcaacaacagcaacaacaagctccagctgaacaaactcaaggtgaaccaaccaaataa

SEQ ID NO: 149032 - protein, 273 aa, Saccharomyces cerevisiae
MSQTREDSVYLAKLAEQAERYEEMVENMKAVASSGQELSVEERNLLSVAYKNVIGARRASWRIVSSIEQKEESKEKSEHQVELIRSYRSKIETELTKISDDILSVLDSHLIPSATTGESKVFYYKMKGDYHRYLAEFSSGDAREKATNSSLEAYKTASEIATTELPPTHPIRLGLALNFSVFYYEIQNSPDKACHLAKQAFDDAIAELDTLSEESYKDSTLIMQLLRDNLTLWTSDISESGQEDQQQQQQQQQQQQQQQQQAPAEQTQGEPTK

SEQ ID NO: 149033 - DNA, 813 bp, Schizosaccharomyces pombe
  CDS (1)..(813)
atgtctactacttctcgtgaagatgctgtttatttagccaaacttgctgagcaagccgagcgctatgaaggcatggttgaaaacatgaaaagcgttgcctccactgatcaagaattgaccgtcgaagagcgtaacttgctctctgttgcttataagaatgtaattggagctcgccgggcgtcttggcgtatcgtttcctccatcgagcaaaaggaggagagcaaaggcaatactgctcaagttgaattaattaaggaatatcgtcaaaagattgaacaagaacttgacactatttgccaagatatcttgaccgttcttgagaagcaccttatccctaatgctgcctctgccgaatccaaggttttctactacaagatgaagggtgactactatcgttaccttgctgagtttgccgttggtgagaagcgccaacactccgctgatcaatctcttgaaggttacaaggccgcttctgaaattgctaccgccgaacttgcacctactcatcctatccgcttaggtcttgctcttaatttctccgttttctactatgagatcttgaactcccccgaccgtgcttgctacttagccaagcaagcctttgatgaagctatctccgagttggacagcctttccgaggaatcctacaaagattctactttaatcatgcaattgttgcgtgacaaccttaccttatggacttctgatgctgaatacagtgccgccgctgctggtggtaacaccgagggagctcaagaaaacgctccttccaatgctccagaaggcgaagctgagcccaaggcggacgcatag

SEQ ID NO: 149034 - protein, 270 aa, Schizosaccharomyces pombe
MSTTSREDAVYLAKLAEQAERYEGMVENMKSVASTDQELTVEERNLLSVAYKNVIGARRASWRIVSSIEQKEESKGNTAQVELIKEYRQKIEQELDTICQDILTVLEKHLIPNAASAESKVFYYKMKGDYYRYLAEFAVGEKRQHSADQSLEGYKAASEIATAELAPTHPIRLGLALNFSVFYYEILNSPDRACYLAKQAFDEAISELDSLSEESYKDSTLIMQLLRDNLTLWTSDAEYSAAAAGGNTEGAQENAPSNAPEGEAEPKADA

SEQ ID NO: 149035 - DNA, 813 bp, Schizosaccharomyces pombe
  CDS (1)..(813)
atgagtaattctcgtgaaaactcggtgtatctcgccaagttggccgaacaggctgaacgctacgaagaaatggtcgaaaatatgaagaaagttgcatgctcaaacgataaactttctgttgaagaacgtaacttgctttctgttgcctataaaaacatcattggtgctcgcagagcatcatggcgtattatttcctctatagagcaaaaggaggaaagtaggggcaacactcgacaagccgcattgattaaagagtaccgtaagaagattgaagatgagttatccgatatttgtcatgacgtcctttccgtccttgaaaagcatttgattcctgccgctacaaccggtgaatccaaggtattttactataaaatgaagggtgattactatcgttatttggccgaatttactgttggcgaagtttgcaaagaggccgccgacagctctttagaagcttacaaggcagcttctgacattgctgttgctgagttgcctcccacggaccctatgcgcttgggtttggctctcaacttttccgtcttctattatgaaatccttgactctccagaaagtgcatgccatttggctaaacaagtatttgatgaggccatttcagagctcgatagtctttctgaagaatcttacaaagactctactttaatcatgcagcttcttcgcgataacttgactttatggacttctgacgccgaatacaaccagtctgctaaggaggaggctcctgctgccgctgctgcttctgaaaacgaacatcccgagcccaaagagtctacgactgacactgttaaagcttga

SEQ ID NO: 149036 - protein, 270 aa, Schizosaccharomyces pombe
MSNSRENSVYLAKLAEQAERYEEMVENMKKVACSNDKLSVEERNLLSVAYKNIIGARRASWRIISSIEQKEESRGNTRQAALIKEYRKKIEDELSDICHDVLSVLEKHLIPAATTGESKVFYYKMKGDYYRYLAEFTVGEVCKEAADSSLEAYKAASDIAVAELPPTDPMRLGLALNFSVFYYEILDSPESACHLAKQVFDEAISELDSLSEESYKDSTLIMQLLRDNLTLWTSDAEYNQSAKEEAPAAAAASENEHPEPKESTTDTVKA

SEQ ID NO: 149037 - DNA, 774 bp, Oryza sativa
  CDS (1)..(774)
atggcccccagcgacgacctcgtctacatggccaagctcgccgagcaggccgagcgatacgacgagatggtggaggcaatgaatagtgtggcaaagttagacgaggggctgacaaaggaggagaggaacctcctctcagttggctacaagaatttgattggtgcaaagcgtgcggcaatgcgtatcattggatccattgagctaaaggaggagacaaagggcaaggagagtcatgtaaggcagactgctgagtatcgtcgcaaggtggaggctgagatggataaaatctgctgtgatgtcataaacattattgacaagtaccttatcccacattcctctggagctgagagctcagtcttctactacaaaatgaagggagattactaccggtaccttgcagagttcaagactgggactgagaagattgaagtgtctgaactgtcactcaatgcttatgagactgcttccaaaactgcgcagacagatctcactccaactgaccctatcagacttggtttagctctgaatatatctgtcttctactgtgagatcatgaactcacctgacaaagcttgccaacttgctaagaacgcctttgatgaagctgttgcggagcttccctccctcagtgaggagaattacaaagatagtacactgatcatgcaacttctgagggataatctagcactgtggaattctgatatggctgatgatgcagacgatattagggaacgaacagatacaactggtgctaaaggtgaccctgcagcgtga

SEQ ID NO: 149038 - protein, 257 aa, Oryza sativa
MAPSDDLVYMAKLAEQAERYDEMVEAMNSVAKLDEGLTKEERNLLSVGYKNLIGAKRAAMRIIGSIELKEETKGKESHVRQTAEYRRKVEAEMDKICCDVINIIDKYLIPHSSGAESSVFYYKMKGDYYRYLAEFKTGTEKIEVSELSLNAYETASKTAQTDLTPTDPIRLGLALNISVFYCEIMNSPDKACQLAKNAFDEAVAELPSLSEENYKDSTLIMQLLRDNLALWNSDMADDADDIRERTDTTGAKGDPAA

SEQ ID NO: 149039 - DNA, 795 bp, Oryza sativa
  CDS (1)..(795)
atggcggcggcggcgggaggagggacgagggaggagatggtgtacatggcgaagctggcggagcaggcggagaggtacgaggagatggtggagttcatggagaaggtggtgacggcggcggcggcgggcgggggtggggagctcacggtggaggagaggaacctgctgtccgtggcgtacaagaacgtcatcggcgcgcgcagggcgtcgtggcgcatcgtgtcctccatcgagcagaaggaggaaggccgcggcgccgcgggccacgccgccgccgcgcgctcctaccgcgcccgcgtcgaggccgagctctccaacatctgcgcggggatactccgcctcctcgacgagcgcctcgtccccgccgccgccgccgtcgacgccaaggtcttctacctcaagatgaagggcgactaccaccgctacctcgccgagttcaagaccggagccgagcgcaaggacgccgccgacgccaccctcgccgcctaccaggccgcgcaggacatagccatgaaggagctgtcgccgacgcaccccatcagactgggccttgcgctcaacttctccgtgttctactacgagatcctcaactcgcccgaccgcgcgtgcacgctcgccaagcaggccttcgatgaagctatttcggaactggatacccttggggaagaatcctacaaggacagcaccctgatcatgcagcttcttcgcgacaatctcactttgtggacttctgatatgcaggacgatggaggtgatgaaatgagggatgcaaccaagcctgaggatgagcactag

SEQ ID NO: 149040 - protein, 264 aa, Oryza sativa
MAAAAGGGTREEMVYMAKLAEQAERYEEMVEFMEKVVTAAAAGGGGELTVEERNLLSVAYKNVIGARRASWRIVSSIEQKEEGRGAAGHAAAARSYRARVEAELSNICAGILRLLDERLVPAAAAVDAKVFYLKMKGDYHRYLAEFKTGAERKDAADATLAAYQAAQDIAMKELSPTHPIRLGLALNFSVFYYEILNSPDRACTLAKQAFDEAISELDTLGEESYKDSTLIMQLLRDNLTLWTSDMQDDGGDEMRDATKPEDEH

SEQ ID NO: 149041 - DNA, 798 bp, Oryza sativa
  CDS (1)..(798)
atgtcgccggcggagccgacgagggaggagagcgtgtacaaggcgaagctggcggagcaggcggagcggtacgaggagatggtggagtacatggagcgcgtggcgcgcgcggcggggggcgcctccggcggggaggagctcacggtggaggagcggaacctgctgtccgtggcgtacaagaacgtcatcggcgcccgccgcgcgtcgtggcggatcatctcgtcgatcgagcagaaggaggagggccgcgggaacgacgcccacgccgccaccatccgctcctacaggggcaagatcgaggccgagctcgcccgcatctgcgacggcatcctggccctgctcgactcccacctcgtcccctccgccggcgccgccgagtccaaggtcttctacctcaagatgaagggcgactaccacaggtaccttgcggagtttaagtctggcgacgagaggaagcaggctgcggagagcaccatgaatgcatacaaggctgctcaggacattgctctcgcagatttggctccgacccaccccataaggcttgggcttgcactcaacttttcagtgttctactatgagatcttgaactcccctgaccgtgcctgcaacctcgcgaagcaggcgtttgatgaggccatatcagaactggacagccttggtgaagaatcctacaaggacagcactttgatcatgcagctcctgcgtgacaacttgactctgtggacttcagatgccaatgatgatggtggtgacgaaatcaaggaagccgcagctccaaaagagcctggggatcagtga

SEQ ID NO: 149042 - protein, 265 aa, Oryza sativa
MSPAEPTREESVYKAKLAEQAERYEEMVEYMERVARAAGGASGGEELTVEERNLLSVAYKNVIGARRASWRIISSIEQKEEGRGNDAHAATIRSYRGKIEAELARICDGILALLDSHLVPSAGAAESKVFYLKMKGDYHRYLAEFKSGDERKQAAESTMNAYKAAQDIALADLAPTHPIRLGLALNFSVFYYEILNSPDRACNLAKQAFDEAISELDSLGEESYKDSTLIMQLLRDNLTLWTSDANDDGGDEIKEAAAPKEPGDQ

SEQ ID NO: 149043 - DNA, 789 bp, Brassica napus
  CDS (1)..(789)
atggaatctgccaaagagcgtgacactttcgtctacctcgctaagttatctgaacaagctgagcgctatgaagagatggtggagtcgatgaagaaccttgcgaagctgaacgttgatctaacgttggaagagaggaacttgctctctgttggatacaagaacgtgatcggttcgaggagagcttcttggaggatcttctcgtcgatcgaggagaaagaagcagtgaaagggaacgatgttaatgtaaagagaatcaaagattatatggagaaggttgagttagagctcacaagtatatgcattgacataatgtctgtgttggacgagcatctgatcccatctgcttcagagggtgaatcaactgtcttcttcaacaagatgaaaggtgattattaccgctatcttgctgaattcaaatcaggggatgagaggaaagaggctgctgatcagtctttgaaagcctatgagattgctactacttctgctgcggctaaactccctcctacccatcctatcagattgggattggctttgaacttctctgtcttctactacgagatcatgaactcacctgaaagggcatgtcaccttgctaaggaggcgtttgatgaagcaatctcagagcttgacagtctgaatgaggaatcttacaaagatagcactttgattttgcaactccttagggacaatctgaccttgtggacttctgacatccctgaagaaggagatgatgcccataagacgaatggttctgctaaacacggtgcaggtggagacgatgcagagtga

SEQ ID NO: 149044 - protein, 262 aa, Brassica napus
MESAKERDTFVYLAKLSEQAERYEEMVESMKNLAKLNVDLTLEERNLLSVGYKNVIGSRRASWRIFSSIEEKEAVKGNDVNVKRIKDYMEKVELELTSICIDIMSVLDEHLIPSASEGESTVFFNKMKGDYYRYLAEFKSGDERKEAADQSLKAYEIATTSAAAKLPPTHPIRLGLALNFSVFYYEIMNSPERACHLAKEAFDEAISELDSLNEESYKDSTLILQLLRDNLTLWTSDIPEEGDDAHKTNGSAKHGAGGDDAE

SEQ ID NO: 149045 - DNA, 777 bp, Brassica napus
  CDS (1)..(777)
atgtcatcatcatcacgtgaagagaatgtgtacatggcgaagctagcggagcaagccgagcgttacgaagagatggtggagttcatggagaaagttgctaaatctgttgacaacgaagagctcacagtcgaagagaggaaccttctctccgtcgcttacaagaacgtgattggagcgaggagggcttcgtggaggatcatctcttccatcgagcagaaggaagagagcaaagggaacgaggatcacgttgctatcatcaaggactacaggggcaagatcgaagctgagcttagcaagatctgcgatggaatcttgaatgttcttgaagctcatctcattccatctgcttcgcctgctgagtctaaagtgttttacttgaagatgaagggagattatcataggtatcttgctgagtttaaggctggcaacgagaggaaagatgctgctgaaagcactttggttgcgtacaagtctgctcaggacattgccactgctgagttggctcccactcacccgatcaggcttggtcttgcactcaacttctctgtgttttactatgagatccttaactcgcctgaccgtgcctgcagcctcgccaaactggcttttgatgaagcaatcgccgagttggatacgttgggtgaggaatcatacaaggacagtacactgatcatgcagcttctcagggacaatctcactctctggacttcggacatgacagacgaagcaggagatgagataaaggagacgtcgaagccagaaggtgctgcagagtaa

SEQ ID NO: 149046 - protein, 258 aa, Brassica napus
MSSSSREENVYMAKLAEQAERYEEMVEFMEKVAKSVDNEELTVEERNLLSVAYKNVIGARRASWRIISSIEQKEESKGNEDHVAIIKDYRGKIEAELSKICDGILNVLEAHLIPSASPAESKVFYLKMKGDYHRYLAEFKAGNERKDAAESTLVAYKSAQDIATAELAPTHPIRLGLALNFSVFYYEILNSPDRACSLAKLAFDEAIAELDTLGEESYKDSTLIMQLLRDNLTLWTSDMTDEAGDEIKETSKPEGAAE

SEQ ID NO: 149047 - DNA, 750 bp, Brassica napus
  CDS (1)..(750)
atggcggcgacactaggcagagagcagtacgtgtacatggcgaagctcgcggagcaggcggagcgttacgaggagatggtccagttcatggagcagctcgtcacatccgccgctccatcatcatcgaagctcaccgtggaggagcgcaacctcctctcggtggcctacaagaacgtgatcggatctctgcgcgcggcgtggaggatcgtgtcctccatcgagcagaaggaagagagcaggaagaacgaggagcacgcggggctcgtgaaggactacagatctaaggtggaggcggagctctcctcggtctgctccgggatcctcaggctactcgatgagcacctgatcccgtcggcggcggggagcgagtcgaaggtgttttacatgaagatgaagggagattaccataggtacatggcggagtttaagtctggtgaggagaggaaaggtgctgctgaagatactatggttgcttacaaggctgctcaggatattgcagcggctgatatggctcctactcatcccataaggcttgggcttgctctcaatttctctgtgttttattatgagatcctcaattcttccgacaaagcttgtaacatggccaaacaggcatttgaagaagcgatagctgagcttgacacactgggagaagaatcctacaaagacagcactctcattatgcagttgctcagggacaatcttaccctctggacctccgatatgcaggagcagatggacgaggcctga

SEQ ID NO: 149048 - protein, 249 aa, Brassica napus
MAATLGREQYVYMAKLAEQAERYEEMVQFMEQLVTSAAPSSSKLTVEERNLLSVAYKNVIGSLRAAWRIVSSIEQKEESRKNEEHAGLVKDYRSKVEAELSSVCSGILRLLDEHLIPSAAGSESKVFYMKMKGDYHRYMAEFKSGEERKGAAEDTMVAYKAAQDIAAADMAPTHPIRLGLALNFSVFYYEILNSSDKACNMAKQAFEEAIAELDTLGEESYKDSTLIMQLLRDNLTLWTSDMQEQMDEA

SEQ ID NO: 149049 - DNA, 753 bp, Brassica napus
  CDS (1)..(753)
atggcggcggcgacactaggcagagaccagtacgtctacatggcgaagctcgccgagcaagccgagcgttacgaggagatggtccaattcatggagcagctcgtcacaggcggcgccactccatcgtcagagctcaccgtggaggaaagaaacctcctctcggtagcctacaagaacgtgatcggatctctacgcgccgcgtggaggatcgtgtcgtcgatcgagcagaaggaagagagcaggaagaacgaggagcacgcgacgctcgtgaagggttacagatctaaggtggagacggagctttcctccgtctgcgaagggatactaaagcttcttgattcgcatctgattccctctgcggcggcgagcgagtcgaaggtgttttatttgaagatgaagggggattatcataggtacatggcggagtttaagtctggggatgagaggaaagtggctgctgaggatactatgggtgcttataaggcagctcaggatattgcggctgctgatatggcgcctactcatccaataaggcttggtcttgccttgaatttctcggtgttttactatgagattcttaattcttcagacaaagcttgtaacatggccaaacaggcttttgaagaagctatagctgagcttgacacattgggggaagaatcctacaaagacagcactctcattatgcagttgctcagggacaatcttaccctatggacctccgatatgcaggagcagatggacgaagcctga

SEQ ID NO: 149050 - protein, 250 aa, Brassica napus
MAAATLGRDQYVYMAKLAEQAERYEEMVQFMEQLVTGGATPSSELTVEERNLLSVAYKNVIGSLRAAWRIVSSIEQKEESRKNEEHATLVKGYRSKVETELSSVCEGILKLLDSHLIPSAAASESKVFYLKMKGDYHRYMAEFKSGDERKVAAEDTMGAYKAAQDIAAADMAPTHPIRLGLALNFSVFYYEILNSSDKACNMAKQAFEEAIAELDTLGEESYKDSTLIMQLLRDNLTLWTSDMQEQMDEA

SEQ ID NO: 149051 - DNA, 783 bp, Brassica napus
  CDS (1)..(783)
atggcggttccgtcgcgcgaggatcttgtatacatggctaagcttgcggagcaggcggagaggtacgaagagatggtccaatacatggagaaagtctccgccgcaacagatggtagcgagctcacaatcgaggagcgaaacctcctctccgtcgcctacaagaacctgatcggcgctcgccgcgcctcgtggagaatcatctcttcgatcgagcagaaagaggagagccgcggcaacgtcgagcgcgtcaaaacgatccgtgactacaaggctaagatcgaatcggagctctcggggatctgcgacggaatcctaaagctgctcgactctacgctcgtcccttccgctgcttctgaggaatccaaggtgttctacctcaagatgaaaggtgactactacaggtacttagccgagttcaaaatcggtaaagagagagacgccgccgcggataacaccctcgccgcttacgaatctgctcaggacaatgctaaggggcttgcttcaactcaccctatccgtcttggtttggctttgaacttctctgtgttctattacgagatccttgagtcccctgaccgtgcctgcaacctcgctaaaacggcttttgatgctgctattgctgagttagacactctaggggaagagtcatacaaggatagcactttgatcatgcagcttctccgtgacaacctcactctctggacatccgacatgcaggatgaatctgcagacgagatcaaggaagcagctgcagctccgaagccaacagaagagcagaagtga

SEQ ID NO: 149052 - protein, 260 aa, Brassica napus
MAVPSREDLVYMAKLAEQAERYEEMVQYMEKVSAATDGSELTIEERNLLSVAYKNLIGARRASWRIISSIEQKEESRGNVERVKTIRDYKAKIESELSGICDGILKLLDSTLVPSAASEESKVFYLKMKGDYYRYLAEFKIGKERDAAADNTLAAYESAQDNAKGLASTHPIRLGLALNFSVFYYEILESPDRACNLAKTAFDAAIAELDTLGEESYKDSTLIMQLLRDNLTLWTSDMQDESADEIKEAAAAPKPTEEQK

SEQ ID NO: 149053 - DNA, 753 bp, Brassica napus
  CDS (1)..(753)
atggcggcggcgacactaggcagagaccagtacgtgtacatggcgaagctcgccgagcaagccgagcgctacgaagaaatggtcaacttcatggaaagcctcgtcacaggcggcgccacttcatcctcagaactcaccgttgaagaacgaaacctcctctcggtagcctacaagaacgtgatcggatctctacgcgccgcgtggaggatcgtgtcgtcgatcgagcagaaggaagagagcaggaagaacgaggagcacgcgacgctcgtgaagggttacagatctaaggtcgagacggagctttcctccgtctgcgaagggattctaaagcttcttgattcgcatctgattccctcggcggcggcgagcgagtcgaaggtgttttatttgaagatgaagggggattatcataggtacatggcggagtttaagtctggagaggagaggaaagctgctgctgaggatactatgggtgcttataaggctgctcaggatatcgcggctgctgatatggcgcctactcatccaataaggcttggtcttgcgttgaatttctcggtgttttactatgagatccttaattcttcagacaaagcttgtaacatggccaaacaggcttttgaagaagcaatagctgagcttgacacattgggagaagaatcctacaaagacagcactctcattatgcagttgctcagggacaatcttaccctatggacctccgatatgcaggagcagatggacgaagcctga

SEQ ID NO: 149054 - protein, 250 aa, Brassica napus
MAAATLGRDQYVYMAKLAEQAERYEEMVNFMESLVTGGATSSSELTVEERNLLSVAYKNVIGSLRAAWRIVSSIEQKEESRKNEEHATLVKGYRSKVETELSSVCEGILKLLDSHLIPSAAASESKVFYLKMKGDYHRYMAEFKSGEERKAAAEDTMGAYKAAQDIAAADMAPTHPIRLGLALNFSVFYYEILNSSDKACNMAKQAFEEAIAELDTLGEESYKDSTLIMQLLRDNLTLWTSDMQEQMDEA

SEQ ID NO: 149055 - DNA, 774 bp, Brassica napus
  CDS (1)..(774)
atgtcatcatcacgtgaagagaatgtgtacatggcgaaactagccgagcaagccgagcgttacgaagaaatggtcgagttcatggagaaagttgctaaatctgttgacaacgaagagctcactgttgaagagaggaaccttctctccgttgcttacaagaacgtgattggagccaggagggcttcgtggaggatcatctcttccattgagcagaaggaagagagcaaagggaacgaggatcacgttgctatcatcaaggactacagggccaagatcgaagctgagcttagcaaaatctgcgatggaatcttgaatgttcttgaagctcatctcattccatctgcttcgcctgctgagtctaaagtgttttaccttaagatgaagggagattatcacaggtatcttgctgagtttaaggctggcaacgagaggaaagatgctgctgaaagcactttggttgcttacaagtctgctcaggacattgccactgctgagttggctcccactcacccgatcaggcttggtcttgcactcaacttctctgtgttttactatgagatccttaactcgcctgaccgtgcctgcagcctcgccaagcaggcttttgatgaagcaatcgctgagttagacacgttgggtgaggaatcatacaaggacagtacactgatcatgcagcttctcagagacaatctcactctctggacttcggacatgacagacgaagcaggagatgagataaaggagacgtcgaagccagaaggtgctgcagagtaa

SEQ ID NO: 149056 - protein, 257 aa, Brassica napus
MSSSREENVYMAKLAEQAERYEEMVEFMEKVAKSVDNEELTVEERNLLSVAYKNVIGARRASWRIISSIEQKEESKGNEDHVAIIKDYRAKIEAELSKICDGILNVLEAHLIPSASPAESKVFYLKMKGDYHRYLAEFKAGNERKDAAESTLVAYKSAQDIATAELAPTHPIRLGLALNFSVFYYEILNSPDRACSLAKQAFDEAIAELDTLGEESYKDSTLIMQLLRDNLTLWTSDMTDEAGDEIKETSKPEGAAE

SEQ ID NO: 149057 - DNA, 804 bp, Brassica napus
  CDS (1)..(804)
atgtcgtcaggatccgacaaagacagagagacattcgtctacttggctaagctctccgaacaggccgagcgatacgacgagatggtggagacaatgaagaaagtggcgaaggtggacagcgagctgacagttgaggagaggaatctgttgtcggttggttacaagaacgtgatcggagcaagacgtgcctcgtggaggataatgtcgtctatcgagcagaaggaagagtccaaaggcaacgaatcaaacgtgaaacacatcaagggttatcgccaaaaggtagaagacgagcttgctgacatctgtaaagatattctcactatcattgatcagcatctcatccctcacgctacatcgggagaagctaccgttttctattacaagatgaaaggtgattattaccgttacttggctgagtttaagactgaacaagagaggaaggaagcttctgaacagtcgctcaaaggctatgaggctgcaacacaagctgcaagcactgaccttccttcgacccatccgattcgtcttggacttgctcttaacttctctgttttctactatgagatcatgaactctcctgaaagagcttgccatttggcgaagcaagcctttgacgaggccattgcggagttggatactctaagtgaggagtcatacaaggacagcactttgatcatgcagctcctgagagacaaccttaccctctggacttctgatcttcctgaagatggaggagaagacaacattaagaccgatgaagccaagcaagaaccggctaagcctgcagaagccactgagaactga

SEQ ID NO: 149058 - protein, 267 aa, Brassica napus
MSSGSDKDRETFVYLAKLSEQAERYDEMVETMKKVAKVDSELTVEERNLLSVGYKNVIGARRASWRIMSSIEQKEESKGNESNVKHIKGYRQKVEDELADICKDILTIIDQHLIPHATSGEATVFYYKMKGDYYRYLAEFKTEQERKEASEQSLKGYEAATQAASTDLPSTHPIRLGLALNFSVFYYEIMNSPERACHLAKQAFDEAIAELDTLSEESYKDSTLIMQLLRDNLTLWTSDLPEDGGEDNIKTDEAKQEPAKPAEATEN

SEQ ID NO: 149059 - DNA, 762 bp, Brassica napus
  CDS (1)..(762)
atggagagtgagagggaaaagcaggtttactcggcgaagctctctgagcaaaccgaacgttacgatgaaatggttgaggcgatgaagaaagttgctcagatggatgtggagctcaccgtggaggagaggaaccttgtatctgttggttacaagaacgtcatcggcgcgaggagagcgtcgtggaggatactatcctccatcgagcagaaggaagagtccaaggggaacgaggagaatgtcaagaggattcagacttaccgaaagagggttgaagaggagcttgccaaagtttgcaatgacatcttgtccgtcattgataagcatctcattccttcctctaccgccgtggagtccactgtctttttctacaaaatgaaaggagattactatcgctatctggcagagttcagctctggtgctgagcgcaaggaagctgcagatcagtctcttgaagcctacaaggctgctgttgctgctgcagagactggattggcaccaacacatccagttagacttggcttggctttgaacttttcggttttctattatgagatcttaaactctcctgaaagcgcatgccaattggctaagcaagcattcgacgatgcaatcgctgaacttgacagcctcaacgaggagtcatacaaggacagcactcttatcatgcagctactcagagacaacctcaccttgtggacttctgacctccccgaggaaggagaagagaaatccaaaggtgatgagcctaaagaagagaactga

SEQ ID NO: 149060 - protein, 253 aa, Brassica napus
MESEREKQVYSAKLSEQTERYDEMVEAMKKVAQMDVELTVEERNLVSVGYKNVIGARRASWRILSSIEQKEESKGNEENVKRIQTYRKRVEEELAKVCNDILSVIDKHLIPSSTAVESTVFFYKMKGDYYRYLAEFSSGAERKEAADQSLEAYKAAVAAAETGLAPTHPVRLGLALNFSVFYYEILNSPESACQLAKQAFDDAIAELDSLNEESYKDSTLIMQLLRDNLTLWTSDLPEEGEEKSKGDEPKEEN

SEQ ID NO: 149061 - DNA, 783 bp, Brassica napus
  CDS (1)..(783)
atggcggtttcggcgcgtgaggagtacgtgtacatggccaagctcgcggagcaagccgagcgctacgaggagatggtggagttcatggagaaagtctccgcagccatcgacggcgacgagctcaccgtcgaggagcgaaacctcctctccgtcgcgtacaaaaacgtgatcggcgcgcgccgcgcatcgtggcgaatcatctcctcgatcgagcagaaggaggagagccgcggcaacgacgaccacgtcaaggcgatccgagactacagggcgaagatcgagacggagctctccgggatctgcgacgggatcctcaagctgcttgacgataggctcgtccccgcggctggttcgggtgattcgaaggtgttttatctgaagatgaaaggggattaccataggtacttggcggagtttaagactggtcaggagaggaaggatgctgctgagaatactctctctgcttacaaggctgctcaggatattgcaaatgcagagctagctccaactcacccgatccgtcttggtctggcattgaacttctctgtgttctactacgagatccttaactctcctgatcgtgcctgcagcctcgccaaacaggcttttgatgaagcgatagcagagttggacactctaggtgaagagtcgtacaaagacagcaccttgatcatgcagcttctccgtgacaacctcactctctggacatccgacatgcaggatgatgatgctggggaggagatcaaagaatcatcagctccaaagccgactgaggaacagtag

SEQ ID NO: 149062 - protein, 260 aa, Brassica napus
MAVSAREEYVYMAKLAEQAERYEEMVEFMEKVSAAIDGDELTVEERNLLSVAYKNVIGARRASWRIISSIEQKEESRGNDDHVKAIRDYRAKIETELSGICDGILKLLDDRLVPAAGSGDSKVFYLKMKGDYHRYLAEFKTGQERKDAAENTLSAYKAAQDIANAELAPTHPIRLGLALNFSVFYYEILNSPDRACSLAKQAFDEAIAELDTLGEESYKDSTLIMQLLRDNLTLWTSDMQDDDAGEEIKESSAPKPTEEQ

SEQ ID NO: 149063 - DNA, 747 bp, Brassica napus
  CDS (1)..(747)
atggcggcgacgttgagcagagaccaatacgtgtacatggcgaagctggccgagcaagcggagcgatacgaggagatggtccagttcatggagagcctggtaagctccgccacgccggcgggggagctgacggtggaggagaggaacctcctctcggtggcgtacaagaacgtgatcggatctctcagagcggcgtggaggatcgtgtcatcgatcgagcagaaggaagagagcaggaagaacgaggagcacgtgtcgctcgtgaaggattacagatccaaggtggagggggagctctcgacgatctgctcggggatcctcaagctgctcgatacgcatctgatcccttcggctacggctagcgagtcgaaggtgttttacctgaagatgaagggggattaccatcgctacatggccgagttcaaatctggagatgagaggaagactgctgccgaagataccatgatcgcctacaaggctgctcaggatgttgcggttactgatctagcgcctacgcatccgatcaggctgggtctggctctcaatttctcggtgttttactacgagattctcaactcttctgagaaagcttgtagcatggccaaacaggctttcgaggaagccattgctgagctggacacgttgggagaggagtcgtacaaggacagtactctcatcatgcagttgctaagggacaacctaaccctctggacctccgacatgcaggagcagatggatgaggcctga

SEQ ID NO: 149064 - protein, 248 aa, Brassica napus
MAATLSRDQYVYMAKLAEQAERYEEMVQFMESLVSSATPAGELTVEERNLLSVAYKNVIGSLRAAWRIVSSIEQKEESRKNEEHVSLVKDYRSKVEGELSTICSGILKLLDTHLIPSATASESKVFYLKMKGDYHRYMAEFKSGDERKTAAEDTMIAYKAAQDVAVTDLAPTHPIRLGLALNFSVFYYEILNSSEKACSMAKQAFEEAIAELDTLGEESYKDSTLIMQLLRDNLTLWTSDMQEQMDEA

SEQ ID NO: 149065 - DNA, 747 bp, Brassica napus
  CDS (1)..(747)
atggcggcgacgatgagcagagaccaatacgtctacatggcgaaactcgccgagcaagcggagcgttacgaagagatggtccagttcatggaaagcctcgtgacttcctccacaccgtccagcgagctcaccgtagaggagaggaaccttctctccgtggcttacaagaacgtgatcggatctcttcgagcggcgtggaggatcgtgtcgtcgatcgagcagaaggaagagagcaggaagaacgaggaacacgtgtcgctcgtcaaggactacagatctaaggtcgagacggagctctccacgatctgcacggggatcctcaggctgctcgatacgaatctgatcccttcggctaacgctagcgagtccaaggtgttttacttgaagatgaagggtgattaccatcggtacatggctgagttcaaatctggtgacgagaggaagacagctgctgaagatactatgatcgcttacaaggctgctcaggacgttgcggttgctgatctagcgcctacgcatccgatcaggctgggactggctcttaacttctcggtgttttactacgagatcctcaactcttcggagaaagcttgtagcatggccaaacaggcttttgaggaagctattgcggagctggacacgttgggagaggagtcatacaaagacagtactctcatcatgcagttgctaagggacaatttaaccctctggacttccgatatgcaggagcagatggatgaggcctga

SEQ ID NO: 149066 - protein, 248 aa, Brassica napus
MAATMSRDQYVYMAKLAEQAERYEEMVQFMESLVTSSTPSSELTVEERNLLSVAYKNVIGSLRAAWRIVSSIEQKEESRKNEEHVSLVKDYRSKVETELSTICTGILRLLDTNLIPSANASESKVFYLKMKGDYHRYMAEFKSGDERKTAAEDTMIAYKAAQDVAVADLAPTHPIRLGLALNFSVFYYEILNSSEKACSMAKQAFEEAIAELDTLGEESYKDSTLIMQLLRDNLTLWTSDMQEQMDEA

SEQ ID NO: 149067 - DNA, 741 bp, Brassica napus
  CDS (1)..(741)
atggcggcgacgatgagcagagaccaatacgtctacatggcgaaactcgccgagcaagcggagcgttacgaagagatggtccagttcatggaaagcctcgtgacttcctccacaccgtccagcgagctcaccgtagaggagaggaaccttctctccgtggcttacaagaacgtgatcggatctcttcgagcggcgtggaggatcgtgtcgtcgatcgagcagaaggaagagagcaggaagaacgaggaacacgtgtcgctcgtcaaggactacagatctaaggtcgagacggagctctccacgatctgcacggggatcctcaggctgctcgatacgaatctgatcccttcggctaacgctagcgagtccaaggtgttttacttgaagatgaagggtgattaccatcggtacatggctgagttcaaatctggtgacgagaggaagacagctgctgaagatactatgatcgcttacaaggctgctcaggacgttgcggttgctgatctagcgcctacgcatccgatcaggctgggactggctcttaacttctcggtgttttactacgagatcctcaactcttcggagaaagcttgtagcatggccaaacaggcttttgaggaagctattgcggagctggacacgttgggagaggagtcatacaaagacagtactctcatcatgcagttgctaagggacaatttaaccctctggacttccgatatgcagatggatgaggcctga

SEQ ID NO: 149068 - protein, 246 aa, Brassica napus
MAATMSRDQYVYMAKLAEQAERYEEMVQFMESLVTSSTPSSELTVEERNLLSVAYKNVIGSLRAAWRIVSSIEQKEESRKNEEHVSLVKDYRSKVETELSTICTGILRLLDTNLIPSANASESKVFYLKMKGDYHRYMAEFKSGDERKTAAEDTMIAYKAAQDVAVADLAPTHPIRLGLALNFSVFYYEILNSSEKACSMAKQAFEEAIAELDTLGEESYKDSTLIMQLLRDNLTLWTSDMQMDEA

SEQ ID NO: 149069 - DNA, 798 bp, Brassica napus
  CDS (1)..(798)
atggcggcagcatcatcctcggcgagggaagagttcgtatacctagcgaagctcgcggagcaagcggagcgatatgaagagatggttgaattcatggaaaaagtcgtcgaaggcgtggagaaagacgaactcagtgtggaggaacgaaacctcctctccgtggcttacaaaaacgtaatcggcgctcgtcgagcctcgtggcgcatcatctcctccatcgaacagaaggaagagagccgggggaacgatgaccacgtcaccacgatccgtgactacagaagcaagatcgagtctgagctctccaaaatctgcgacggcatccttaagctgctcgatacaagactcattccggcttctgcaaacggagattccaaggttttctaccttaagatgaagggagattaccataggtacttggctgagtttaagaccgctcaggagaggaaagacgccgccgagcataccctcaccgcttacaaagccgctcaggacattgctaactctgaattgcctccaacacaccccatccgtctgggtctggctttgaacttctctgtcttttactacgagattctcaactctccagaccgtgcttgcagtctcgctaagcaggcatttgatgaagcaatcgctgagttggatactctaggcgaggagtcatacaaggacagtactttgatcatgcagcttctccgtgacaaccttactctatggacttctgacatgcaggacgaaggtacagaggagatcaaagaagcggcagcaacaaagcctgctgaagaagagaaggagacttga

SEQ ID NO: 149070 - protein, 265 aa, Brassica napus
MAAASSSAREEFVYLAKLAEQAERYEEMVEFMEKVVEGVEKDELSVEERNLLSVAYKNVIGARRASWRIISSIEQKEESRGNDDHVTTIRDYRSKIESELSKICDGILKLLDTRLIPASANGDSKVFYLKMKGDYHRYLAEFKTAQERKDAAEHTLTAYKAAQDIANSELPPTHPIRLGLALNFSVFYYEILNSPDRACSLAKQAFDEAIAELDTLGEESYKDSTLIMQLLRDNLTLWTSDMQDEGTEEIKEAAATKPAEEEKET

SEQ ID NO: 149071 - DNA, 786 bp, Brassica napus
  CDS (1)..(786)
atgtcgtctactcgggaagagaatgtgtacttggctaagttagccgaacaagccgaacgttacgaggagatggttgagttcatggagaaagtcgccaagactgttgactccgaggagcttactgtggaagagaggaacctcttgtccgttgcttacaagaacgtgattggtgcaaggagagcttcgtggaggatcatttcttccattgaacagaaggaagaaagcagagggaacgatgatcacgttgctcttatcaaggactacagagtgaagattgaaaccgagctcgggaagatctgtgatgggattttgaaccttttggattctcaccttgttcccgctgcctctttggctgagtccaaagtgttttacctgaagatgaagggagattatcataggtaccttgctgagttcaagactggtgctgagaggaaggatgctgctgagagcactctcttggcttacaagtcagctcaggatattgcacttgctgatttacctccaactcatccgattagattgggacttgctcttaacttctctgtcttctactatgagattctcaactctcctgatcgcgcttgcagtctcgccaagcaggcatttgatgaagctatctctgagctggacacattaggagaagaatcatacaaagacagcacgctgataatgcaacttctccgtgacaatctgactctctggacttctgacctcaatgatgaggtgggtggtgacgagatcaaggaggcgtcaaaagacgagcctgaagaagggaaacaagcgtag

SEQ ID NO: 149072 - protein, 261 aa, Brassica napus
MSSTREENVYLAKLAEQAERYEEMVEFMEKVAKTVDSEELTVEERNLLSVAYKNVIGARRASWRIISSIEQKEESRGNDDHVALIKDYRVKIETELGKICDGILNLLDSHLVPAASLAESKVFYLKMKGDYHRYLAEFKTGAERKDAAESTLLAYKSAQDIALADLPPTHPIRLGLALNFSVFYYEILNSPDRACSLAKQAFDEAISELDTLGEESYKDSTLIMQLLRDNLTLWTSDLNDEVGGDEIKEASKDEPEEGKQA

SEQ ID NO: 149073 - DNA, 786 bp, Brassica napus
  CDS (1)..(786)
atggcctctgccagagaagagttcgtttaccttgcgaagcttgcggagcaagcagagcgatatgaagaaatggttgaattcatggagaaagtcacagaagccgtcgacaaagacgaactcaccgtggaggaacgcaacctcctctccgttgcttacaaaaacgtaatcggcgctcgtcgtgcctcgtggcgcatcatctcctccatcgagcagaaggaagagagccgcggcaacgatgaccacgtcaacacgatccgtgactacagaagcaagatcgaaacggagctctccaaaatctgcgacggtatccttaagcttctggatacgagacttatcccggcttctgcaaacggagattccaaggttttctaccttaagatgaagggagattaccataggtacttggctgagtttaagaccgctcaggagaggaaagacgccgccgagcacaccctcaccgcttacaaagccgctcaggacatcgctaactccgaattggctccaacccacccgatccgtcttggtctggccttgaacttctctgtcttttactatgagattctcaactctccagaccgtgcttgcagtctcgctaagcaggcgtttgatgaagcaattgctgagttggatactctaggcgaggagtcatacaaggacagtaccttgatcatgcagcttctccgtgacaaccttactctctggacttccgacatgcaggacgaaagtactgaggagatcaaagaagatgcagcacccaagcctgctgaagaacagaaggagacctaa

SEQ ID NO: 149074 - protein, 261 aa, Brassica napus
MASAREEFVYLAKLAEQAERYEEMVEFMEKVTEAVDKDELTVEERNLLSVAYKNVIGARRASWRIISSIEQKEESRGNDDHVNTIRDYRSKIETELSKICDGILKLLDTRLIPASANGDSKVFYLKMKGDYHRYLAEFKTAQERKDAAEHTLTAYKAAQDIANSELAPTHPIRLGLALNFSVFYYEILNSPDRACSLAKQAFDEAIAELDTLGEESYKDSTLIMQLLRDNLTLWTSDMQDESTEEIKEDAAPKPAEEQKET

SEQ ID NO: 149075 - DNA, 786 bp, Triticum aestivum
  CDS (1)..(786)
atgtctaccgctgaggcaacccgtgaggagaatgtgtacatggccaagcttgccgagcaggctgagcgttacgaagaaatggttgagttcatggagaaggtggcaaagaccgctgatgttggtgagctcactgttgaggagcgcaacctgctctctgttgcttacaagaatgtgattggtgcccggagggcttcctggaggatcatctcctccattgagcagaaggaggagagccgtgggaacgaggcctatgttgcttcaatcaaggagtaccgtaccaggattgaaactgagctcagcaagatctgtgatggcatcctcaagcttctggactcccaccttgtcccctctgccactgcagcagagtccaaggtgttctatctgaaaatgaagggtgactaccacaggtaccttgcggagttcaaggcaggcgctgagaggaaagaagcagctgagaacactcttgtagcatacaagtcagcccaggacatcgcgcttgctgacttgcctaccacccacccgataaggcttggacttgcactcaacttctcagtgttctactatgagatcctgaactctccagaccgtgcttgcaaccttgccaagcaggcatttgatgaagctattgctgagctggactccctcggcgaggaatcctacaaggacagcaccttgatcatgcaacttcttcgtgacaacttgactctctggacctccgataacgcagaggagggtggtgatgagatcaaggaagccgcctcaaagcctgagggagaggggcactga

SEQ ID NO: 149076 - protein, 261 aa, Triticum aestivum
MSTAEATREENVYMAKLAEQAERYEEMVEFMEKVAKTADVGELTVEERNLLSVAYKNVIGARRASWRIISSIEQKEESRGNEAYVASIKEYRTRIETELSKICDGILKLLDSHLVPSATAAESKVFYLKMKGDYHRYLAEFKAGAERKEAAENTLVAYKSAQDIALADLPTTHPIRLGLALNFSVFYYEILNSPDRACNLAKQAFDEAIAELDSLGEESYKDSTLIMQLLRDNLTLWTSDNAEEGGDEIKEAASKPEGEGH

SEQ ID NO: 149077 - DNA, 786 bp, Triticum aestivum
  CDS (1)..(786)
atggcaaaggcagcggcagcgggaacgagggaggagatggtctacatggcgaagctggcggagcaggccgagcggtacgaggagatggtcgagttcatggagaaggtcgtggcggcggcggggaccggcgagctcaccgtcgaggagaggaacctgctctcagtcgcgtacaagaacgtcatcggggcgcgtcgtgcttcctggcgcatcgtgtcctccatcgagcagaaggaggaagggcgcggagcggcggggcacgccgccgcggcgcgcgggtaccgcgcacttgtcgaggccgagctctccaacatctgcgcggggatcctccgtctcctcgacgaacgcctagtccccgccgccgccgccatcgacgccaaggtattctacctgaagatgaagggagactaccatcgctacctcgcggagttcaagtcggccgccgagcgcaaggatgccgctgactccaccctcggtgcctaccaggccgctcaggacatagccatgaaggagctgccaccgactcaccccatcaggctgggcctcgcgctcaacttctccgtgttctactatgagatcctcaactcgcctgatcgtgcgtgctcgctcgcgaaacaggccttcgatgaagccatcgctgagctggattccctcggagaagattcctacaaggacagcaccctgatcatgcaacttctccgtgacaatctcaccttgtggacctctgatatgcaggatgacgctggcgatgaaatgagggattcaagcaagcctgaggatgagcagtag

SEQ ID NO: 149078 - protein, 261 aa, Triticum aestivum
MAKAAAAGTREEMVYMAKLAEQAERYEEMVEFMEKVVAAAGTGELTVEERNLLSVAYKNVIGARRASWRIVSSIEQKEEGRGAAGHAAAARGYRALVEAELSNICAGILRLLDERLVPAAAAIDAKVFYLKMKGDYHRYLAEFKSAAERKDAADSTLGAYQAAQDIAMKELPPTHPIRLGLALNFSVFYYEILNSPDRACSLAKQAFDEAIAELDSLGEDSYKDSTLIMQLLRDNLTLWTSDMQDDAGDEMRDSSKPEDEQ

SEQ ID NO: 149079 - DNA, 801 bp, Triticum aestivum
  CDS (1)..(801)
atgtcgccggcggagcagacgcgagacgagagcgtctacatggccaagcttgcggagcaggccgagcgctacgaggagatggtggagttcatggagcgcgtcgcgaaggccaccggcggggcagggcccggggaggagctatccgtcgaggagcgcaacctgctctctgtggcttacaagaatgtcatcggggcccggcgcgcgtcctggaggatcatctcctccatcgagcagaaggaggaaggtcggggcaacgacgcgcacgccgctaccatccgctcctaccgcagcaagatcgaggccgagctcgcaaagatctgtgacggcatcctcgccctgcttgattcccacctcgtgccatccgccggagctgccgagtccaaagtcttctatctcaagatgaagggcgactaccacaggtaccttgcagagtttaagtctggtggggagaggaaggaagccgccgagagcaccatgaacgcgtacaaagctgctcaggatatcgccctagtagatttggctccaacacaccccatcaggcttgggcttgcactcaacttttctgtgttctactatgagatcttgaactcccctgaccgtgcctgcaaccttgcaaaacaagcctttgacgaggctatatcagagctggacagtttaggcgaggaatcctacaaggacagcactttaatcatgcagctcctgcgtgacaatttgactctatggacatccgacaccaatgaggatgacgttgatgagattaaggaagccccagctccaaaagaatctggagacggacagtga

SEQ ID NO: 149080 - protein, 266 aa, Triticum aestivum
MSPAEQTRDESVYMAKLAEQAERYEEMVEFMERVAKATGGAGPGEELSVEERNLLSVAYKNVIGARRASWRIISSIEQKEEGRGNDAHAATIRSYRSKIEAELAKICDGILALLDSHLVPSAGAAESKVFYLKMKGDYHRYLAEFKSGGERKEAAESTMNAYKAAQDIALVDLAPTHPIRLGLALNFSVFYYEILNSPDRACNLAKQAFDEAISELDSLGEESYKDSTLIMQLLRDNLTLWTSDTNEDDVDEIKEAPAPKESGDGQ

SEQ ID NO: 149081 - DNA, 822 bp, Triticum aestivum
  CDS (1)..(822)
atggccactgagcgtgaaagcaagaccttcctcgcccgcctttgcgagcaggctgagcgctacgatgagatggtcacctacatgaaggaggtggccaagctgggtggagagctcaccgttgacgagcgtaaccttctcagcgttgcctacaagaacgttgtcggtacccgacgtgcctcgtggcgcattatctcctcgatcgagcagaaggaggagtctaagggatccgacaagcacgtttcaaccatcaaggactaccgcaacaagatcgagaccgagctcgagaaggtctgccaggatgtcctcgacgttttggacgacttccttatccccaacgctgccactggcgagtccaaggtcttctaccacaagatgaagggtgactaccaccgttacctcgctgagttcgcctctggtgagaagcgcaagggtgctgccaccgctgcccacgatgcttacaagagcgctaccgatgttgctcagactgagctcactcctactcaccccatccgtctgggtcttgccctcaacttctccgtcttctactacgagatcttgaactcccccgaccgtgcttgccacctcgcgaagcaggccttcgacgatgctattgccgagctcgactccctgtctgaggagtcttaccgtgacagcaccctcatcatgcagcttctccgcgacaaccttaccctctggacctcttccgacagcgccgagggtgaggctgccggtgctgctgatgctcccaagaaggaggagggcgaggctgccaagcccgccgaggaggctgctgaggagcccgcgcctgctcctgcctcctaa

SEQ ID NO: 149082 - protein, 273 aa, Triticum aestivum
MATERESKTFLARLCEQAERYDEMVTYMKEVAKLGGELTVDERNLLSVAYKNVVGTRRASWRIISSIEQKEESKGSDKHVSTIKDYRNKIETELEKVCQDVLDVLDDFLIPNAATGESKVFYHKMKGDYHRYLAEFASGEKRKGAATAAHDAYKSATDVAQTELTPTHPIRLGLALNFSVFYYEILNSPDRACHLAKQAFDDAIAELDSLSEESYRDSTLIMQLLRDNLTLWTSSDSAEGEAAGAADAPKKEEGEAAKPAEEAAEEPAPAPAS

SEQ ID NO: 149083 - DNA, 786 bp, Glycine max
  CDS (1)..(786)
atggctgcctccaaggatcgcgagaacttcgtctacatcgccaagctcgccgaacaggccgagcgatacgaagagatggtggaatcaatgaagaacgttgcgaatctcgacgttgaactgactgtggaggagcggaatttactttctgttgggtacaagaatgtgattggtgctcggagagcatcgtggaggatcctgtcttccattgagcaaaaggaagaaacaaaagggaacgagttgaatgcgaagcggattaaggagtacaggcagaaggttgaattggagctttcaaacatctgtaatgatgttatgacagtgattgatgagcaccttatcccttcggctgcagctggtgaatccactgtgttttactataagatgaaaggagattattatcgttatcttgccgaatttaaggcaggcaatgagaagaaggaagctgctgatcagtctatgaaagcatatgagtctgctaccactgcagcagaggctgatttacctccaacacatcccatccgattgggtctagctttaaatttctcagttttctattacgagatcttgaactctccagaaagagcctgtcatcttgcaaaacaagcttttgatgaagctatttctgagcttgacaccttgaatgaggagtcatacaaagacagcaccttaatcatgcaacttctcagggacaacctaactttgtggacttctgacatcccagaagatggagaagatgcccagaaagtgaatggcactgccaagcttggtggaggtgaggaggcagagtga

SEQ ID NO: 149084 - protein, 261 aa, Glycine max
MAASKDRENFVYIAKLAEQAERYEEMVESMKNVANLDVELTVEERNLLSVGYKNVIGARRASWRILSSIEQKEETKGNELNAKRIKEYRQKVELELSNICNDVMTVIDEHLIPSAAAGESTVFYYKMKGDYYRYLAEFKAGNEKKEAADQSMKAYESATTAAEADLPPTHPIRLGLALNFSVFYYEILNSPERACHLAKQAFDEAISELDTLNEESYKDSTLIMQLLRDNLTLWTSDIPEDGEDAQKVNGTAKLGGGEEAE

SEQ ID NO: 149085 - DNA, 774 bp, Glycine max
  CDS (1)..(774)
atggcggattcttctcgggaggagaacgtttacatggcgaaattggcggagcaggccgagcgttacgaggagatggttgagttcatggagaaggttgcaaagactgtggaggttgaggagttgacggtggaggagaggaatctcctctctgtggcttacaagaacgtgattggtgcgaggagggcttcgtggaggatcatatcctccattgagcagaaggaggagagcaggggcaatgaggaccacgtggccattataaaggagtacaggggcaaaattgaggctgaactcagcaagatctgtgatgggattttgaacctccttgagtccaacctcattccttccgctgcatctcccgagagcaaagtcttttaccttaaaatgaagggtgattaccacaggtaccttgctgagttcaagaccggggcagagaggaaagaggctgcagagagtactttgcttgcttacaaatccgctcaggatattgctcttgctgacttggcccccactcaccccattaggttgggacttgctctcaacttttctgtgttctattatgaaatccttaactcgccagatcgtgcttgtaatcttgccaagcaggcatttgatgaggcaatttccgagcttgacacattgggtgaagagtcatacaaagatagtacattgatcatgcaacttctccgtgacaatctgactttgcggacatcagacatcacggacgatgctggagatgagatcaaggaaacatctaagcaacaaccaggcgaatag

SEQ ID NO: 149086 - protein, 257 aa, Glycine max
MADSSREENVYMAKLAEQAERYEEMVEFMEKVAKTVEVEELTVEERNLLSVAYKNVIGARRASWRIISSIEQKEESRGNEDHVAIIKEYRGKIEAELSKICDGILNLLESNLIPSAASPESKVFYLKMKGDYHRYLAEFKTGAERKEAAESTLLAYKSAQDIALADLAPTHPIRLGLALNFSVFYYEILNSPDRACNLAKQAFDEAISELDTLGEESYKDSTLIMQLLRDNLTLRTSDITDDAGDEIKETSKQQPGE

SEQ ID NO: 149087 - DNA, 756 bp, Linum usitatissimum
  CDS (1)..(756)
atggctgcactacccgacaacttcaccagagaccagtacgtctacctcgccaagctcgccgagcaagccgagcgctatgaggaaatggtccagttcatgcaaaagcttgttctcgcctccactcccgccgcagaactcaccgttgaggagcgtaacctcctttccgtcgcctacaagaacgttatcggctccctccgcgccgcctggaggatcgtctcctcgatcgagcaaaaagaggaagggaggaagaacgaggagcacgtggtgctcgtcaaggattacagatctaaagtggagaacgagctctctgagatctgcgctagtattctccgtctactcgactcgaatctggttccgtctgccacctctagtgagtccaaggtgttttacttgaagatgaagggagactaccacaggtatttggccgaattcaaggttggcgatgagaggaagaccgctgctgaggatactatgctggcttataaggttgctcaggaaactgctgctgcggatcttgccccgacgcatcctattaggttgggtctggctctcaatttctcggtgttttacttcgagatcctcaaccagtctgacaaagcttgcagtatggctaaacaggcctttgaggaagcgatcgctgagatagatacattgggtgaagaatcatacaaagatagtaccctgatcatgcaactcctacgggacaacctcactctttggacatcagatgtccaggaacaattggatgagccctag

SEQ ID NO: 149088 - protein, 251 aa, Linum usitatissimum
MAALPDNFTRDQYVYLAKLAEQAERYEEMVQFMQKLVLASTPAAELTVEERNLLSVAYKNVIGSLRAAWRIVSSIEQKEEGRKNEEHVVLVKDYRSKVENELSEICASILRLLDSNLVPSATSSESKVFYLKMKGDYHRYLAEFKVGDERKTAAEDTMLAYKVAQETAAADLAPTHPIRLGLALNFSVFYFEILNQSDKACSMAKQAFEEAIAEIDTLGEESYKDSTLIMQLLRDNLTLWTSDVQEQLDEP

SEQ ID NO: 149089 - DNA, 777 bp, Linum usitatissimum
  CDS (1)..(777)
atggctgaaagagacaagttcatctacactgccaagctcgccgagcaggctgagcgctatgacgagatggtggaagcgatgaagaatgttgccaagtgtggcgtggagttgactgtggaagagaggaacctgctgtcagtcggctacaagaatgtgatcggggcgaagcgagcttcgtggaggattctgtcctcgattgagcagaaggaagagagtaggggaaatgaagtgaatgctaagcggatcaaagaatacaggcacaaggtcgaaactgagctgactgatatttgcaacgatgtaatggttgtgatcgatgagcatctcattcctgctgctcctactggagagtcggccatcttctactataagatgaagggagattattaccggtatcttgctgagtttaagagtggtaacgagaagaaggaagctggcgataattcaatgaaagcatatgagaaagctactagtttggcagaggctgatttggctcctacgcacccaattagattgggcttggcactgaatttctcagtcttctattatgagatactgaattcacctgaaagggcctgccaccttgcgaaacaggctttcgatgaagctatctcggaactcgactctttgaacgaggattcatacaaggacagcactttgattatgcagcttctcagggacaacttaaccttgtggacttctgacatacccgaggatggagaagatgcccagaagatcaatggcactgccaaaggcatgggggccgaagatgaagagtga

SEQ ID NO: 149090 - protein, 258 aa, Linum usitatissimum
MAERDKFIYTAKLAEQAERYDEMVEAMKNVAKCGVELTVEERNLLSVGYKNVIGAKRASWRILSSIEQKEESRGNEVNAKRIKEYRHKVETELTDICNDVMVVIDEHLIPAAPTGESAIFYYKMKGDYYRYLAEFKSGNEKKEAGDNSMKAYEKATSLAEADLAPTHPIRLGLALNFSVFYYEILNSPERACHLAKQAFDEAISELDSLNEDSYKDSTLIMQLLRDNLTLWTSDIPEDGEDAQKINGTAKGMGAEDEE

SEQ ID NO: 149091 - DNA, 792 bp, Linum usitatissimum
  CDS (1)..(792)
atgtcgccgtctgaagcttcccgcgaggacaatgtctacatggcaaagttggccgagcaggctgaacgttacgaggaaatggttgagtttatggagaaagttgccaagacagttgacgttgaggagctaaccgtggaggaaaggaacctactttctgtggcttacaagaacgtgattggggccagaagagcttcatggagaattatctcttccatcgagcagaaagaagaaagcaggggaaatgaggaccatgtttctattatcaaggagtacaggtccaagattgaaactgagttgagcaagatttgtgatggcatcctgaaccttcttgagtctcatctcattcctgctacctccgccgctgagtctaaggtcttttaccttaaaatgaagggtgactaccataggtatcttgcagagtttaaaactggagctgagaggaaggaagctgctgagagcaccttgttggcttacaagtccgctcaggatattgcccttgctgatttggctcctacacacccaatccgtttgggactggcgcttaacttctccgttttctactatgagatcctcaactcgcctgatcgggcatgcaatcttgcaaaacaggcttttgatgaggccatctccgagctggacacactaggggaagaatcatacaaggacagcacattgatcatgcaattgctccgtgacaatttgacactgtggacttctgatatcactgatgatgctggagatgagatcaaggaagcatcaacgaagcgtgattcaggagagggacaacaatag

SEQ ID NO: 149092 - protein, 263 aa, Linum usitatissimum
MSPSEASREDNVYMAKLAEQAERYEEMVEFMEKVAKTVDVEELTVEERNLLSVAYKNVIGARRASWRIISSIEQKEESRGNEDHVSIIKEYRSKIETELSKICDGILNLLESHLIPATSAAESKVFYLKMKGDYHRYLAEFKTGAERKEAAESTLLAYKSAQDIALADLAPTHPIRLGLALNFSVFYYEILNSPDRACNLAKQAFDEAISELDTLGEESYKDSTLIMQLLRDNLTLWTSDITDDAGDEIKEASTKRDSGEGQQ

SEQ ID NO: 149093 - DNA, 786 bp, Zea mays
  CDS (1)..(786)
atggcatcagcagagctttcccgtgaggaaaatgtgtacatggcgaagctcgctgagcaggcggagaggtacgaggagatggttgagttcatggagaaggtagccaagactgttgactcggaggagctcactgtggaggagcgaaacctcttgtctgttgcatacaagaacgtcattggagcccgccgcgcctcatggcgcatcatctcctccatcgagcagaaggaggagggccgaggcaatgaggaccgagtaacactcatcaaggattatcgtggcaagattgagactgagctgaccaagatctgtgatggcatcctcaagctgcttgagacccatcttgtgccgtcttccactgcccccgagtccaaggtcttctatctcaagatgaagggtgattactacagataccttgctgagttcaagactggagctgagagaaaggacgccactgagaacacgatggtggcatacaaggctgcccaggacattgctctggctgagcttgctccaactcaccctattaggcttggactggcacttaacttctcagtgttctactatgagattctgaactcacctgatcgcgcctgcagtcttgcaaagcaggcttttgacgaggccatctcggaactggacaccctgagcgaggagtcctacaaggacagcactttgatcatgcagctccttcgtgataacttgaccctatggacctctgacatctcggaggaccctgctgaagagattagggaggcgcccaagcgggactcgagtgaggggcagtaa

SEQ ID NO: 149094 - protein, 261 aa, Zea mays
MASAELSREENVYMAKLAEQAERYEEMVEFMEKVAKTVDSEELTVEERNLLSVAYKNVIGARRASWRIISSIEQKEEGRGNEDRVTLIKDYRGKIETELTKICDGILKLLETHLVPSSTAPESKVFYLKMKGDYYRYLAEFKTGAERKDATENTMVAYKAAQDIALAELAPTHPIRLGLALNFSVFYYEILNSPDRACSLAKQAFDEAISELDTLSEESYKDSTLIMQLLRDNLTLWTSDISEDPAEEIREAPKRDSSEGQ

SEQ ID NO: 149095 - DNA, 759 bp, Zea mays
  CDS (1)..(759)
atgtcgcgggaggagaatgtttatatggccaagctggctgagcaagcagaacggtacgaggaaatggttgaatacatggagaaggtggctaagaccacagatgtgcaagagctcactgttgaggagcgtaaccttctatctgttgccttcaagaatgtgattgcggccccccgtgcctcatggcgcattatctcctccatcgagcagaaagaggagtcccgtaagaatgaggaacatgttgcacagatcaaggaataccgtggcaagattgaggctgaattgagcaacatttgtgatggtatcctaaagctgcttgacacgcaccttgtgccttcctccactgccacagagtcgaaggtgttttacctcaagatgaagggtgattatcacaggtaccttgctgagtttaagactggtgctgagaggaaggaatctgcagagagcacaatggtagcttataaggcagctcaggatattgcattggctgaactgccacctattcatcccataaggcttggacttgcacttaacttctcagttttctattacgagattcagaactctccagacaaagcttgcaatcttgccaaggaggcgtttgatgaagctatttctcagttggacatgcttggtgaggattcctacaaagatagcaacttgattatgcagctcctgagggacaacttgaccctctggacggaggacggcattgaggagggcttagaatcctcgaagggcgatgctggtgagggtcagtag

SEQ ID NO: 149096 - protein, 252 aa, Zea mays
MSREENVYMAKLAEQAERYEEMVEYMEKVAKTTDVQELTVEERNLLSVAFKNVIAAPRASWRIISSIEQKEESRKNEEHVAQIKEYRGKIEAELSNICDGILKLLDTHLVPSSTATESKVFYLKMKGDYHRYLAEFKTGAERKESAESTMVAYKAAQDIALAELPPIHPIRLGLALNFSVFYYEIQNSPDKACNLAKEAFDEAISQLDMLGEDSYKDSNLIMQLLRDNLTLWTEDGIEEGLESSKGDAGEGQ

SEQ ID NO: 149097 - DNA, 786 bp, Zea mays
  CDS (1)..(786)
atggcatcagcagagctttcccgtgaggaaaatgtgtacatggcgaagctcgccgagcaggcggagaggtacgaggagatggttgagttcatggagaaggtagccaagactgttgactcggaggagctcactgtggaggagcgaaacctcctgtctgttgcatacaagaacgtcattggagcccgccgcgcctcatggcgcatcatctcctccatcgagcagaaggaggagggccgaggcaatgaggaccgagtaacactcatcaaggattatcgtggcaagattgagactgagctgaccaagatctgtgatggcatcctcaagctgcttgagacccatcttgtgccgtcttccactgcccccgagtccaaggtctcctatctcaagatgaagggtgattactacagatacctcgctgagttcaagactggagctgagagaaaggacgctgctgagaacacgatggtggcatacaaggctgcccaggacattgctctggctgagcttgctccaactcaccctattaggcttggactggcacttaacttctcagtgttctactatgagattctgaactcacctgatcgcgcctgcagtcttgcaaagcaggcttttgacgaggccatctcggaactggacaccctgagcgaggagtcctacaaggacagcactttgatcatgcagctccttcgtgataacttgaccctatggacttctgacatctcggaggaccctgctgaagagattagggaggcacccaagcgcgactcgagtgaggggcagtaa

SEQ ID NO: 149098 - protein, 261 aa, Zea mays
MASAELSREENVYMAKLAEQAERYEEMVEFMEKVAKTVDSEELTVEERNLLSVAYKNVIGARRASWRIISSIEQKEEGRGNEDRVTLIKDYRGKIETELTKICDGILKLLETHLVPSSTAPESKVSYLKMKGDYYRYLAEFKTGAERKDAAENTMVAYKAAQDIALAELAPTHPIRLGLALNFSVFYYEILNSPDRACSLAKQAFDEAISELDTLSEESYKDSTLIMQLLRDNLTLWTSDISEDPAEEIREAPKRDSSEGQ

SEQ ID NO: 149099 - DNA, 807 bp, Hordeum vulgare
  CDS (1)..(807)
atgggctacgaagattctgtttatctcgcaaagcttgctgagcaagccgagcgttatgaggaaatggtagagaacatgaagcaggtagcttccgaagaccaagagctttcagtcgaagaacgaaacctactttctgtggcatacaaaaatgttatcggtgcccgtcgtgcttcatggagaatcgtcacatctattgaacagaaagaggaatctaagggaaactcttctcaggttggtctgattaaagattaccgtcagaagatcgaggcagaacttgccaagatttgcgaggacattctcgaagttctcaacaaacatctgattccttctgcgaaaagtggagagtccaaggttttttatcacaaaatgaaaggagattaccaccgttatcttgccgaatttgctgttggtgataagaggaaagaatctgctgatatgtcccttgaggcatacaaaaatgcaaccgaagttgcccaaactgatctcgcaccgactcaccccattcgtcttggacttgcccttaacttttcagtattttactatgaaatactcaattctcctgatcaagcctgccatctcgctaagcaggcatttgatgatgcaattgcagagcttgataccctcagcgaagaaagttacaaggactctactctcattatgcaactcttgagagacaacctgaccctctggacttcatcggaggccgagtcagctaccgctgaccaggcagccaccacaaatgttcctgacatgaaggaaagcgaagctgtaaccaaagaaacagcaactgaagcaactgcagagtag

SEQ ID NO: 149100 - protein, 268 aa, Hordeum vulgare
MGYEDSVYLAKLAEQAERYEEMVENMKQVASEDQELSVEERNLLSVAYKNVIGARRASWRIVTSIEQKEESKGNSSQVGLIKDYRQKIEAELAKICEDILEVLNKHLIPSAKSGESKVFYHKMKGDYHRYLAEFAVGDKRKESADMSLEAYKNATEVAQTDLAPTHPIRLGLALNFSVFYYEILNSPDQACHLAKQAFDDAIAELDTLSEESYKDSTLIMQLLRDNLTLWTSSEAESATADQAATTNVPDMKESEAVTKETATEATAE

SEQ ID NO: 149101 - DNA, 780 bp, Hordeum vulgare
  CDS (1)..(780)
atggcagcggcagcgggaacgagggaggagatggtctacatggcgaagctggcggagcaggccgagcggtacgaggagatggtcgagttcatggagagggtcgtggcagcgacggggaccggcgagctcagcgtcgaggagaggaacctgctttcagtagcgtacaagaacgtcatcggggcgcgtcgtgcttcctggcgcatcgtgtcctccatcgagcagaaggaggaagggcgcggagctgcggggcacgccgccgcggcgcgcgggtaccgcgcacgtgtcgaggccgaactctccaacatctgcgcggggatcctccgtctcctcgacgaacgcctagtccccgccgccgccgccgtcgatgccaaggtattctacctgaagatgaagggagactaccaccgctacctcgcggagttcaagtcggccgccgagcgcaaggatgccgccgactccaccctcggtgcctaccaggccgctcaggacatagccatgaaggagctgccaccgactcaccccatcaggctgggcctcgcgctcaacttctctgtgttctactacgagatcctcaactcgcctgatcgcgcgtgctcgctcgccaagcaggctttcgatgaagccattgctgagctggattccctcggggaagattcctacaaggacagcaccctgatcatgcaacttctccgtgacaatctcaccttgtggacctctgatatgcaggatgacgctggcgatgaaacgagggattcaagcaagcctgaggatgagcagtag

SEQ ID NO: 149102 - protein, 259 aa, Hordeum vulgare
MAAAAGTREEMVYMAKLAEQAERYEEMVEFMERVVAATGTGELSVEERNLLSVAYKNVIGARRASWRIVSSIEQKEEGRGAAGHAAAARGYRARVEAELSNICAGILRLLDERLVPAAAAVDAKVFYLKMKGDYHRYLAEFKSAAERKDAADSTLGAYQAAQDIAMKELPPTHPIRLGLALNFSVFYYEILNSPDRACSLAKQAFDEAIAELDSLGEDSYKDSTLIMQLLRDNLTLWTSDMQDDAGDETRDSSKPEDEQ

SEQ ID NO: 149103 - DNA, 801 bp, Hordeum vulgare
  CDS (1)..(801)
atgtcgccggcggagccgacgcgagacgagagcgtctacatggcgaagcttgcggagcaggccgagcgctacgaggagatggtcgagttcatggagcgcgtggccaaggccaccggcggggcagggcccggggaggagctatccgtggaggagcgcaacctgctctctgtggcttacaagaacgtcatcggggcccggcgcgcgtcctggaggattatctcctcaatcgagcagaaggaggaaggtcggggcaacgaggcgcacgccgccaccatccgctcctaccgcaccaagatcgaggccgagctcgcaaagatctgcgacggcatcctcgcgctgctcgattcccatctcgtgccatccgccggagccgccgagtccaaagtcttctatctgaagatgaagggcgactaccacaggtaccttgcagagtttaagtctggtgcggagaggaaggaagccgccgagagcaccatgaatgcgtacaaagctgctcaggatatcgctctagcagatttggcgccaacccaccccatcaggcttgggcttgcactcaacttctctgtgttctactatgagatcttgaactcccctgaccgcgcctgcaaccttgcaaaacaggcctttgatgaggctatatcagagctggacagcttaggcgaggaatcctacaaggatagcactttaatcatgcagctcctacgtgacaatttgactctatggacatccgacaccaatgaggatgacgttgatgagataaaggaagccccagctccaaaagaatcgggagacgggcagtga

SEQ ID NO: 149104 - protein, 266 aa, Hordeum vulgare
MSPAEPTRDESVYMAKLAEQAERYEEMVEFMERVAKATGGAGPGEELSVEERNLLSVAYKNVIGARRASWRIISSIEQKEEGRGNEAHAATIRSYRTKIEAELAKICDGILALLDSHLVPSAGAAESKVFYLKMKGDYHRYLAEFKSGAERKEAAESTMNAYKAAQDIALADLAPTHPIRLGLALNFSVFYYEILNSPDRACNLAKQAFDEAISELDSLGEESYKDSTLIMQLLRDNLTLWTSDTNEDDVDEIKEAPAPKESGDGQ

SEQ ID NO: 149105 - DNA, 771 bp, Helianthus annuus
  CDS (1)..(771)
atggcttcttcaaccgaacgtgacaacttcatctatgtcgccaagcttgctgagcaagccgaacgttacgacgaaatggtggatgctatgaagaaggtagcaaagttggatgtggaactgactgttgaagagagaaacttgctttcagttgggtacaagaatgtggttggttctcgtagggcgtcatggagaatattgtcctcaatcgagcagaaagaggaatcaagaggcaatgaagtgagcgtaaatcggatcaaggaatacaggcagaaggttgaaaaagaattgaccgacatttgtaatgatatcatggttgtgattgatgaacatctgattccatcttcatcggctggagaatctactgttttctactacaaaatgaaaggagattattataggtatcttgcagagttcaagactggcgatgataagaaagaggcagctgatcagtctctgaaggcttatcaattggcttccacctcagcggaagctgaattatcctctactcacccgatcaggttgggtttggctttgaacttctctgtgttctattatgagatcatgaactctcctgaaagggcttgtcaccttgcaaaacaagcttttgatgaagctatctcagagcttgattccttgagcgaggaatcgtacaaagatagcactttaattatgcagctcttgagggacaacctcactttgtggacttccgacattccagaggatggagaagatgaaaagatggagatcaccaaatctggtgcggaagagtaa

SEQ ID NO: 149106 - protein, 256 aa, Helianthus annuus
MASSTERDNFIYVAKLAEQAERYDEMVDAMKKVAKLDVELTVEERNLLSVGYKNVVGSRRASWRILSSIEQKEESRGNEVSVNRIKEYRQKVEKELTDICNDIMVVIDEHLIPSSSAGESTVFYYKMKGDYYRYLAEFKTGDDKKEAADQSLKAYQLASTSAEAELSSTHPIRLGLALNFSVFYYEIMNSPERACHLAKQAFDEAISELDSLSEESYKDSTLIMQLLRDNLTLWTSDIPEDGEDEKMEITKSGAEE

SEQ ID NO: 149107 - DNA, 783 bp, Helianthus annuus
  CDS (1)..(783)
atgtcgttaccggcgcgcgaacagcacgtctacatggcgaaactcgccgaacaagccgaacgctacgacgaaatggtcgaattcatggaaaaagtgtccgaaaccgacgaactcacagtcgaagaacgaaacctgctctcggtggcgtacaagaacgtgatcggggctcgtagggcgtcgtggaggatcatatcgtcgatcgagcagaaagaggagtcgcgagggaatgaggatcatgtgaaggtgatcaaggagtatagagcgaagatcgaagcggagcttactagggtttgtgaggggattttgaagctgctggactcgagattgattccgaaggcgagtacgggtgattcgaaggtgttttatttgaagatgaagggggattatcatcggtatcttgctgagtttaagactgctggtgaaaggaaagatgctgctgagagtactcttactgcttataagtctgctcaggatatagcaaacagtgaacttgcaccaacacaccctattcgccttggactggctctcaatttctctgtgttttactatgagattttgaactctcctgaccgagcttgtagccttgccaaacaggcttttgatgaagcaattgctgagttggataccttgggtgaggagtcctacaaagatagcaccttgatcatgcaactccttcgtgacaacctcactctgtggacctctgatatgcaggaggatggaggtgatgaaattaaggaagctgctgctggtggaaagcaaagtgaggagcaaccaccacagtga

SEQ ID NO: 149108 - protein, 260 aa, Helianthus annuus
MSLPAREQHVYMAKLAEQAERYDEMVEFMEKVSETDELTVEERNLLSVAYKNVIGARRASWRIISSIEQKEESRGNEDHVKVIKEYRAKIEAELTRVCEGILKLLDSRLIPKASTGDSKVFYLKMKGDYHRYLAEFKTAGERKDAAESTLTAYKSAQDIANSELAPTHPIRLGLALNFSVFYYEILNSPDRACSLAKQAFDEAIAELDTLGEESYKDSTLIMQLLRDNLTLWTSDMQEDGGDEIKEAAAGGKQSEEQPPQ

SEQ ID NO: 149109 - DNA, 771 bp, Helianthus annuus
  CDS (1)..(771)
atggctgcttctgctgaacgcgaaaacttcatctacgtcgccaagctcgccgagcaagctgaacgctatgacgagatggtcgatgccatgaagaaagtagcaatgttggatattgaattgacggttgaggagagaaatttgctctcagttggatacaagaatgtggtgggttcacgtagggcatcatggaggatattgtcctccattgagcaaaaagaggagtcaaggggcaatgaagttaacgtcaagcggattaaggaatataggcagaaggtggaaacagagctgtcgaacatttgcaaagatatcatggctgtgattgacgagcatctgattccatcttcctctgcgggagaatccactgttttctactacaaaatgaaaggagactattataggtatcttgcggagttcaagtctggcaatgacaaaaaagaagcagctgatcagtcacttaaggcttatcaattggcttctactgctgcagaggaattatctcctacgcatcccattagattgggtttggctttgaacttctccgttttctattacgagatcatgaactctcccgaaagagcctgtcacctggcaaaacaagctttcgatgaagctatctcagaacttgattcgttgagtgaggaatcatacaaagatagcactttaattatgcagctcctgagggacaatctcactttgtggacctccgatattccagaggatggagaggaccaaaagatggagatcaccaaatctggtgaagatgcagagtaa

SEQ ID NO: 149110 - protein, 256 aa, Helianthus annuus
MAASAERENFIYVAKLAEQAERYDEMVDAMKKVAMLDIELTVEERNLLSVGYKNVVGSRRASWRILSSIEQKEESRGNEVNVKRIKEYRQKVETELSNICKDIMAVIDEHLIPSSSAGESTVFYYKMKGDYYRYLAEFKSGNDKKEAADQSLKAYQLASTAAEELSPTHPIRLGLALNFSVFYYEIMNSPERACHLAKQAFDEAISELDSLSEESYKDSTLIMQLLRDNLTLWTSDIPEDGEDQKMEITKSGEDAE

SEQ ID NO: 149111 - DNA, 783 bp, Helianthus annuus
  CDS (1)..(783)
atggcatcaccggcggcgcgtgaagagcacgtctacatggcaaagctctcggagcaagccgaacgctacgaagagatggtagaattcatggaaaaagtctccaactcactcaccgactcagaagaactcaccgtagaagaacgcaacctgttatccgtcgcgtacaaaaacgtgatcggagctcgccgtgcgtcgtggaggataatatcgtcgatcgagcagaaggaggagtctcgcggtaaccaggagcatgtggctgtgatcaaggagtacagatcgaagatcgagaaggagctttcggacatctgtgatggaattttgaagcttctggactcgaaacttgttccgtctgctggttctggcgactcgaaggtgttttatttgaagatgaagggagattatcatcgctaccttgcggagtttaagaccggtgctgagcggaaagaggctgctgagagtactctcaatgcttataaggccgctcaggatattgcaaatgctgaacttgcgccaacacacccaatccgtctaggattggctcttaacttctcggtgttctactatgagattttgaactcaccagatcgtgcatgtggtcttgccaaacaggcgttcgatgaagccatcgctgagttagatactttgggtgaagactcgtacaaggatagcactttgatcatgcaactccttcgtgataatcttactttgtggacatctgatatgcaggatgagggggctgatgagattaaggaagccaagcaaaatgacgaacaaaaggaatga

SEQ ID NO: 149112 - protein, 260 aa, Helianthus annuus
MASPAAREEHVYMAKLSEQAERYEEMVEFMEKVSNSLTDSEELTVEERNLLSVAYKNVIGARRASWRIISSIEQKEESRGNQEHVAVIKEYRSKIEKELSDICDGILKLLDSKLVPSAGSGDSKVFYLKMKGDYHRYLAEFKTGAERKEAAESTLNAYKAAQDIANAELAPTHPIRLGLALNFSVFYYEILNSPDRACGLAKQAFDEAIAELDTLGEDSYKDSTLIMQLLRDNLTLWTSDMQDEGADEIKEAKQNDEQKE

SEQ ID NO: 149113 - DNA, 777 bp, Helianthus annuus
  CDS (1)..(777)
atggcttcttcaaccgaacgtgacaacttcatctatgtcgctaagctcgccgagcaagccgagcgttatgacgaaatggtggatgctatgaagaaggtagcaaagttggatgttgaactgactgttgaagagaggaacttgctctcagttgggtacaagaatgtggtgggatcacgtagggcgtcatggagaatattgtcttcaatcgagcagaaagaggaatccagaggcaatgaagtgaatgtgaagcgtattaaggaatacaggcagaaggttgaaaccgaattgactgacatttgtaatgatatcatggttgtgattgatgagcatctgattccatcttcatctgctggtgaatccactgttttctactacaaaatgaaaggtgattattataggtatcttgcagagttcaagactggcgatgataagaaagaagcagctgatcagtcgctgaaggcttatcaattggcttccacgaccgcagaagctgatctggcacctactcaccccatcaggttgggtttggctttgaacttttcagtgttttattatgagatcatgaactctcctgaaagggcctgccaccttgcaaaacaagcttttgatgaagctatctcagagcttgattccctgagtgaagaatcatacaaagatagcaccttaataatgcagctcttgagggacaacctcactttgtggacttcagacattccagaggatggagaagaccaaaaaatggagatcaccaaatctggagcagaagatgcagagtaa

SEQ ID NO: 149114 - protein, 258 aa, Helianthus annuus
MASSTERDNFIYVAKLAEQAERYDEMVDAMKKVAKLDVELTVEERNLLSVGYKNVVGSRRASWRILSSIEQKEESRGNEVNVKRIKEYRQKVETELTDICNDIMVVIDEHLIPSSSAGESTVFYYKMKGDYYRYLAEFKTGDDKKEAADQSLKAYQLASTTAEADLAPTHPIRLGLALNFSVFYYEIMNSPERACHLAKQAFDEAISELDSLSEESYKDSTLIMQLLRDNLTLWTSDIPEDGEDQKMEITKSGAEDAE

SEQ ID NO: 149115 - DNA, 804 bp, Brassica napus
  CDS (1)..(804)
atgtcgtcaggatccgacaaagagagagagacattcgtctacttggctaagctctccgaacaagccgagcgttacgacgagatggttgagacgatgaagaaagtggcgaaggtggacagcgagctcacggtggaggagaggaatctattgtccgttggttacaagaacgtgatcggagcaagacgggcctcgtggaggataatgtcgtccatcgagcagaaggaagagtctaaaggcaacgaatcaaacgtgaaacacatcaagggttatcgccaaaaggtagaagacgagctcgctgacatatgtaaagacattctcaccatcatcgatcagcatctcatccctcacgctacctcaggagaagccaccgttttctattacaagatgaaaggagattattaccgttacttggctgagtttaagaccgagcaagagaggaaggaagcctctgaacagtcgctcaaaggctatgaggctgcaacacaagctgcaagcactgatcttccttcgacgcacccgattcgtcttggtcttgctcttaacttctctgttttctactatgagatcatgaactctcctgaaagagcttgccatctggccaagcaagcctttgatgaggcgattgcggagttggatacgctaagcgaggagtcatacaaggacagcactttgatcatgcagctcctgagagacaacctcaccctctggacttctgatcttcctgaagatggaggagaagacaacgccaagactgatgaacccaagaaagaagaggataagcttgcagaagctgccgagaactga

SEQ ID NO: 149116 - protein, 267 aa, Brassica napus
MSSGSDKERETFVYLAKLSEQAERYDEMVETMKKVAKVDSELTVEERNLLSVGYKNVIGARRASWRIMSSIEQKEESKGNESNVKHIKGYRQKVEDELADICKDILTIIDQHLIPHATSGEATVFYYKMKGDYYRYLAEFKTEQERKEASEQSLKGYEAATQAASTDLPSTHPIRLGLALNFSVFYYEIMNSPERACHLAKQAFDEAIAELDTLSEESYKDSTLIMQLLRDNLTLWTSDLPEDGGEDNAKTDEPKKEEDKLAEAAEN

SEQ ID NO: 149117 - DNA, 762 bp, Brassica napus
  CDS (1)..(762)
atggagactgagagggaaaagcaggtttactcggcgaagctctctgagcaaaccgaacgttacgatgaaatggttgaggcgatgaagaaagttgctcagatggatgtggagctcaccgtagaggagagaaaccttgtatctgtgggttacaagaacgtcatcggcgcgaggagagcttcgtggaggatactgtcctccatcgagcagaaggaagagtccaaggggaacgaggagaatgtcaagaggattcagaattaccgaaagagggttgaagaggagcttgccaaagtttgcaatgacatcttgtctgtcattgataagcatctcattccttcctctaccgccgtggagtccactgtctttttctacaaaatgaaaggagattactatcgctatctggcagagttcagctctggtgctgagcgcaaggaagctgcagatcagtctcttgaagcctacaaggctgctgttgctgctgcagagactggattggcaccaacacatccagttagacttggcttggctttgaacttttcggttttctattatgagatcttaaactctcctgaaagcgcatgccaattggctaagcaagcattcgacgatgcaatcgctgaacttgacagcctcaacgaggagtcatacaaggacagcactcttatcatgcagctactcagagacaacctcaccttgtggacttctgacctccccgaggaaggagaagagaaatccaaaggtgatgagcctaaagaagagaactga

SEQ ID NO: 149118 - protein, 253 aa, Brassica napus
METEREKQVYSAKLSEQTERYDEMVEAMKKVAQMDVELTVEERNLVSVGYKNVIGARRASWRILSSIEQKEESKGNEENVKRIQNYRKRVEEELAKVCNDILSVIDKHLIPSSTAVESTVFFYKMKGDYYRYLAEFSSGAERKEAADQSLEAYKAAVAAAETGLAPTHPVRLGLALNFSVFYYEILNSPESACQLAKQAFDDAIAELDSLNEESYKDSTLIMQLLRDNLTLWTSDLPEEGEEKSKGDEPKEEN

SEQ ID NO: 149119 - DNA, 786 bp, Brassica napus
  CDS (1)..(786)
atgtcgtctactcgggaagagaatgtgtacttggccaagttagccgagcaagccgaacgttacgaggagatggttgagttcatggagaaagtcgccaagaccgttgactccgaggagcttactgtcgaagagaggaacctcttgtccgttgcttacaagaacgtgattggtgctaggagagcttcgtggaggatcatttcttccattgaacagaaggaagaaagcagagggaacgaggatcacgttgctcttatcaaggactacagagggaagattgaaaccgagcttgggaagatctgcgatgggattttgaaccttttggattctcaccttgttcccgctgcgtctttggctgagtccaaagtgttttacctgaagatgaagggagattaccataggtaccttgctgagttcaagactggtgctgagaggaaggatgctgctgagagcactctcttggcttacaagtcagctcaggatattgcacttgctgatttacctccaactcatccgattagattgggacttgctcttaacttctctgtcttctactatgagattctcaactctcctgatcgcgcttgcagtctcgccaagcaggcttttgatgaagcaatctctgagctggacacattaggagaagaatcatacaaggacagcacgctgataatgcaacttctccgtgacaatctgacgctctggacttctgacatcaatgatgaggcgggtggtgatgagatcaaggaggcgtcaaaagacgagcctgaagaaggcaaacaagcttag

SEQ ID NO: 149120 - protein, 261 aa, Brassica napus
MSSTREENVYLAKLAEQAERYEEMVEFMEKVAKTVDSEELTVEERNLLSVAYKNVIGARRASWRIISSIEQKEESRGNEDHVALIKDYRGKIETELGKICDGILNLLDSHLVPAASLAESKVFYLKMKGDYHRYLAEFKTGAERKDAAESTLLAYKSAQDIALADLPPTHPIRLGLALNFSVFYYEILNSPDRACSLAKQAFDEAISELDTLGEESYKDSTLIMQLLRDNLTLWTSDINDEAGGDEIKEASKDEPEEGKQA

SEQ ID NO: 149121 - DNA, 747 bp, Brassica napus
  CDS (1)..(747)
atggcggcgacgttgagcagagaccaatacgtgtacatggcgaagctggccgagcaagcggagcgatacgaggagatggtccagttcatggagagcctggtaagctccgccacgccggcgggggagctgacggtggaggagaggaacctcctctcggtggcgtacaagaacgtgatcggatctctaagagcggcgtggaggatcgtgtcatcgatcgagcagaaggaagagagcaggaagaacgaggagcacgtgtcgctcgtgaaggattacagatccaaggtggagggggagctctcgacgatctgctcggggatcctcaagctgctcgatacgcatctgatcccttcggctacggctagcgagtcgaaggtgttttacctgaagatgaagggggattaccatcgctacatggccgagttcaaatctggagatgagaggaagactgctgccgaagataccatgatcgcctacaaggctgctcaggacgttgcggttgctgatctagcgcctacgcatccgatcaggctgggtctggctctcaatttctcggtgttttactacgagattctcaactcttctgagaaagcttgtagcatggccaaacaggctttcgaggaagccattgctgagctggacacgttgggagaggagtcatacaaggacagtactctcatcatgcagttgctaagggacaatctaaccctctggacctccgacatgcaggagcagatggatgaggcctga

SEQ ID NO: 149122 - protein, 248 aa, Brassica napus
MAATLSRDQYVYMAKLAEQAERYEEMVQFMESLVSSATPAGELTVEERNLLSVAYKNVIGSLRAAWRIVSSIEQKEESRKNEEHVSLVKDYRSKVEGELSTICSGILKLLDTHLIPSATASESKVFYLKMKGDYHRYMAEFKSGDERKTAAEDTMIAYKAAQDVAVADLAPTHPIRLGLALNFSVFYYEILNSSEKACSMAKQAFEEAIAELDTLGEESYKDSTLIMQLLRDNLTLWTSDMQEQMDEA

SEQ ID NO: 149123 - DNA, 750 bp, Brassica napus
  CDS (1)..(750)
atggcggcggcgacgatgagcagagaccaatacgtctacatggcgaaactcgccgagcaagcggagcgctacgaagagatggtccagttcatggaaagcctcgtaacctccgccacacctgccggcgagctcacggtagaagagaggaacctcctctccgtcgcgtacaagaacgtgatcggatctcttcgagccgcgtggaggatcgtgtcttcgatcgagcagaaggaagagagcaggaagaacgaggaacacgtgtccctcgtcaaggactacagatctaaggtcgagacagagctctccacgatctgctcggggatcctcaagctgctcgacacgcatctgataccttcggctagtgctagcgagtccaaagtgttttacttgaagatgaagggtgattaccatcggtacatggccgagttcaaatctggtgatgagaggaagacggctgctgaagatactatggtcgcttacaaggctgctcaggatgttgcggttgctgatctagcgcctacgcatccgatcaggctgggtttggctcttaatttctcggtgttttactacgagattctcaattcttcggagaaagcttgtagtatggctaaacaggctttcgaggaagcaattgcggagctggacacgttgggagaggagtcatacaaagacagtactctcatcatgcagttgctaagggacaatcttaccctctggacctctgatatgcaggagcagatggatgaggcctga

SEQ ID NO: 149124 - protein, 249 aa, Brassica napus
MAAATMSRDQYVYMAKLAEQAERYEEMVQFMESLVTSATPAGELTVEERNLLSVAYKNVIGSLRAAWRIVSSIEQKEESRKNEEHVSLVKDYRSKVETELSTICSGILKLLDTHLIPSASASESKVFYLKMKGDYHRYMAEFKSGDERKTAAEDTMVAYKAAQDVAVADLAPTHPIRLGLALNFSVFYYEILNSSEKACSMAKQAFEEAIAELDTLGEESYKDSTLIMQLLRDNLTLWTSDMQEQMDEA

SEQ ID NO: 149125 - DNA, 774 bp, Brassica napus
  CDS (1)..(774)
atgtcgtcacgtgaggtgaatgtgtacatggcgaaactagccgaacaagccgagcgttacgaagagatggttgagttcatggagaaagttgctaaaaccgtcgactctgaagaactcactgtcgaggagaggaaccttctctccgttgcttacaagaacgtgatcggagcgaggagggcttcgtggaggatcatctcttccattgagcagaaggaagagagcaaagggaacgaagaacacgttgctatcatcaaggagtacagggggaagattgaaaccgagcttagcaaaatctgcgacgggatcttgaatgttcttgaagctcatctcatcccctctgcttcgcctgctgagtctaaggtgttttatctgaagatgaagggagattatcacaggtatcttgctgagtttaaggctggtgatgagaggaaagatgctgctgagagcactttggttgcttacaagtctgctcaggacattgcgactgctgagttagctccaactcacccgatcaggcttggtcttgcactcaacttctctgtgttttactatgagatccttaactcgcctgaccgtgcctgcaccctcgctaagcaggcatttgatgaagctatcgctgagttggatacattgggagaggaatcatacaaagacagtacgctgattatgcagcttctcagagacaacctcactctctggacttctgacatgactgacgaagcaggagatgagataaaggaggcatcgaagccagaaggtggtgcagcagagtaa

SEQ ID NO: 149126 - protein, 257 aa, Brassica napus
MSSREVNVYMAKLAEQAERYEEMVEFMEKVAKTVDSEELTVEERNLLSVAYKNVIGARRASWRIISSIEQKEESKGNEEHVAIIKEYRGKIETELSKICDGILNVLEAHLIPSASPAESKVFYLKMKGDYHRYLAEFKAGDERKDAAESTLVAYKSAQDIATAELAPTHPIRLGLALNFSVFYYEILNSPDRACTLAKQAFDEAIAELDTLGEESYKDSTLIMQLLRDNLTLWTSDMTDEAGDEIKEASKPEGGAAE

SEQ ID NO: 149127 - DNA, 786 bp, Brassica napus
  CDS (1)..(786)
atgtcgtctactcgggaagagaatgtgtacttggctaagttagccgaacaagccgaacgttacgaggagatggttgagttcatggagaaagtcgccaagactgttgactccgaggagcttactgtggaagagaggaacctcttgtccgttgcttacaagaacgtgattggtgcaaggagagcttcgtggaggatcatttcttccattgaacagaaggaagaaagcagagggaacgatgatcacgttgctcttatcaaggactacagagtgaagattgaaaccgagctcgggaagatctgcgatgggattttgaaccttttggattctcaccttgttcccgctgcctctttggctgagtccaaagtgttttacctgaagatgaagggagattaccataggtaccttgctgagttcaagactggtgctgagaggaaggatgctgctgagagcactctcttggcttacaagtcagctcaggatattgcacttgctgatttacctccaactcatccgattagattgggacttgctcttaacttctctgtcttctactatgagattctcaactctcctgatcgcgcttgcagtctcgccaagcaggcatttgatgaagcaatctctgagctggacacattaggagaagaatcatacaaagacagcacactgataatgcaacttctccgtgacaatctgactctctggacttctgacatcaatgatgaggcgggtggtgacgagatcaaggaggcgtcaaaagacgagcctgaagaaggcaaacaagcttag

SEQ ID NO: 149128 - protein, 261 aa, Brassica napus
MSSTREENVYLAKLAEQAERYEEMVEFMEKVAKTVDSEELTVEERNLLSVAYKNVIGARRASWRIISSIEQKEESRGNDDHVALIKDYRVKIETELGKICDGILNLLDSHLVPAASLAESKVFYLKMKGDYHRYLAEFKTGAERKDAAESTLLAYKSAQDIALADLPPTHPIRLGLALNFSVFYYEILNSPDRACSLAKQAFDEAISELDTLGEESYKDSTLIMQLLRDNLTLWTSDINDEAGGDEIKEASKDEPEEGKQA

SEQ ID NO: 149129 - DNA, 783 bp, Brassica napus
  CDS (1)..(783)
atggcggttccgtcgcgcgaggatcttgtatacatggctaagcttgcggagcaggcggagaggtacgaagagatggtccaatacatggagaaagtctccgccgcaacagatggtagcgagctcacaatcgaggagcgaaacctcctctccgtcgcctacaagaacctgatcggcgctcgccgcgcctcgtggagaatcatctcttcgatcgagcagaaagaggagagccgcggcaacgtcgagcgcgtcaaaacgatccgtgactacaaggctaagatcgaatcggagctctcggggatctgcgacggaatcctaaagctgctcgactctacgctcgtcccttccgctgattccgaggaatccaaggtcttctacctcaagatgaaaggtgactactacagatacttagccgagttcaaaatcggtaaagagagagacgccgccgcggataacaccctcgccgcttacgaatctgctcaggacaatgctaaggggcttgcttcaactcacccaatccgtcttggtttggctttgaacttctctgtgttctattacgagatccttgagtcccctgaccgtgcctgcaacctcgctaaaacggcttttgatgctgctattgctgagttagacactctaggggaagagtcatacaaggatagcactttgatcatgcagcttctccgtgacaacctcactctctggacatccgacatgcaggatgaatctgcagacgagatcaaggaagcagctgcagctccgaagccaacagaagagcagaaatga

SEQ ID NO: 149130 - protein, 260 aa, Brassica napus
MAVPSREDLVYMAKLAEQAERYEEMVQYMEKVSAATDGSELTIEERNLLSVAYKNLIGARRASWRIISSIEQKEESRGNVERVKTIRDYKAKIESELSGICDGILKLLDSTLVPSADSEESKVFYLKMKGDYYRYLAEFKIGKERDAAADNTLAAYESAQDNAKGLASTHPIRLGLALNFSVFYYEILESPDRACNLAKTAFDAAIAELDTLGEESYKDSTLIMQLLRDNLTLWTSDMQDESADEIKEAAAAPKPTEEQK

SEQ ID NO: 149131 - DNA, 747 bp, Brassica napus
  CDS (1)..(747)
atggcggcgacactaggcagagaccagtacgtctacatggccaagctcgccgagcaggccgagcgctacgaggagatggtcaacttcatggagaagctcgtcacaggcgccacaccatcctccgagctcaccgtcgaagagcgtaacctcctctccgtggcatacaagaacgtgatcggatccctgcgcgccgcgtggcgcatcgtgtcctcgatcgagcagaaggaggagagccgcaagaacgaggagcacgtggcgctcgtgaaagactacagatccaaggtggagacggagctctcctccgtctgcgaagggatactaaagcttctcgaggagaatctgattccctctgcggcggcgagcgagtcgaaggtgttttatctgaagatgaaaggggattaccataggtacatggcggagtttaaggccggcgaggagaggaaagccgcggctgaggataccatggttgcttacaaggctgctcaggatattgcagctgctgatatggcgcctactcatccgattaggcttggtttggcgttgaatttctccgtgttttactatgagattcttaattcttccgacaaggcttgtgacatggccaaacaggctttcgaagaagccatagctgagcttgacactctgggagaagagtcctacaaagacagcactctcatcatgcagttgctcagggacaatctcaccctctggacctccgatatgcaggagcagatggacgaggcgtga

SEQ ID NO: 149132 - protein, 248 aa, Brassica napus
MAATLGRDQYVYMAKLAEQAERYEEMVNFMEKLVTGATPSSELTVEERNLLSVAYKNVIGSLRAAWRIVSSIEQKEESRKNEEHVALVKDYRSKVETELSSVCEGILKLLEENLIPSAAASESKVFYLKMKGDYHRYMAEFKAGEERKAAAEDTMVAYKAAQDIAAADMAPTHPIRLGLALNFSVFYYEILNSSDKACDMAKQAFEEAIAELDTLGEESYKDSTLIMQLLRDNLTLWTSDMQEQMDEA

SEQ ID NO: 149133 - DNA, 783 bp, Brassica napus
  CDS (1)..(783)
atggcggtttctgcgcgtgaggagttcgtgtacatggccaagctcgccgagcaagcggagaggtacgaggaaatggtagagttcatggagaaagtctccgccgccgtcgacggcgatgaactcaccgtcgaggagcgtaacctcctctccgtcgcttacaaaaacgtgatcggcgcccgccgtgcctcgtggcgcatcatttcgtcgatcgagcagaaggaagagagccgcggcaacgacgaccacgtcacggcgatccgcgattacagatctaagatcgagacggagctctctggaatctgcgacgggatccttaagctcctcgattcgaggctcgtccccgccgctgcttccggcgattccaaggtgttttacctcaagatgaaaggtgattaccacaggtacttggctgagtttaagactggccaggagaggaaagacgccgccgagaacactctctccgcttacaaagccgctcaggatattgcgaatgcagagctagcaccaactcacccaatccgtctaggtctggcattgaacttctctgtgttctactacgagatccttaactctcctgatcgtgcctgcagcctcgccaaacaggcctttgatgacgcgatagccgagttggacactctaggtgaagagtcatacaaagacagcaccttgatcatgcagcttctccgtgacaacctcactctctggacatccgacatgcaggatgatgctgcggatgagatcaaggaagcatcagctccaaaaccaacagaggaacagcagtaa

SEQ ID NO: 149134 - protein, 260 aa, Brassica napus
MAVSAREEFVYMAKLAEQAERYEEMVEFMEKVSAAVDGDELTVEERNLLSVAYKNVIGARRASWRIISSIEQKEESRGNDDHVTAIRDYRSKIETELSGICDGILKLLDSRLVPAAASGDSKVFYLKMKGDYHRYLAEFKTGQERKDAAENTLSAYKAAQDIANAELAPTHPIRLGLALNFSVFYYEILNSPDRACSLAKQAFDDAIAELDTLGEESYKDSTLIMQLLRDNLTLWTSDMQDDAADEIKEASAPKPTEEQQ

SEQ ID NO: 149135 - DNA, 753 bp, Brassica napus
  CDS (1)..(753)
atggcggcggcgacactaggcagagaccagtacgtctacatggcgaagctcgccgagcaagccgagcgctacgaggagatggtccacttcatggagcagctcgtcacaggcggcgccactccatcctcagagctcaccgtggaggaacgaaacctcctctcggtagcctacaagaacgtgatcggatctctacgcgccgcgtggaggatcgtgtcgtcgatcgagcagaaggaagagagcaggaagaacgaggagcacgcgacgctcgtgaagggttacagatctaaggtcgagacggagctttcctccgtctgcgaagggatactaaagcttcttgattcgcatctgattccctcggcggcggcgagcgagtcgaaggtgttttatttgaagatgaagggggattatcataggtacatggcggagtttaagtctggggaggagaggaaagctgctgctgaggatactatgggtgcttataaggcagctcaggatatcgcggctgctgatatggcgcctactcatccaataaggcttggtcttgcgttgaatttctcggtgttttactatgagattcttaattcttcagacaaagcttgtaacatggccaaacaggcttttgaagaagcaatagctgagcttgacacattgggagaagaatcctacaaagacagcactctcattatgcagttgctcagggacaatcttaccctatggacctccgatatgcaggagcagatggacgaagcctga

SEQ ID NO: 149136 - protein, 250 aa, Brassica napus
MAAATLGRDQYVYMAKLAEQAERYEEMVHFMEQLVTGGATPSSELTVEERNLLSVAYKNVIGSLRAAWRIVSSIEQKEESRKNEEHATLVKGYRSKVETELSSVCEGILKLLDSHLIPSAAASESKVFYLKMKGDYHRYMAEFKSGEERKAAAEDTMGAYKAAQDIAAADMAPTHPIRLGLALNFSVFYYEILNSSDKACNMAKQAFEEAIAELDTLGEESYKDSTLIMQLLRDNLTLWTSDMQEQMDEA

SEQ ID NO: 149137 - DNA, 780 bp, Brassica napus
  CDS (1)..(780)
atggcagtttcatcgcgcgaggactacgtatacatggcgaagctctccgagcaagccgagaggtacgaagagatggtcgaattcatggagaagctgtccgccgccgcagacggcgccgagctcaccgtcgaggagcgcaacctcctctccgtcgcgtacaaaaacgtgatcggcgcccgccgcgcttcgtggcggatcatctcctcgatcgagcagaaggaagagagccgcggcaacgacgaccgcgtcaagacgatcggcgactacaaggcgaagatcgagtcggagctagcgggaatctgcgaggggatcctgaagctgctcgagtctgcgctcgtcccttccgccgcttccgaggattccaaggttttctacctcaagatgaaaggcgattactataggtacttggctgagttcaagatcggtaaggagagagatgacgccgctgataacactctctccgcttacgaatctgctcaggagaatgcgaaggggctagctccaactcacccgatccgtcttggtttggcattgaacttctctgtgttttattacgagatcctcaattctcctgatcgtgcttgcaacctcgctaaaacggcttttgatgctgccattgctgagttagacacgctaggggaagagtcgtacaaggatagcactttgatcatgcaacttctacgtgacaacctcactctctggacatccgacatgcaggatgaagctgcagatgagatcaaggaagcaacgcctccaaagccagcagaggagcagaaatga

SEQ ID NO: 149138 - protein, 259 aa, Brassica napus
MAVSSREDYVYMAKLSEQAERYEEMVEFMEKLSAAADGAELTVEERNLLSVAYKNVIGARRASWRIISSIEQKEESRGNDDRVKTIGDYKAKIESELAGICEGILKLLESALVPSAASEDSKVFYLKMKGDYYRYLAEFKIGKERDDAADNTLSAYESAQENAKGLAPTHPIRLGLALNFSVFYYEILNSPDRACNLAKTAFDAAIAELDTLGEESYKDSTLIMQLLRDNLTLWTSDMQDEAADEIKEATPPKPAEEQK

SEQ ID NO: 149139 - DNA, 753 bp, Brassica napus
  CDS (1)..(753)
atggcggcggcgacactaggcagagaccagtacgtctacatggcgaagctcgccgagcaagccgagcgttacgaggagatggtccaattcatggagcagctcgtcacaggcggcgccactccatcgtcagagctcaccgtggaggaaagaaacctcctctcggtagcctacaagaacgtgatcggatctctacgcgccgcgtggaggatcgtgtcgtcgatcgagcagaaggaagagagcaggaagaacgaggagcacgcgacgctcgtgaagggttacagatctaaggtggagacggagctttcctccgtctgcgaagggatactaaagcttcttgattcgcatctgattccctctgcggcggcgagcgagtcgaaggtgttttatttgaagatgaagggggattatcataggtacatggcggagtttaagtctggggatgagaggaaagtggctgctgaggatactatgggtgcttataaggcagctcaggatattgcggctgctgatatggcgcctactcatccgattaggcttggtttggcgttgaatttctccgtgttttactatgagattcttaattcttccgacaaggcttgtgacatggccaaacaggcttttgaagaagccatagctgagcttgacactctgggagaagagtcctacaaagacagcactctcatcatgcagttgctcagggacaatctcaccctctggacctccgatatgcaggagcagatggacgaggcgtga

SEQ ID NO: 149140 - protein, 250 aa, Brassica napus
MAAATLGRDQYVYMAKLAEQAERYEEMVQFMEQLVTGGATPSSELTVEERNLLSVAYKNVIGSLRAAWRIVSSIEQKEESRKNEEHATLVKGYRSKVETELSSVCEGILKLLDSHLIPSAAASESKVFYLKMKGDYHRYMAEFKSGDERKVAAEDTMGAYKAAQDIAAADMAPTHPIRLGLALNFSVFYYEILNSSDKACDMAKQAFEEAIAELDTLGEESYKDSTLIMQLLRDNLTLWTSDMQEQMDEA

SEQ ID NO: 149141 - DNA, 786 bp, Brassica napus
  CDS (1)..(786)
atgtcgtctactcgggaagagaatgtgtacttggctaagttagccgaacaagccgaacgttacgaggagatggttgagttcatggagaaagtcgccaagactgttgactccgaggagcttactgtggaagagaggaacctcttgtccgttgcttacaagaacgtgattggtgcaaggagagcttcgtggaggatcatttcttccattgaacagaaggaagaaagcagagggaacgatgatcacgttgctcttatcaaggactacagagtgaagattgaaaccgagctcgggaagatctgcgatgggattttgaaccttttggattctcaccttattcccgctgcgtctttggctgagtccaaagtgttttacctgaagatgaagggagattaccataggtaccttgctgagttcaagactggtgctgagaggaaggatgctgctgagagcacactcttggcttacaagtcagctcaggatattgcacttgctgatttacctccaactcatccgattagattggggcttgctcttaacttctctgtcttctactatgagattctcaactctcctgatcgtgcttgcagtctcgccaagcaggcttttgatgaagcaatctctgagctggacacattaggagaagaatcatacaaggacagcacgctcataatgcaacttctccgtgacaatctgacgctctggacttctgacatcaatgatgaggcgggtggtgatgagatcaaggaggcgtcaaaagacgagcctgaagaaggcaaacaagcttag

SEQ ID NO: 149142 - protein, 261 aa, Brassica napus
MSSTREENVYLAKLAEQAERYEEMVEFMEKVAKTVDSEELTVEERNLLSVAYKNVIGARRASWRIISSIEQKEESRGNDDHVALIKDYRVKIETELGKICDGILNLLDSHLIPAASLAESKVFYLKMKGDYHRYLAEFKTGAERKDAAESTLLAYKSAQDIALADLPPTHPIRLGLALNFSVFYYEILNSPDRACSLAKQAFDEAISELDTLGEESYKDSTLIMQLLRDNLTLWTSDINDEAGGDEIKEASKDEPEEGKQA

SEQ ID NO: 149143 - DNA, 774 bp, Brassica napus
  CDS (1)..(774)
atgtcgtcacgtgaagagaatgtgtacatggcgaaactagcggaacaagcggagcgttacgaagagatggttgagttcatggagaaagttgctaagaccgttgactctgaagaactcactgtcgaggagaggaaccttctctccgttgcttacaagaacgtgatcggggcgaggagggcttcgtggaggatcatctcttccatcgagcagaaggaagagagcaaagggaacgaagagcacgttgctatcatcaaggagtacagggggaagattgaaaccgagcttagcaaaatctgcgacgggatcttgaatgttcttgaagctcatctcatcccctctgcttcacctgctgagtctaaggtgttttatctcaagatgaagggagattatcacaggtatcttgctgagtttaaggctggtgatgagaggaaagatgctgctgagagcactttggttgcttacaagtctgctcaggacattgcgactgctgagttagctccaactcaccctatcaggcttggtcttgcactcaacttctctgtgttttactatgagatccttaactcgcctgaccgtgcctgcaccctcgctaagcaggcatttgatgaagctatcgctgagttggatacattgggagaggaatcatacaaagacagtacgctgattatgcagcttctcagagacaacctcactctctggacttctgatatgactgacgaggccggagatgagataaaggaggcatcgaagccagagggtggtgcagcagagtaa

SEQ ID NO: 149144 - protein, 257 aa, Brassica napus
MSSREENVYMAKLAEQAERYEEMVEFMEKVAKTVDSEELTVEERNLLSVAYKNVIGARRASWRIISSIEQKEESKGNEEHVAIIKEYRGKIETELSKICDGILNVLEAHLIPSASPAESKVFYLKMKGDYHRYLAEFKAGDERKDAAESTLVAYKSAQDIATAELAPTHPIRLGLALNFSVFYYEILNSPDRACTLAKQAFDEAIAELDTLGEESYKDSTLIMQLLRDNLTLWTSDMTDEAGDEIKEASKPEGGAAE

SEQ ID NO: 149145 - DNA, 804 bp, Brassica napus
  CDS (1)..(804)
atgtcgtcaggatccgacaaagagagagagacattcgtctacttggctaagctctccgaacaagccgagcgttacgacgagatggttgagacgatgaagaaagtggcgaaggtggacagcgagctcacggtggaggagaggaatctattgtccgttggttacaagaacgtgatcggagctagacgggcctcgtggaggatcatgtcgtccatcgagcagaaggaagagtctaaaggcaacgaatcaaacgtgaaaacaatcaaggggtatcgccaaaaggtagaggacgagctcgcgaacatttgtcaagacattctcagcatcattgatcagcatctcatccctcacgctacctctggagaagccaccgttttctattacaagatgaaaggagattactaccgttacctggctgagtttaagaccgagcaagagaggaaggaagcctctgaacagtcactcaaaggctatgaggctgcaacacaagctgcaagcactgagcttccttcgacccacccgattcgtcttggccttgctcttaacttctctgttttctactatgagatcatgaactctcctgaaagagcttgccatctggcgaagcaagctttcgatgaggcgattgcggagttggatactctaagcgaggagtcatacaaggatagcactttgatcatgcagctcctgagagacaacctcaccctctggacttctgatcttcctgaagatggaggagaagacaacgccaagactgatgaacccaagaaagaagaggctaagcctgcagaagctaccgagaactga

SEQ ID NO: 149146 - protein, 267 aa, Brassica napus
MSSGSDKERETFVYLAKLSEQAERYDEMVETMKKVAKVDSELTVEERNLLSVGYKNVIGARRASWRIMSSIEQKEESKGNESNVKTIKGYRQKVEDELANICQDILSIIDQHLIPHATSGEATVFYYKMKGDYYRYLAEFKTEQERKEASEQSLKGYEAATQAASTELPSTHPIRLGLALNFSVFYYEIMNSPERACHLAKQAFDEAIAELDTLSEESYKDSTLIMQLLRDNLTLWTSDLPEDGGEDNAKTDEPKKEEAKPAEATEN

SEQ ID NO: 149147 - DNA, 753 bp, Glycine max
  CDS (1)..(753)
atggcagcagcagaggggctaaacagagagcagtacgtgtacttggcgaagctgtcggagcaggcggagcggtacgaggagatggtggagttcatgcagaaggtggtggtggggtcgacgccggcgtcggagctcacggtggaggagcgcaacctcctctcggtggcctacaagaacgtcatcggctcgctgcgtgccgcgtggcgcatcgtctcctccatcgagcagaaggaggagggccgcaagaacgacgaccacgtctccctcgtcaagcactacagatccaaggtcgagaacgagctcactcaggtctgcgccagcatcctcagcctcctcgactccaacctcgtaccctccgcctccgccagcgagtccaaggtcttctacttgaagatgaagggcgattaccaccgctatctcgccgagtttaaggttggggacgaaagaaaaaccgctactgaggataccatgttgtcttacaaggctgcccaggatattgcttctgcggatcttccccctactcaccccatcagattgggtcttgctctcaacttctccgtcttctactatgaaatcctcaaccagtctgataaagcgtgtgccatggctaaacaggcttttgaggaagcaattgctgagctggacaccttgggagaagaatcttacaaagacagcacgctcataatgcagcttttaagagacaacctcaccctttggacttctgatgttcaggaccagctagatgagccctga

SEQ ID NO: 149148 - protein, 250 aa, Glycine max
MAAAEGLNREQYVYLAKLSEQAERYEEMVEFMQKVVVGSTPASELTVEERNLLSVAYKNVIGSLRAAWRIVSSIEQKEEGRKNDDHVSLVKHYRSKVENELTQVCASILSLLDSNLVPSASASESKVFYLKMKGDYHRYLAEFKVGDERKTATEDTMLSYKAAQDIASADLPPTHPIRLGLALNFSVFYYEILNQSDKACAMAKQAFEEAIAELDTLGEESYKDSTLIMQLLRDNLTLWTSDVQDQLDEP

SEQ ID NO: 149149 - DNA, 780 bp, Glycine max
  CDS (1)..(780)
atggcggccgctccctcgcctcgcgaagagaacgtctacatggcgaagctcgccgagcaggccgagcgctacgaagagatggtggagttcatggagaaggtctccgccgccgccgacaacgaggaacttaccgtggaggagaggaacctcctctccgtcgcctacaagaacgtgatcggagcgcgccgcgcctcgtggcgcatcatctcctcgatcgagcagaaggaggagagccgcggcaacgaggatcacgtctccgtcatccgcgactaccgatccaagatcgagtccgagctctccaacatctgcgacggtatcctcaagctcctcgactctcgcctcattccatccgcttcctccggcgattccaaggtcttctacctcaagatgaagggagattaccacagataccttgccgagttcaagaccggcgccgagcgtaaggaggctgccgagagcactctctctgcatacaaagccgctcaggacattgcgaatgccgaactgcctccaactcatccaattaggcttggccttgcacttaacttctctgtattttactacgaaatccttaactctcccgatcgtgcctgcaaccttgcaaaacaggcttttgatgaagctattgctgaattggatacactgggagaggagtcatacaaggatagcactctgatcatgcaactccttcgtgataacctcaccctttggacctctgacatgcaggatgatggagcagatgaaattaaagaagcagcaccgaaacaggatgaccagtaa

SEQ ID NO: 149150 - protein, 259 aa, Glycine max
MAAAPSPREENVYMAKLAEQAERYEEMVEFMEKVSAAADNEELTVEERNLLSVAYKNVIGARRASWRIISSIEQKEESRGNEDHVSVIRDYRSKIESELSNICDGILKLLDSRLIPSASSGDSKVFYLKMKGDYHRYLAEFKTGAERKEAAESTLSAYKAAQDIANAELPPTHPIRLGLALNFSVFYYEILNSPDRACNLAKQAFDEAIAELDTLGEESYKDSTLIMQLLRDNLTLWTSDMQDDGADEIKEAAPKQDDQ

SEQ ID NO: 149151 - DNA, 774 bp, Glycine max
  CDS (1)..(774)
atggcggattcttctcgggaggagaacgtttacatggcgaaattggcggagcaggccgagcgttacgaggagatggttgagttcatggagaaggttgcaaagactgtggaggttgaggagttgacggtggaggagaggaatctcctctctgtggcttacaagaacgtgattggtgcgaggagggcttcgtggaggatcatatcctccattgagcagaaggaggagagcaggggcaatgaggaccacgtggccattataaaggagtacaggggcaaaattgaggctgaactcagcaagatctgtgatgggattttgaacctccttgagtccaacctcattccttccgctgcatctcccgagagcaaagtcttttaccttaaaatgaagggtgattaccacaggtaccttgctgagttcaagaccggggcagagaggaaagaggctgcagagagtactttgcttgcttacaaatccgctcaggatattgctcttgctgacttggcccccactcaccccattaggttgggacttgctctcaacttttctgtgttctattatgaaatccttaactcgccagatcgtgcttgtaatcttgccaagcaggcatttgatgaggcaatttccgagcttgacacattgggtgaagagtcatacaaagatagtacattgatcatgcaacttctccgtgacaatctgactttgtggacatcagacatcacggacgatgctggagatgagatcaaggaaacatctaagcaacaaccaggcgaatag

SEQ ID NO: 149152 - protein, 257 aa, Glycine max
MADSSREENVYMAKLAEQAERYEEMVEFMEKVAKTVEVEELTVEERNLLSVAYKNVIGARRASWRIISSIEQKEESRGNEDHVAIIKEYRGKIEAELSKICDGILNLLESNLIPSAASPESKVFYLKMKGDYHRYLAEFKTGAERKEAAESTLLAYKSAQDIALADLAPTHPIRLGLALNFSVFYYEILNSPDRACNLAKQAFDEAISELDTLGEESYKDSTLIMQLLRDNLTLWTSDITDDAGDEIKETSKQQPGE

SEQ ID NO: 149153 - DNA, 786 bp, Glycine max
  CDS (1)..(786)
atgactgcctccaaggatcgcgagaacttcgtctacatcgccaaactcgccgagcaggccgagcgttacgaagagatggtggaatcaatgaagaacgttgcgaatctcgacgttgaactgacggtggaggagcggaatttgctttctgttgggtacaagaatgtgattggtgctcgcagagcgtcctggaggatcctgtcttccattgagcagaaggaagaaacaaaagggaacgagttgaatgcgaagcggattaaggagtacagacagaaggttgaattggagctatcgaacatctgtaatgatgttatgagagtgattgatgagcaccttatcccttcggctgcagctggtgaatccactgtgttttactataagatgaaaggagattattatcgttatcttgctgaatttaagtcaggcaatgagaagaaggaagctgctgatcagtctatgaaagcatatgagtctgctaccgctgcagcagaggctgatttacctccaacacatcccatccgattgggtctagctttaaatttctcagttttctattacgagatcttgaactctccagaaagagcctgtcatcttgcaaaacaagcttttgatgaagctatttctgagcttgacaccttgaatgaggagtcatacaaagacagcaccttaatcatgcaacttctcagggacaacctaactttgtggacttctgacatcccagaagatggagaagatgcccagaaagtgaatggcactgccaagcttggtggaggtgaggaggcagagtga

SEQ ID NO: 149154 - protein, 261 aa, Glycine max
MTASKDRENFVYIAKLAEQAERYEEMVESMKNVANLDVELTVEERNLLSVGYKNVIGARRASWRILSSIEQKEETKGNELNAKRIKEYRQKVELELSNICNDVMRVIDEHLIPSAAAGESTVFYYKMKGDYYRYLAEFKSGNEKKEAADQSMKAYESATAAAEADLPPTHPIRLGLALNFSVFYYEILNSPERACHLAKQAFDEAISELDTLNEESYKDSTLIMQLLRDNLTLWTSDIPEDGEDAQKVNGTAKLGGGEEAE

SEQ ID NO: 149155 - DNA, 756 bp, Glycine max
  CDS (1)..(756)
atgtccgccgagaaagagagagagacccaggtttacttggccaagcttgccgagcaggccgagagatacgaagaaatggttgagtgtatgaagaaagtagcaaaacttgatcttgatctaactgtggaagaaaaaaacctcatcgtgcacgaaggaccctcttggcgcatcatgtcctcaattgagcagaaggaagagtctaagggaaatgagcacaatgttaaactgatcaagagttactgccaaaaagttgaggaggaactctccaaaatttgtggggacattctgactattatagaccagcatttgattccttcttccgcatcagcagaagctagtgttttctactataagatgaaaggtgattattttcggtatcttgctgagttcaagactgaccaagaaaggaaagaggcagctgaacagtcactgaaaggatacgaggctgcttcagccactgcaaacacagatcttccatcaacacatccaatccgtcttggacttgcactcaatttctctgtcttttattatgagataatgaactctcctgaaagggcctgccatttggctaagcaagcttttgatgaggcaattgcggagttggacaccctgagtgaagagtcatacaaggacagcactttgatcatgcagctgttgagagacaacctgactctctggacctctgatttgcctgaggatggaggtgaggacagcataaaagctgaagaaaccaaaccttctgagcctgagcattga

SEQ ID NO: 149156 - protein, 251 aa, Glycine max
MSAEKERETQVYLAKLAEQAERYEEMVECMKKVAKLDLDLTVEEKNLIVHEGPSWRIMSSIEQKEESKGNEHNVKLIKSYCQKVEEELSKICGDILTIIDQHLIPSSASAEASVFYYKMKGDYFRYLAEFKTDQERKEAAEQSLKGYEAASATANTDLPSTHPIRLGLALNFSVFYYEIMNSPERACHLAKQAFDEAIAELDTLSEESYKDSTLIMQLLRDNLTLWTSDLPEDGGEDSIKAEETKPSEPEH

SEQ ID NO: 149157 - DNA, 792 bp, Glycine max
  CDS (1)..(792)
atggctaccttctccaaggaacgcgagaactttgtatacgttgccaagttagctgaacaagctgaacgctatgatgaaatggtggatgccatgaagaaggtggcgaagctggacgttgagttgagtgtggaagagaggaacctgttctctgttgggtacaagaatgtggtggggtcacggagagcttcatggagaatcttgtcatcgatagagcagaaagaggattccaaagggaatgagttgcatgttaagcatatcagggattacaggaacaaggtggagttggagctgtccaacatttgcagtgacattatgataattttagatgagcatcttattccatccactaatattgcggagtccacagtgttttattataagatgaaaggagactattaccggtatttggcagaatttaaagctggcaatgaaaagaaagaggtggcagatcagtcacttaaagcatatcagacagcttctaccactgctgagagtgaactacaacctacacatcctattcgtttgggtctggctctaaatttctcagtgttttattatgagatattaaattcacctgaaagggcctgccatcttgcaaagcaagcctttgatgatgctgtctcggagctggataccctgaatgaggattcttacaaggacagtaccttgattatgcagctgttgagggataaccttactttatggacttctgatatccccgaagagggtgaggacctaaaaatggaaagcgcagccagggttgatcaaggagaagatgagttaggccgctaa

SEQ ID NO: 149158 - protein, 263 aa, Glycine max
MATFSKERENFVYVAKLAEQAERYDEMVDAMKKVAKLDVELSVEERNLFSVGYKNVVGSRRASWRILSSIEQKEDSKGNELHVKHIRDYRNKVELELSNICSDIMIILDEHLIPSTNIAESTVFYYKMKGDYYRYLAEFKAGNEKKEVADQSLKAYQTASTTAESELQPTHPIRLGLALNFSVFYYEILNSPERACHLAKQAFDDAVSELDTLNEDSYKDSTLIMQLLRDNLTLWTSDIPEEGEDLKMESAARVDQGEDELGR

SEQ ID NO: 149159 - DNA, 786 bp, Glycine max
  CDS (1)..(786)
atggcgagcgctcccactccacgcgaagagttcgtgtacatggcgaagctggcggagcaggccgagcgctacgaggagatggtggagttcatggagaaggtctccgcctccgccgagagcgaggagctgaccgtggaggagcgtaacctcctctccgtcgcctacaagaacgtgatcggcgctcgccgcgcctcctggcgcatcatctcctcaatcgagcagaaggaggagagccgcggcaacgaggaccacgtcgccgtcatccgcgactaccgctccaagatcgaggccgagctctccaacatctgcgacggaatcctcaaactcctcgacacgcgcctcgtcccctccgccgcctccggcgactccaaggtcttctacctcaagatgaagggagactaccacaggtacctcgccgagttcaagaccggcgctgaccgcaaggaggccgccgagagcacgctctccgcctacaaagccgctcaggacattgctaataccgagttgcctccaactcaccctatcaggctgggtcttgctctgaacttctccgtgttttactatgagattcttaactctcctgatcgggcttgcagccttgcaaaacaggcttttgatgaggctattgctgaattggatacattgggagaggagtcatacaaggatagcactttgatcatgcaactgctacgtgataacctcaccctctggacctctgacatgcaggacgatggtgcagatgaaattaaagaagccgcacccaaaggtgacggggaacaaaattaa

SEQ ID NO: 149160 - protein, 261 aa, Glycine max
MASAPTPREEFVYMAKLAEQAERYEEMVEFMEKVSASAESEELTVEERNLLSVAYKNVIGARRASWRIISSIEQKEESRGNEDHVAVIRDYRSKIEAELSNICDGILKLLDTRLVPSAASGDSKVFYLKMKGDYHRYLAEFKTGADRKEAAESTLSAYKAAQDIANTELPPTHPIRLGLALNFSVFYYEILNSPDRACSLAKQAFDEAIAELDTLGEESYKDSTLIMQLLRDNLTLWTSDMQDDGADEIKEAAPKGDGEQN

SEQ ID NO: 149161 - DNA, 780 bp, Glycine max
  CDS (1)..(780)
atgtccgtcgagaaagagagagagacccaggtttacttggccaagcttgccgagcaggccgagagatacgaagaaatggttgagtgtatgaagaaagtagcaaaacttgatcttgatctgactgtggaagaaaggaaccttctctcagtgggatacaaaaatgtgattggtgcacgaagggcctcttggcgcataatgtcctcaattgagcagaaggaagagtctaagggaaatgagcacaatgttaaactgatcaagagttactgccaaaaagttgaggaggaactctccaaaatctgtggtgacattctgactattatagaccagcatttgattccttcttccggatcagcagaagctagcgttttctactacaagatgaaaggtgattattttcggtatcttgctgagttcaagactgaccaagaaaggaaagaggcagctgagcagtcactaaaaggatacgaggctgcttctgccactgcaaacacagatcttccatcaacacatccaatccgtcttggacttgcactcaatttctctgtcttttattatgagataatgaactctcctgaaagggcctgccatttggccaagcaagcttttgatgaggcaattgcggagttggacaccctgagtgaagagtcatacaaggacagcactttgatcatgcagctgttgagagacaaccttactctctggacttccgatttaccagaggatggaggtgaggacaacataaaagctgaagaagccaaaccttctgagcctgagcattga

SEQ ID NO: 149162 - protein, 259 aa, Glycine max
MSVEKERETQVYLAKLAEQAERYEEMVECMKKVAKLDLDLTVEERNLLSVGYKNVIGARRASWRIMSSIEQKEESKGNEHNVKLIKSYCQKVEEELSKICGDILTIIDQHLIPSSGSAEASVFYYKMKGDYFRYLAEFKTDQERKEAAEQSLKGYEAASATANTDLPSTHPIRLGLALNFSVFYYEIMNSPERACHLAKQAFDEAIAELDTLSEESYKDSTLIMQLLRDNLTLWTSDLPEDGGEDNIKAEEAKPSEPEH

SEQ ID NO: 149163 - DNA, 753 bp, Glycine max
  CDS (1)..(753)
atggcaggagcagaggggctaaacagagaacagtacgtgtaccttgcgaagctgtcggagcaggcggagcggtacgaagagatggtggagttcatgcagaaggtggtggtggggtggacgccggcgtcggagctcacggtggaggagcgcaacctcctctcggtggcctacaagaacgtgatcgggtctctgcgtgccgcgtggcgcatcgtgtcctccatcgaacagaaggaggaagggcgcaagaacgacgaccacgtgtccctcgtgaagcactacagatccaaggtcgagaacgagctcacgcaggtctgcgccagcatcctcaacctcctcgactccaacctcgtaccctccgtcttcgccagcgagtccaaggtcttctacttgaagatgaagggcgattaccaccgctatctcgcagagtttaaggttggggatgagagaaaaaccgctgctgaggataccatgttgtcttacaaggctgcccaggacattgcttctggggatcttccccctactcaccccatcagattgggtctcgctctcaacttctccgtcttctactatgaaatcctcaaccagtctgacaaagcgtgtgccatggctaaacaggcttttgaggaagcaattgctgagctggacaccttgggagaagaatcctacaaagacagcacgctcataatgcagcttttaagagacaacctcaccctttggacttctgatgtccaggaccagctagatgagccctga

SEQ ID NO: 149164 - protein, 250 aa, Glycine max
MAGAEGLNREQYVYLAKLSEQAERYEEMVEFMQKVVVGWTPASELTVEERNLLSVAYKNVIGSLRAAWRIVSSIEQKEEGRKNDDHVSLVKHYRSKVENELTQVCASILNLLDSNLVPSVFASESKVFYLKMKGDYHRYLAEFKVGDERKTAAEDTMLSYKAAQDIASGDLPPTHPIRLGLALNFSVFYYEILNQSDKACAMAKQAFEEAIAELDTLGEESYKDSTLIMQLLRDNLTLWTSDVQDQLDEP

SEQ ID NO: 149165 - DNA, 786 bp, Glycine max
  CDS (1)..(786)
atgactgcctccaaggatcgcgagaacttcgtctacatcgccaaactcgccgagcaggccgagcgttacgaagagatggtggaatcaatgaagaacgttgcgaatctcgacgttgaactgacggtggaggagcggaatttgctttctgttgggtacaagaatgtgattggtgctcgcagagcgtcctggaggatcctgtcttccattgagcagaaggaagaaacaaaagggaacgagttgaatgcgaagcggattaaggagtacaggcagaaggttgaattggagctttcaaacatctgtaatgatgttatgacagtgattgatgagcaccttatcccttcggctgcagctggtgaatccactgtgttttactataagatgaaaggagattattatcgttatcttgccgaatttaaggcaggcaatgagaagaaggaagctgctgatcagtctatgaaagcatatgagtctgctaccactgcagcagaggctgatttacctccaacacatcccatccgattgggtctagctttaaatttctcagttttctattacgagatcttgaactctccagaaagagcctgtcatcttgcaaaacaagcttttgatgaagctatttctgagcttgacaccttgaatgaggagtcatacaaagatagcaccttaatcatgcaacttctcagggacaacctaactttgtggacttctgacatcccagaagatggagaagatgcccagaaagtgaatggcactgccaagcttggtggaggtgaggatgcagagtga

SEQ ID NO: 149166 - protein, 261 aa, Glycine max
MTASKDRENFVYIAKLAEQAERYEEMVESMKNVANLDVELTVEERNLLSVGYKNVIGARRASWRILSSIEQKEETKGNELNAKRIKEYRQKVELELSNICNDVMTVIDEHLIPSAAAGESTVFYYKMKGDYYRYLAEFKAGNEKKEAADQSMKAYESATTAAEADLPPTHPIRLGLALNFSVFYYEILNSPERACHLAKQAFDEAISELDTLNEESYKDSTLIMQLLRDNLTLWTSDIPEDGEDAQKVNGTAKLGGGEDAE

SEQ ID NO: 149167 - DNA, 777 bp, Glycine max
  CDS (1)..(777)
atggcctccaccaaggaacgtgaaaacttcgtctacgtcgccaagctcgccgaacaagccgaacgctatgaagaaatggtggaagcaatgaagaatgtggcgaagctaaacgtggaattgacggtagaggagcggaaccttctgtcggttgggtacaagaacgtggtgggtgctcgtagggcttcgtggaggattctttcctcgattgaacagaaagaagaagctaaagggaacgatgtgagcgtgaagaggataaaggagtataggctgaaggtggagtctgagttgtccaatatctgcagtgatatcatgactgttattgatgaataccttattccctctagctcatctggtgaacctagtgtctttttctacaaaatgaagggggactattaccggtacctcgcagagttcaagtccggtgatgagagaaaagaggctgctgatcattccatgaaagcgtatcagttggcttccactactgccgaggctgagttagcatccacacatcccatccgtttgggcctggctttgaacttctctgtcttttattatgaaattttgaactctcctgaaagggcctgtcaccttgctaagcaggcatttgatgaagcaatctctgagttggatactctgagcgaggagtcttacaaagacagcaccctaattatgcagcttctgagggacaatctcaccctgtggacttctgacatccctgaagatggagaggaacaaaaggtggattctgcccgagctgctggaggtgacgatgcatag

SEQ ID NO: 149168 - protein, 258 aa, Glycine max
MASTKERENFVYVAKLAEQAERYEEMVEAMKNVAKLNVELTVEERNLLSVGYKNVVGARRASWRILSSIEQKEEAKGNDVSVKRIKEYRLKVESELSNICSDIMTVIDEYLIPSSSSGEPSVFFYKMKGDYYRYLAEFKSGDERKEAADHSMKAYQLASTTAEAELASTHPIRLGLALNFSVFYYEILNSPERACHLAKQAFDEAISELDTLSEESYKDSTLIMQLLRDNLTLWTSDIPEDGEEQKVDSARAAGGDDA

SEQ ID NO: 149169 - DNA, 780 bp, Glycine max
  CDS (1)..(780)
atggcctccaccaaggaacgcgaaaactttgtctacaccgccaagctcgccgaacaagccgaacgctatgaagaaatggtggaagcaatgaagaatgtggcgaagctgaacgtggaattgacggtcgaggagcggaaccttctgtcggtagggtacaagaacgtggtgggtgctcgtagggcttcgtggaggattctatcgtcgattgaacagaaagaagaagctaaagggaacgatgtgagtgtgaagaggataaaggagtataggcagaaggtggagtctgagttgtccaatatctgcagtgatatcatgactgttattgatgaacaccttattccctctagctctgctggtgaacctagtgtctttttctacaaaatgaagggggactattaccggtacctcgcggagttcaagtccggtgatgagagaaaagaggctgctgatcattccatgaaggcgtatcagtcggcttccactactgcagaggctgagttaccacccacacatcccatccgtttgggcctggctttgaacttctctgtcttttattatgaaattttgaactctcctgaaagggcctgtcaccttgctaagcaggcatttgatgaagccatctctgagttggatactctgagcgaggagtcttacaaagacagcaccctaattatgcagcttctgagggacaatctcaccctgtggacttctgacatccctgaagaaggagctgaggaacaaaaggtggattctgccagagctgctggaggtgacaatgcatag

SEQ ID NO: 149170 - protein, 259 aa, Glycine max
MASTKERENFVYTAKLAEQAERYEEMVEAMKNVAKLNVELTVEERNLLSVGYKNVVGARRASWRILSSIEQKEEAKGNDVSVKRIKEYRQKVESELSNICSDIMTVIDEHLIPSSSAGEPSVFFYKMKGDYYRYLAEFKSGDERKEAADHSMKAYQSASTTAEAELPPTHPIRLGLALNFSVFYYEILNSPERACHLAKQAFDEAISELDTLSEESYKDSTLIMQLLRDNLTLWTSDIPEEGAEEQKVDSARAAGGDNA

SEQ ID NO: 149171 - DNA, 777 bp, Glycine max
  CDS (1)..(777)
atggcctccaccaaggaacgtgaaaacttcgtctacgtcgccaagctcgccgaacaagccgaacgctatgaagaaatggtggaagcaatgaagaatgtggcgaacctaaacgtggaattgacggtagaggagcggaaccttctgtcggttgggtacaagaacgtggtgggtgctcgtagggcttcgtggaggattctttcctcgattgaacagaaagaagaagctaaagggaacgatgtgagcgtgaagaggataaaggagtataggctgaaggtggagtctgagttgtccaatatctgcagtgatatcatgactgttattgatgaataccttattccctctagctcatctggtgaacctagtgtctttttctacaaaatgaagggggactattaccggtacctcgcagagttcaagtccggtgatgagagaaaagaggctgctgatcattccatgaaagcgtatcagttggcttccactactgccgaggctgagttagcatccacacatcccatccgtttgggcctggctttgaacttctctgtcttttattatgaaattttgaactctcctgaaagggcctgtcaccttgctaagcaggcatttgatgaagcaatctctgagttggatactctgagcgaggagtcttacaaagacagcaccctaattatgcagcttctgagggacaatctcaccctgtggacttctgacatccctgaagatggagaggaacaaaaggtggattctgcccgagctgctggaggtgacgatgcatag

SEQ ID NO: 149172 - protein, 258 aa, Glycine max
MASTKERENFVYVAKLAEQAERYEEMVEAMKNVANLNVELTVEERNLLSVGYKNVVGARRASWRILSSIEQKEEAKGNDVSVKRIKEYRLKVESELSNICSDIMTVIDEYLIPSSSSGEPSVFFYKMKGDYYRYLAEFKSGDERKEAADHSMKAYQLASTTAEAELASTHPIRLGLALNFSVFYYEILNSPERACHLAKQAFDEAISELDTLSEESYKDSTLIMQLLRDNLTLWTSDIPEDGEEQKVDSARAAGGDDA

SEQ ID NO: 149173 - DNA, 774 bp, Glycine max
  CDS (1)..(774)
atgtcggattcttctcgggaggagaatgtttacatggcgaaattggcggagcaggccgagcgttacgaggagatggttgagttcatggagaaggtagcaaagactgtggaggttgaggagttgacggtggaggagagaaatcttctctctgtggcttacaagaacgtgattggtgcgaggagggcttcgtggaggatcatatcctccattgagcagaaggaggagagcaggggcaatgaggaccatgtggccattataaaggagtacaggggcaaaattgaggctgaactcagcaagatctgtgacgggattttgaacctccttgagtccaacctcatcccatccgccgcatctcccgagagtaaagtgttttaccttaaaatgaagggtgattaccacaggtaccttgccgagttcaagactggggcagagaggaaagaggcagcagagagtactttgcttgcttacaaatctgctcaggatattgctcttgctgacttggcccccactcaccccattaggctgggacttgctctcaacttttctgtcttctattatgaaatccttaactcgccagatcgggcttgtaatcttgccaaacaggcatttgatgaggcaatttccgagcttgacacattgggtgaagagtcatacaaggatagtacgttgatcatgcaacttctccgtgacaatctgactttgtggacatcagacatcacggacgatgctggagatgagatcaaggaaacatctaagcaacaaccaggtgaatag

SEQ ID NO: 149174 - protein, 257 aa, Glycine max
MSDSSREENVYMAKLAEQAERYEEMVEFMEKVAKTVEVEELTVEERNLLSVAYKNVIGARRASWRIISSIEQKEESRGNEDHVAIIKEYRGKIEAELSKICDGILNLLESNLIPSAASPESKVFYLKMKGDYHRYLAEFKTGAERKEAAESTLLAYKSAQDIALADLAPTHPIRLGLALNFSVFYYEILNSPDRACNLAKQAFDEAISELDTLGEESYKDSTLIMQLLRDNLTLWTSDITDDAGDEIKETSKQQPGE

SEQ ID NO: 149175 - DNA, 762 bp, Brassica napus
  CDS (1)..(762)
atggagactgagagggaaaagcatgtttacttggccaagctctctgagcaaaccgagcgatacgatgagatggttgaggcgatgaagaaagtagctcagcttgatgtggagctcacggtagaggagaggaaccttgtgtctgtgggttacaagaacgtgattggggcaaggagagcttcgtggagaatactatcatccatcgagcagaaggaagagtccaaggggaacgaggagaatgtcaagaggattcagaactatcgaaagaaagttgaagacgagcttgctaaagtttgtaatgacatcttgtctgtcatcgataaacatctcattccgtcgtctactgctgtggagtccactgtgtttttctacaaaatgaaaggagattattatcgatatctggcagagttcagttctggtgctgaacgcaaggaagccgcagatcagtctcttgaggcatataaggctgctgttgctgctgcggagactggattggcaccaacacatccagttagactcggcttggcgttgaacttttctgttttctactatgagatcttaaactctcctgaaagcgcatgtcaattggctaagcaagcattcgacgatgcaatagctgaacttgacagcctgaacgaggaatcatacaaggacagcactcttatcatgcagctactcagagacaatctcaccttgtggacttcagacctcccagaggaaggagacgagcgagccaaaggtgatgagcctcaggaagagaactga

SEQ ID NO: 149176 - protein, 253 aa, Brassica napus
METEREKHVYLAKLSEQTERYDEMVEAMKKVAQLDVELTVEERNLVSVGYKNVIGARRASWRILSSIEQKEESKGNEENVKRIQNYRKKVEDELAKVCNDILSVIDKHLIPSSTAVESTVFFYKMKGDYYRYLAEFSSGAERKEAADQSLEAYKAAVAAAETGLAPTHPVRLGLALNFSVFYYEILNSPESACQLAKQAFDDAIAELDSLNEESYKDSTLIMQLLRDNLTLWTSDLPEEGDERAKGDEPQEEN

SEQ ID NO: 149177 - DNA, 786 bp, Brassica napus
  CDS (1)..(786)
atgtcgtctcctcgtgaagagaatgtgtacttggccaagttagccgagcaagccgagcgttacgaggagatggtcgagttcatggagaaagtcgccaagaccgttgactccgaggagctcaccgtggaagagaggaacctcttgtccgttgcttacaagaacgtgattggtgctaggagagcttcctggaggatcatctcttcgattgagcagaaggaagagagcagagggaacgaggatcacgttgctattatcaaggactacagaggaaagatcgagacagagctaagcaagatctgcgatgggattttgaatcttttggattctcatcttgttcccgctgcgtctttggctgagtctaaggtcttttatctgaagatgaagggggattaccataggtaccttgctgagtttaagactggtgctgagaggaaagatgctgctgagaacactctcgtggcttacaagtcagctcaggatattgcacttgctgatttgcctccgactcatccgattagattggggcttgcacttaacttctctgtcttctactatgagattctcaactcgcctgaccgcgcttgcaatctcgccaaacaggcttttgatgaagcgatatctgagctggacacattaggagaagaatcatacaaggacagcacactgatcatgcaacttctccgtgacaatctgaccctctggacttctgacatcaatgatgaggcgggtggtgatgagatcaaggaggcgtcaaaagacgagcctgaagaagggaaacaagcgtag

SEQ ID NO: 149178 - protein, 261 aa, Brassica napus
MSSPREENVYLAKLAEQAERYEEMVEFMEKVAKTVDSEELTVEERNLLSVAYKNVIGARRASWRIISSIEQKEESRGNEDHVAIIKDYRGKIETELSKICDGILNLLDSHLVPAASLAESKVFYLKMKGDYHRYLAEFKTGAERKDAAENTLVAYKSAQDIALADLPPTHPIRLGLALNFSVFYYEILNSPDRACNLAKQAFDEAISELDTLGEESYKDSTLIMQLLRDNLTLWTSDINDEAGGDEIKEASKDEPEEGKQA

SEQ ID NO: 149179 - DNA, 747 bp, Zea mays
  CDS (1)..(747)
atggaggagcgggagaagctcgtgtgcctggccaagcttgccgagcaggcggagcggtacgacgatatggtggaattcatgaagaatcttgctaggatggacgtggatatgagtgctgaagaaaggcatttgttctcagttggtttcaagaacactattggagcaaagagagcatcatggagaatcatttgttcacatgagcaaaaggtcgcagctgatcgtcagactggtgtgatgatagatgcctataagaagaaagtagaagaggaactaaggaaggtttgcaatgaagtattgtcagtcattgctattcactgccttcccttggccagtacgggtgaaaatatcgtattcttttataagatgaaaggtgactactaccgttacttggctgaatttagcactggaactgaaaagaaagctgcctctgatcagtcacttatggcctatcagcatgccatggttgtcgcctccagtgagctctcacctgctcaccaaatccggcttggccttgccctcaatttgtcggtcttcttttatgagataatgaactctcatgagagagcttgccaagtggcaaaacaagcatttgatgaggctcttactgagataaattctggtgagggagtttacaaggatagcacacttatgatgcagcttctgaaggacaacttagcattgtggacatcagaactaactggaggtgaagcatccaagggtaacgacgatgtcgacatggagggttga

SEQ ID NO: 149180 - protein, 248 aa, Zea mays
MEEREKLVCLAKLAEQAERYDDMVEFMKNLARMDVDMSAEERHLFSVGFKNTIGAKRASWRIICSHEQKVAADRQTGVMIDAYKKKVEEELRKVCNEVLSVIAIHCLPLASTGENIVFFYKMKGDYYRYLAEFSTGTEKKAASDQSLMAYQHAMVVASSELSPAHQIRLGLALNLSVFFYEIMNSHERACQVAKQAFDEALTEINSGEGVYKDSTLMMQLLKDNLALWTSELTGGEASKGNDDVDMEG

SEQ ID NO: 149181 - DNA, 771 bp, Zea mays
  CDS (1)..(771)
atgtcgagggaggagaatgtttacatggccaagttggctgagcaggctgaaaggtatgaggagatggttgagtatatggagaaggtggctaagactgtagatgtggaagagctcactgttgaggagcgtaaccttctgtctgttgcatacaagaatgtgattggggctcgccgcgcttcatggcgcattgtttcttccattgaacaaaaggaggagtcccgtaagaacgaggagcatgtgaatcttatcaaggaatatcgtggcaagatcgaggctgaactgagcaatatctgtgatggcatcttgaagctgcttgactcccacctagtgccttcttctactgctgctgaatcaaaggtcttctacctcaagatgaagggtgactatcacaggtatcttgcggaatttaagactggtgctgagaggaaggaatttgctgagagcacaatggtggcctataaggctgctcaggacattgctctggctgagctggcacctacccatccgataaggctgggacttgctcttaatttttcagtgttttattatgagattttgaactccccagacaaagcttgcaacctggcaaagcaggcgtttgatgaagctatttttgagttagacagccttggtgaggagtcatacaaggatagcactctgatcatgcaactcctgagggataacttgaccctttggacatccgacctcacggaggatggtgctgatgagggcaaagatgccccgaaaggtgatgcaggcgagggacagtaa

SEQ ID NO: 149182 - protein, 256 aa, Zea mays
MSREENVYMAKLAEQAERYEEMVEYMEKVAKTVDVEELTVEERNLLSVAYKNVIGARRASWRIVSSIEQKEESRKNEEHVNLIKEYRGKIEAELSNICDGILKLLDSHLVPSSTAAESKVFYLKMKGDYHRYLAEFKTGAERKEFAESTMVAYKAAQDIALAELAPTHPIRLGLALNFSVFYYEILNSPDKACNLAKQAFDEAIFELDSLGEESYKDSTLIMQLLRDNLTLWTSDLTEDGADEGKDAPKGDAGEGQ

SEQ ID NO: 149183 - DNA, 780 bp, Zea mays
  CDS (1)..(780)
atggccgccgccgccgccgccgccggcacccgggaggagatggtctacatggccaagctagcggagcaggcggagcggtacgaggagatggtcgagttcatggagaaggtcgcggccgccgcagagctcaccgtcgaggagcgcaacctgctctccgtcgcctacaagaacgtcatcggcgcgcgccgcgcctcctggcgcatcgtctcctccatcgagcacaaggaggagacgcggggcgcggcggggcacgccgccgccgccagggggtaccgcgcgcgcgtcgaggccgagctctccgggatctgcgcggggatcctgcgcctcctcgacgagcgcctcgtgccggcggcggcggccgtggacgccagggtcttctacctcaagatgaagggggactaccaccgctacctcgccgagttcaagaccggcgccgagcgcaaggacgccgcggactccacgctcgccgcctaccaggccgcgcaggacatcgccgtcaaggagctgccgcccacgcatcccatcaggctcggcctcgccctcaacttctccgtcttctactacgagatcctcagctcgccggaccgcgcctgctcgctggccaagcaggccttcgacgaagctatttcagagctggatagtcttggggaagagtcgtacaaggatagcacactcatcatgcagcttcttcgtgacaacctcaccttgtggacttctgacatgcaggaggatggtggcgatgaaatgcgggatgcaaacaagcctgacgaggagcagtag

SEQ ID NO: 149184 - protein, 259 aa, Zea mays
MAAAAAAAGTREEMVYMAKLAEQAERYEEMVEFMEKVAAAAELTVEERNLLSVAYKNVIGARRASWRIVSSIEHKEETRGAAGHAAAARGYRARVEAELSGICAGILRLLDERLVPAAAAVDARVFYLKMKGDYHRYLAEFKTGAERKDAADSTLAAYQAAQDIAVKELPPTHPIRLGLALNFSVFYYEILSSPDRACSLAKQAFDEAISELDSLGEESYKDSTLIMQLLRDNLTLWTSDMQEDGGDEMRDANKPDEEQ

SEQ ID NO: 149185 - DNA, 747 bp, Zea mays
  CDS (1)..(747)
atggaggagcgggagaagctcgtgtgcctggccaagcttgccgagcaggcggagcggtacgacgatatggtggaattcatgaagaatcttgctaggatggacgtggatatgagtgctgaagaaaggcatttgttctcagttggtttcaagaacactattggagcaaagagagcatcatggagaatcatttgttcacatgagcaaaaggtcgcagctgatcgtcagactggtgtgatgatagatgcctataagaagaaagtagaagaggaactaaggaaggtttgcaatgaagtattgtcagtcattgctattcactgccttcccttggccagtacgggtgaaaatatcgtattcttttataagatgaaaggtgactactaccgttacttggctgaatttagcactggaactgaaaagaaagctgcctctgatcagtcacttatggcctatcagcatgccatggttgtcgcctccagtgagctctcacctgctcaccaaatccggcttggccttgccctcaatttgtcggtcttcttttatgagataatgaactctcatgagagagcttgccaagtggcaaaacaagcatttgatgaggctcttactgagataaattctggtgagggaggttacaaggatagcacacttatgatgcagcttctgaaggacaacttagcattgtggacatcagaactaactggaggtgaagcatccaagggtaacgacgatgtcgacatggagggttga

SEQ ID NO: 149186 - protein, 248 aa, Zea mays
MEEREKLVCLAKLAEQAERYDDMVEFMKNLARMDVDMSAEERHLFSVGFKNTIGAKRASWRIICSHEQKVAADRQTGVMIDAYKKKVEEELRKVCNEVLSVIAIHCLPLASTGENIVFFYKMKGDYYRYLAEFSTGTEKKAASDQSLMAYQHAMVVASSELSPAHQIRLGLALNLSVFFYEIMNSHERACQVAKQAFDEALTEINSGEGGYKDSTLMMQLLKDNLALWTSELTGGEASKGNDDVDMEG

SEQ ID NO: 149187 - DNA, 807 bp, Zea mays
  CDS (1)..(807)
atgtcgccgtcggagccgacgcgggaggagagcgtgtacatggccaagcttgcggagcaggcggagcggtacgaggagatggtcgagttcatggagcgcgtcgcgcgctacgccgggggcgccggcggcggggacgagctctcggtggaggagcgcaacctgctgtccgtcgcctacaagaacgtcatcggcgcccgcagggcctcgtggcggatcatctcctccatcgagcagaaggaggaaggccgcgggaacgaggcgcacgccgcatccatccgcgcctaccgctccaagatcgaggccgagcttgcccgcatctgcgacggcatcctcgcgctcctcgactcccacctcgtcccatccgccggcggcgccgagtccaaggtcttctacctcaagatgaagggtgactaccacaggtaccttgctgagttcaagtcaggtgcagagaggaaggatgctgcggagagcaccatgaatgcctacaaagctgctcaggatattgctcttgctgatctggctccaacccaccccatcaggctcgggcttgctctcaacttctcagtgttctactacgagatcctcaactcccctgaccgtgcttgcaaccttgcaaagcaggcctttgatgaggcaatctccgagctagacagcctgggagaggagtcctacaaggacagcactctgatcatgcagctcctgcgtgacaacttgaccctatggacttccgacaccaacgaggacggcggggatgagatcaaggaagcagctgctgcccccaaagaatccgcccccgagggccagtaa

SEQ ID NO: 149188 - protein, 268 aa, Zea mays
MSPSEPTREESVYMAKLAEQAERYEEMVEFMERVARYAGGAGGGDELSVEERNLLSVAYKNVIGARRASWRIISSIEQKEEGRGNEAHAASIRAYRSKIEAELARICDGILALLDSHLVPSAGGAESKVFYLKMKGDYHRYLAEFKSGAERKDAAESTMNAYKAAQDIALADLAPTHPIRLGLALNFSVFYYEILNSPDRACNLAKQAFDEAISELDSLGEESYKDSTLIMQLLRDNLTLWTSDTNEDGGDEIKEAAAAPKESAPEGQ

SEQ ID NO: 149189 - DNA, 774 bp, Zea mays
  CDS (1)..(774)
atgtcgcgggaggataatgtttacatggccaagctggctgagcaagcagaacggtacgaggaaatggttgagtacatggagaaggtggctaagaccgtagatgtggaagagctcaccgttgaggagcggaacctcttatctgttgcctacaagaacgtaattggggcccgccgtgcctcatggcgcattatctcctccatcgagcataaggaggagtcccgtaagaatgaggaacatgttattcagatcaaggagtaccgtggcaagattgaggctgaattgagcaacatttgtgatggtatcctgaagttgatcgactctcaccttgtgccttcctccactgctgcagagtcgaaggtgttttacctcaagatgaagggagattatcacaggtaccttgctgagtttaagactggtgctgagaggaaggaagctgcagagagtacaatgatagcttataaggcagctcaggatattgcgttggcggaactggcatctactcatcccataagacttggacttgcacttaacttctcagttttctattacgagattctgaactctccagacaaagcttgcaaccttgccaggcaggcgtttgatgaggctatttctcagttggatacgcttggcgaggattcatacaaagatagcaccttgatcatgcagctcctgagggacaacctaaccctatggaccgctgacagcacaacggaggacggcatcgaggagggcaatgaggcctcgaagggtgatgctggtgagggtcagtag

SEQ ID NO: 149190 - protein, 257 aa, Zea mays
MSREDNVYMAKLAEQAERYEEMVEYMEKVAKTVDVEELTVEERNLLSVAYKNVIGARRASWRIISSIEHKEESRKNEEHVIQIKEYRGKIEAELSNICDGILKLIDSHLVPSSTAAESKVFYLKMKGDYHRYLAEFKTGAERKEAAESTMIAYKAAQDIALAELASTHPIRLGLALNFSVFYYEILNSPDKACNLARQAFDEAISQLDTLGEDSYKDSTLIMQLLRDNLTLWTADSTTEDGIEEGNEASKGDAGEGQ

SEQ ID NO: 149191 - DNA, 786 bp, Zea mays
  CDS (1)..(786)
atggcatcagcagagctttcccgtgaggaaaatgtgtacatggcgaagctcgctgagcaggcggagaggtacgaggagatggttgagttcatggagaaggtagccaagactgttgactcggaggagctcactgtggaggagcgaaacctcttgtctgttgcatacaagaacgtcattggagcccgccgcgcctcatggcgcatcatctcctccatcgagcagaaggaggagggccgaggcaatgaggaccgagtaacactcatcaaggattatcgtggcaagattgagactgagctgaccaagatctgtgatggcatcctcaagctgcttgagacccatcttgtgccgtcttccactgcccccgagtccaaggtcttctatctcaagatgaagggtgattactacagataccttgctgagttcaagactggagctgagagaaaggacgccgctgagaacacgatggtggcatacaaggctgcccaggacattgctctggctgagcttgctccaactcaccctattaggcttggactggcacttaacttctcagtgttctactatgagattctgaactcacctgatcgcgcctgcagtcttgcaaagcaggcttttgacgaggccatctcggaactggacaccctgagcgaggagtcctacaaggacagcactttgatcatgcagctccttcgtgataacttgaccctatggacctctgacatctcggaggaccctgctgaagagattagggaggcgcccaagcgggactcgagtgaggggcagtaa

SEQ ID NO: 149192 - protein, 261 aa, Zea mays
MASAELSREENVYMAKLAEQAERYEEMVEFMEKVAKTVDSEELTVEERNLLSVAYKNVIGARRASWRIISSIEQKEEGRGNEDRVTLIKDYRGKIETELTKICDGILKLLETHLVPSSTAPESKVFYLKMKGDYYRYLAEFKTGAERKDAAENTMVAYKAAQDIALAELAPTHPIRLGLALNFSVFYYEILNSPDRACSLAKQAFDEAISELDTLSEESYKDSTLIMQLLRDNLTLWTSDISEDPAEEIREAPKRDSSEGQ

SEQ ID NO: 149193 - DNA, 771 bp, Zea mays
  CDS (1)..(771)
atgtcgagggaggagaatgtttacatggccaagttggctgagcaggctgaaaggtatgaggagatggttgagtatatggagaaggtggctaagactgtagatgtggaagagctcactgttgaggagcgtaaccttctgtctgttgcatacaagaatgtgattggggctcgccgcgcttcatggcgcattgtttcttccattgaacaaaaggaggagtcccgtaagaacgaagagcatgtgaaccttatcaaggaatatcgtggcaagatcgaggctgaactgagcaatatctgtgatggaatcttgaagctgcttgactcccacctagtgccttcttctactgctgctgaatcaaaggtcttctacctcaagatgaagggtgactatcacaggtatcttgcggaatttaagactggtgctgagaggaaggaatctgctgagagcacaatggtggcctataaggctgctcaggacattgctctggctgagctggcacctacccacccgataaggctgggacttgctcttaatttttcagtgttctattatgagattctgaactccccagacaaagcttgcaacctggcaaagcaggcgtttgatgaagctatctctgagttagacagccttggtgaggagtcatacaaggatagcactctgatcatgcaactcctgagggataacttgaccctttggacatccgacctcacggaggatggtgctgatgagggcaaagatgccccgaaaggtgatgcaggcgagggacagtaa

SEQ ID NO: 149194 - protein, 256 aa, Zea mays
MSREENVYMAKLAEQAERYEEMVEYMEKVAKTVDVEELTVEERNLLSVAYKNVIGARRASWRIVSSIEQKEESRKNEEHVNLIKEYRGKIEAELSNICDGILKLLDSHLVPSSTAAESKVFYLKMKGDYHRYLAEFKTGAERKESAESTMVAYKAAQDIALAELAPTHPIRLGLALNFSVFYYEILNSPDKACNLAKQAFDEAISELDSLGEESYKDSTLIMQLLRDNLTLWTSDLTEDGADEGKDAPKGDAGEGQ

SEQ ID NO: 149195 - DNA, 771 bp, Zea mays
  CDS (1)..(771)
atggcgagggaggagaatgtctacatggccaagctggctgagcaggccgaaaggtatgaagagatggttgagtatatggagaaggtggctaagactgtagatgtggaagagctcactgttgaggagcgtaacctcttgtcggtcgcatacaagaatgtgattggggctcgccgtgcttcatggcgcattgtctcttctattgaacagaaggaggagtcccgtaagaacgaagagcatgtgaaccttatcaaggaataccgtgcgaagatcgaggctgaactgagcaatatctgtgatggcatcctgaagctgcttgactcccacctagtgccttcttctactgctgctgaatcaaaggtcttctacctcaagatgaagggtgactatcacaggtatcttgcggaatttaagactggtcctgagaggaaggaatctgctgagagcacgatgatggcctacaaggctgctcaggacattgcgctggctgagctggcacctacccatccgataaggcttgggcttgctcttaacttctcagtgttctattatgagattctgaactccccagacaaagcttgcaaccttgcaaagcaggcgtttgatgaagctatctcccagttagacacccttggggaggagtcatacaaagatagcactctgatcatgcagctcctgagggacaacttgaccctttggacctctgacctcacggaggatggtgctgatgagggcaaagaagccccgaaaggtgaggctggtgacggacagtaa

SEQ ID NO: 149196 - protein, 256 aa, Zea mays
MAREENVYMAKLAEQAERYEEMVEYMEKVAKTVDVEELTVEERNLLSVAYKNVIGARRASWRIVSSIEQKEESRKNEEHVNLIKEYRAKIEAELSNICDGILKLLDSHLVPSSTAAESKVFYLKMKGDYHRYLAEFKTGPERKESAESTMMAYKAAQDIALAELAPTHPIRLGLALNFSVFYYEILNSPDKACNLAKQAFDEAISQLDTLGEESYKDSTLIMQLLRDNLTLWTSDLTEDGADEGKEAPKGEAGDGQ

SEQ ID NO: 149197 - DNA, 801 bp, Zea mays
  CDS (1)..(801)
atgtcgccgtcggagccgacgcgggaggagagcgtgtacatggccaagctggcagagcaggcggagcggtacgaggagatggtcgagttcatggagcgcgtcgcgcgctccgccggcggcgccggcggaggggaggagctatccgtggaggagcgcaacctgctgtccgtcgcctacaagaacgtcatcggcgcccgcagggcctcgtggcggatcatctcctccatcgagcagaaggaggagggccgcgggaacgaggcgcacgccgcctccatccgcgcctaccgctccaagatcgagaccgagctcgcccgcatctgcgatggcatcctcgccctgctcgactcccacctcgtcccatccgccggcggcgccgagtccaaggtcttctacctcaagatgaagggtgactaccacaggtaccttgctgagttcaagtctggtgcagagaggaaggatgctgcggagagcaccatgaatgcctacaaagctgctcaggacattgctcttgcagatctggctccaacccaccccatcaggcttggcctcgctctcaacttctcagtgttctactacgagatcctgaactcccctgatcgcgcctgcaaccttgcaaaacaggccttcgatgaggcgatctctgagctagacagcctgggagaggagtcctacaaggacagcactctgatcatgcagctcctgcgcgacaacttgaccctatggacttccgacaccaacgaggatggcggcgacgagatcaaggatgctgctgccccgaaagaatccgcggagggtcagtaa

SEQ ID NO: 149198 - protein, 266 aa, Zea mays
MSPSEPTREESVYMAKLAEQAERYEEMVEFMERVARSAGGAGGGEELSVEERNLLSVAYKNVIGARRASWRIISSIEQKEEGRGNEAHAASIRAYRSKIETELARICDGILALLDSHLVPSAGGAESKVFYLKMKGDYHRYLAEFKSGAERKDAAESTMNAYKAAQDIALADLAPTHPIRLGLALNFSVFYYEILNSPDRACNLAKQAFDEAISELDSLGEESYKDSTLIMQLLRDNLTLWTSDTNEDGGDEIKDAAAPKESAEGQ

SEQ ID NO: 149199 - DNA, 786 bp, Zea mays
  CDS (1)..(786)
atggcatcagcagagctttcccgtgaggaaaatgtgtacatggcgaagctcgccgagcaggcagagaggtacgaggaaatggttgagttcatggagaaggtagcgaaaactgttgactcggaggagctcactgtggaggagcgcaacctcctgtctgttgcatacaagaacgtcattggagcccgccgtgcctcatggcgcatcatctcctccatcgagcagaaggaggagggtcgaggcaatgaggaccgtgtaacactcatcaaggactaccgtggcaagattgaaactgagctcaccaagatctgtgatggcatcctcaagcttctcgaatctcaccttgtgccgtcttccaccgctcccgagtccaaggtcttctatctcaagatgaagggtgactactacagataccttgctgagttcaagactggagctgagagaaaggacgctgctgagaacaccatggtggcatacaaggctgcccaggacattgctttggctgagcttgctccaactcaccctattaggcttggactggcactcaacttctcagtgttctactatgagattctcaactcacccgatcgcgcctgcagtcttgcaaagcaggcttttgacgaggccatctcggaactggacaccctgagcgaggagtcctacaaggacagcactttgatcatgcagctccttcgtgataacttgaccctatggacttctgacatctcggaggaccctgcggaagagatcagggaggcgcccaagcacgactcgagcgaggggcagtaa

SEQ ID NO: 149200 - protein, 261 aa, Zea mays
MASAELSREENVYMAKLAEQAERYEEMVEFMEKVAKTVDSEELTVEERNLLSVAYKNVIGARRASWRIISSIEQKEEGRGNEDRVTLIKDYRGKIETELTKICDGILKLLESHLVPSSTAPESKVFYLKMKGDYYRYLAEFKTGAERKDAAENTMVAYKAAQDIALAELAPTHPIRLGLALNFSVFYYEILNSPDRACSLAKQAFDEAISELDTLSEESYKDSTLIMQLLRDNLTLWTSDISEDPAEEIREAPKHDSSEGQ

SEQ ID NO: 149201 - DNA, 807 bp, Zea mays
  CDS (1)..(807)
atgtcgccgtcggagccgacgcgggaggagagcgtgtacatggccaagcttgcggagcaggcggagcggtacgaggagatggtcgagttcatggagcgcgtcgcgcgctacgccgggggcgccggcggcggggacgagctctcggtggaggagcgcaacctgctgtccgtcgcctacaagaacgtcatcggcgcccgcagggcctcgtggcggatcatctcctccatcgagcagaaggaggaaggccgcgggaacgaggcgcacgccgcatccatccgcgcctaccgctccaagatcgaggccgagcttgcccgcatctgcgacggcatcctcgcgctcctcgactcccacctcgtcccatccgccggcggcgccgagtccaaggtcttctacctcaagatgaagggtgactaccacaggtaccttgctgagttcaagtcaggtgcagagaggaaggatgctgcggagagcaccatgaatgcctacaaagctgctcaggatattgctcttgctgatctggccccaacccaccccatcaggctcgggcttgctctcaacttctcagtgttctactacgagatcctcaactcccctgaccgtgcttgcaaccttgcaaagcaggcctttgatgaggcaatctccgaactagacagcctgggagaggagtcctacaaggacagcactctgatcatgcagctcctgcgtgacaacttgaccctatggacttccgacaccaacgaggacgccggagatgagatcaaggaagcagctgctgcccccaaagaatccgcccccgagggccagtaa

SEQ ID NO: 149202 - protein, 268 aa, Zea mays
MSPSEPTREESVYMAKLAEQAERYEEMVEFMERVARYAGGAGGGDELSVEERNLLSVAYKNVIGARRASWRIISSIEQKEEGRGNEAHAASIRAYRSKIEAELARICDGILALLDSHLVPSAGGAESKVFYLKMKGDYHRYLAEFKSGAERKDAAESTMNAYKAAQDIALADLAPTHPIRLGLALNFSVFYYEILNSPDRACNLAKQAFDEAISELDSLGEESYKDSTLIMQLLRDNLTLWTSDTNEDAGDEIKEAAAAPKESAPEGQ

SEQ ID NO: 149203 - DNA, 837 bp, Zea mays
  CDS (1)..(837)
atgtatatttgcagatccggcgtactgcaaattttgaaactgaactgtaagatggcatcagcagagctttcccgtgaggaaaatgtgtacatggcgaagctcgccgagcaggcagagaggtacgaggaaatggttgagttcatggagaaggtagcgaaaactgttgactcggaggagctcactgtggaggagcgcaacctcctgtctgttgcatacaagaacgtcattggagcccgccgcgcctcatggcgcatcatctcctccatcgagcagaaggaggagggtcgaggcaatgaggaccgtgtaacactcatcaaggactaccgtggcaagattgaaactgagctcaccaagatctgtgatggcatcctcaagcttctcgaatctcaccttgtgccgtcttccaccgctcccgagtccaaggtcttctatctcaagatgaagggtgactactacagataccttgctgagttcaagactggagctgagagaaaggacgctgctgagaacacgatggtggcatacaaggctgcccaggacattgctctggctgagcttgctccaactcaccctattaggcttggactggcacttaacttctcagtgttctactatgagattctgaactcacctgatcgcgcctgcagtcttgcaaagcaggcttttgacgaggccatctcggaactggacaccctgagcgaggagtcctacaaggacagcactttgatcatgcagctccttcgtgataacttgaccctatggacttctgacatctcggaggaccctgctgaagagattagggaggcgcccaagcgcgactcgagtgaggggcagtaa

SEQ ID NO: 149204 - protein, 278 aa, Zea mays
MYICRSGVLQILKLNCKMASAELSREENVYMAKLAEQAERYEEMVEFMEKVAKTVDSEELTVEERNLLSVAYKNVIGARRASWRIISSIEQKEEGRGNEDRVTLIKDYRGKIETELTKICDGILKLLESHLVPSSTAPESKVFYLKMKGDYYRYLAEFKTGAERKDAAENTMVAYKAAQDIALAELAPTHPIRLGLALNFSVFYYEILNSPDRACSLAKQAFDEAISELDTLSEESYKDSTLIMQLLRDNLTLWTSDISEDPAEEIREAPKRDSSEGQ

SEQ ID NO: 149205 - DNA, 807 bp, Zea mays
  CDS (1)..(807)
atgtcgccgtcggagccgacgcgggaggagagcgtgtacatggccaagctggcagagcaggcggagcggtacgaggagatggtcgagttcatggagcgcgtcgcgcgctccgccgggggcgccggcggcggggacgagctctcggtggaggagcgcaacctgctgtccgtcgcctacaagaacgtcatcggcgcccgcagggcctcgtggcggatcatctcctccatcgagcagaaggaggaaggccgcgggaacgaggcgcacgccgcatccatccgcgcctaccgctccaagatcgaggccgagcttgcccgcatctgcgacggcatcctcgcgctcctcgactcccacctcgtcccatccgccggcggcgccgagtccaaggtcttctacctcaagatgaagggtgactaccacaggtaccttgctgagttcaagtcaggtgcagagaggaaggatgctgcggagagcaccatgaatgcctacaaagctgctcaggatattgctcttgctgatctggccccaacccaccccatcaggctcgggcttgctctcaacttctcagtgttctactacgagatcctcaactcccctgaccgtgcttgcaaccttgcaaagcaggcctttgatgaggcaatctccgaactagacagcctgggagaggagtcctacaaggacagcactctgatcatgcagctcctgcgtgacaacttgaccctatggacttccgacaccaacgaggacgccggagatgagatcaaggaagcagctgctgcccccaaagaatccgcccccgagggccagtaa

SEQ ID NO: 149206 - protein, 268 aa, Zea mays
MSPSEPTREESVYMAKLAEQAERYEEMVEFMERVARSAGGAGGGDELSVEERNLLSVAYKNVIGARRASWRIISSIEQKEEGRGNEAHAASIRAYRSKIEAELARICDGILALLDSHLVPSAGGAESKVFYLKMKGDYHRYLAEFKSGAERKDAAESTMNAYKAAQDIALADLAPTHPIRLGLALNFSVFYYEILNSPDRACNLAKQAFDEAISELDSLGEESYKDSTLIMQLLRDNLTLWTSDTNEDAGDEIKEAAAAPKESAPEGQ

SEQ ID NO: 149207 - DNA, 759 bp, Zea mays
  CDS (1)..(759)
atgtcgcgggaggagaatgtttatatggccaagctggctgagcaagcagaacggtacgaggaaatggttgaatacatggagaaggtggctaagaccacagatgtgcaagagctcactgttgaggagcgtaaccttctatctgttgcctacaagaatgtgattgcggccccccgtgcctcatggcgcattatctcctccatcgagcagaaagaggagtcccgtaagaatgaggaacatgttgcacagatcaaggaataccgtggcaagattgaggctgaattgagcaacatttgtgatggtatcctaaagctgcttgacacgcaccttgtgccttcctccactgccacagagtcgaaggtgttttacctcaagatgaagggtgattatcacaggtaccttgctgagtttaagactggtgctgagaggaaggaatctgcagagagcacaatggtagcttataaggcagctcaggatattgcattggctgaactgccacctattcatcccataaggcttggacttgcacttaacttctcagttttctattacgagattcagaactctccagacaaagcttgcaatcttgccaaggaggcgtttgatgaagctatttctcagttggacatgcttggtgaggattcctacaaagatagcaacttgattatgcagctcctgagggacaacttgaccctctggacggaggacggcattgaggagggcttagaatcctctaagggcgatgctggtgagggtcagtag

SEQ ID NO: 149208 - protein, 252 aa, Zea mays
MSREENVYMAKLAEQAERYEEMVEYMEKVAKTTDVQELTVEERNLLSVAYKNVIAAPRASWRIISSIEQKEESRKNEEHVAQIKEYRGKIEAELSNICDGILKLLDTHLVPSSTATESKVFYLKMKGDYHRYLAEFKTGAERKESAESTMVAYKAAQDIALAELPPIHPIRLGLALNFSVFYYEIQNSPDKACNLAKEAFDEAISQLDMLGEDSYKDSNLIMQLLRDNLTLWTEDGIEEGLESSKGDAGEGQ

SEQ ID NO: 149209 - DNA, 24 bp, Artificial sequence
  primer
atgtcaaccagtcgtgaagattct

SEQ ID NO: 149210 - DNA, 23 bp, Artificial sequence
  primer
ttactttggtgcttcaccttcgg

SEQ ID NO: 149211 - protein, 249 aa, Artificial sequence
  consensus sequence
  Variant (3)..(3): Xaa in position 3 is any amino acid
  Variant (4)..(4): Xaa in position 4 is any or no amino acid
  Variant (7)..(7): Xaa in position 7 is any amino acid
  Variant (18)..(18): Xaa in position 18 is any amino acid
  Variant (23)..(23): Xaa in position 23 is any amino acid
  Variant (24)..(28): Xaa in position 24 to 28 is any or no amino acid
  Variant (30)..(31): Xaa in position 30 to 31 is any amino acid
  Variant (33)..(36): Xaa in position 33 to 36 is any amino acid
  Variant (37)..(43): Xaa in position 37 to 43 is any or no amino acid
  Variant (71)..(71): Xaa in position 71 is any amino acid
  Variant (80)..(81): Xaa in position 80 to 81 is any amino acid
  Variant (84)..(84): Xaa in position 84 is any amino acid
  Variant (85)..(87): Xaa in position 85 to 87 is any or no amino acid
  Variant (89)..(90): Xaa in position 89 to 90 is any amino acid
  Variant (92)..(93): Xaa in position 92 to 93 is any amino acid
  Variant (96)..(96): Xaa in position 96 is any amino acid
  Variant (98)..(98): Xaa in position 98 is any amino acid
  Variant (100)..(100): Xaa in position 100 is any amino acid
  Variant (103)..(104): Xaa in position 103 to 104 is any amino acid
  Variant (107)..(107): Xaa in position 107 is any amino acid
  Variant (108)..(109): Xaa in position 108 to 109 is any or no amino acid
  Variant (112)..(113): Xaa in position 112 to 113 is any amino acid
  Variant (115)..(117): Xaa in position 115 to 117 is any amino acid
  Variant (119)..(119): Xaa in position 119 is any amino acid
  Variant (121)..(126): Xaa in position 121 to 126 is any amino acid
  Variant (127)..(129): Xaa in position 127 to 129 is any or no amino acid
  Variant (135)..(135): Xaa in position 135 is any amino acid
  Variant (142)..(142): Xaa in position 142 is any amino acid
  Variant (149)..(150): Xaa in position 149 to 150 is any amino acid
  Variant (152)..(153): Xaa in position 152 to 153 is any amino acid
  Variant (154)..(154): Xaa in position 154 is any or no amino acid
  Variant (157)..(157): Xaa in position 157 is any amino acid
  Variant (160)..(164): Xaa in position 160 to 164 is any amino acid
  Variant (167)..(168): Xaa in position 167 to 168 is any amino acid
  Variant (170)..(172): Xaa in position 170 to 172 is any amino acid
  Variant (174)..(175): Xaa in position 174 to 175 is any amino acid
  Variant (176)..(176): Xaa in position 176 is any or no amino acid
  Variant (178)..(178): Xaa in position 178 is any amino acid
  Variant (203)..(204): Xaa in position 203 to 204 is any amino acid
  Variant (207)..(207): Xaa in position 207 is any amino acid
  Variant (215)..(215): Xaa in position 215 is any amino acid
  Variant (218)..(218): Xaa in position 218 is any amino acid
  Variant (222)..(222): Xaa in position 222 is any amino acid
  Variant (224)..(224): Xaa in position 224 is any amino acid
  Variant (248)..(248): Xaa in position 248 is any amino acid
REXXVYXAKLAEQAERYXEMVEXXXXXXMXXVXXXXXXXXXXXELTVEERNLLSVAYKNVIGARRASWRIXSSIEQKEEXXGNXXXXVXXIXXYRXKXEXELXXICXXXILXXLXXXLXPXXXXXXXXXSKVFYXKMKGDYXRYLAEFXXGXXXRKXAAXXXXXAYXXAXXXAXXXLXPTHPIRLGLALNFSVFYYEILNSPXXACXLAKQAFDXAIXELDXLXEESYKDSTLIMQLLRDNLTLWTSXD

SEQ ID NO: 149212 - protein, 44 aa, Artificial sequence
  protein pattern
  Variant (21)..(21): Xaa in position 21 is any amino acid
  Variant (23)..(23): Xaa in position 23 is Ala, Gln or Ser
  Variant (24)..(24): Xaa in position 24 is Pro or Ser
  Variant (25)..(25): Xaa in position 25 is Asp, Glu or Gly
  Variant (26)..(26): Xaa in position 26 is any amino acid
  Variant (29)..(29): Xaa in position 29 is any amino acid
  Variant (30)..(30): Xaa in position 30 is Leu or Met
  Variant (33)..(33): Xaa in position 33 is any amino acid
  Variant (36)..(36): Xaa in position 36 is Asp, Glu or Gly
  Variant (37)..(37): Xaa in position 37 is Ala, Asp or Glu
  Variant (40)..(40): Xaa in position 40 is any amino acid
  Variant (41)..(41): Xaa in position 41 is Glu or Gln
  Variant (44)..(44): Xaa in position 44 is Ser or Thr
PTHPIRLGLALNFSVFYYEIXNXXXXACXXAKXAFXXAIXXLDX

SEQ ID NO: 149213 - protein, 28 aa, Artificial sequence
  protein pattern
  Variant (5)..(5): Xaa in position 5 is Leu or Val
  Variant (7)..(7): Xaa in position 7 is Ala or Val
  Variant (8)..(8): Xaa in position 8 is Ala, Gly or Val
  Variant (12)..(12): Xaa in position 12 is Ile, Leu or Val
  Variant (13)..(13): Xaa in position 13 is Ile or Val
  Variant (23)..(23): Xaa in position 23 is any amino acid
  Variant (24)..(24): Xaa in position 24 is any or no amino acid
  Variant (26)..(26): Xaa in position 26 is any amino acid
  Variant (27)..(27): Xaa in position 27 is any or no amino acid
ERNLXSXXYKNXXGARRASWRIXXSXXE

SEQ ID NO: 149214 - protein, 19 aa, Artificial sequence
  protein pattern
  Variant (2)..(2): Xaa in position 2 is Gly, Asn or Ser
LXEESYKDSTLIMQLLRDN

SEQ ID NO: 149215 - protein, 15 aa, Artificial sequence
  protein pattern
  Variant (2)..(2): Xaa in position 2 is any amino acid
  Variant (3)..(3): Xaa in position 3 is Ala or Ser
  Variant (4)..(4): Xaa in position 4 is Ala, Glu, Gly, Asn, Ser or Thr
  Variant (5)..(6): Xaa in position 5 to 6 is any amino acid
  Variant (7)..(7): Xaa in position 7 is Asp or Glu
  Variant (8)..(8): Xaa in position 8 is Ala or Ser
  Variant (9)..(9): Xaa in position 9 is any amino acid
  Variant (13)..(13): Xaa in position 13 is any amino acid
PXXXXXXXXVFYXKM

SEQ ID NO: 149216 - protein, 14 aa, Artificial sequence
  protein pattern
  Variant (5)..(5): Xaa in position 5 is His or Tyr
  Variant (12)..(12): Xaa in position 12 is any amino acid
  Variant (13)..(13): Xaa in position 13 is Ala, Asn, Ser, Thr or Val
  Variant (14)..(14): Xaa in position 14 is Ala, Asp, Glu, Gly or Ser
KGDYXRYLAEFXXX

SEQ ID NO: 149217 - protein, 28 aa, Artificial sequence
  protein pattern
  Variant (2)..(2): Xaa in position 2 is any amino acid
  Variant (3)..(3): Xaa in position 3 is any or no amino acid
  Variant (6)..(6): Xaa in position 6 is any amino acid
  Variant (8)..(8): Xaa in position 8 is Lys or Arg
  Variant (10)..(10): Xaa in position 10 is Ala or Ser
  Variant (13)..(13): Xaa in position 13 is Ala or Thr
  Variant (17)..(17): Xaa in position 17 is any or no amino acid
  Variant (19)..(19): Xaa in position 19 is any or no amino acid
  Variant (21)..(21): Xaa in position 21 is Ile or Val
  Variant (22)..(22): Xaa in position 22 is Asp, Glu or Gln
  Variant (23)..(23): Xaa in position 23 is any amino acid
  Variant (25)..(26): Xaa in position 25 to 26 is any amino acid
  Variant (27)..(27): Xaa in position 27 is Ile, Leu or Val
  Variant (28)..(28): Xaa in position 28 is Ala, Ser, Thr or Val
EXXVYXAXLXEQXERYXEXMXXXMXXXX

SEQ ID NO: 149218 - protein, 7 aa, Artificial sequence
  protein pattern
LTLWTSD

SEQ ID NO: 149219 - DNA, 1458 bp, Saccharomyces cerevisiae
  CDS (1)..(1458)
atggttcatttaggtccaaagaaaccacaggctagaaagggttccatggctgatgtgcccaaggaattgatggatgaaattcatcagttggaagatatgtttacagttgacagcgagaccttgagaaaggttgttaagcactttatcgacgaattgaataaaggtttgacaaagaagggaggtaacattccaatgattcccggttgggtcatggaattcccaacaggtaaagaatctggtaactatttggccattgatttgggtggtactaacttaagagtcgtgttggtcaagttgagcggtaaccatacctttgacaccactcaatccaagtataaactaccacatgacatgagaaccactaagcaccaagaggagttatggtcctttattgccgactctttgaaggactttatggtcgagcaagaattgctaaacaccaaggacaccttaccattaggtttcaccttctcgtacccagcttcccaaaacaagattaacgaaggtattttgcaaagatggaccaagggtttcgatattccaaatgtcgaaggccacgatgtcgtcccattgctacaaaacgaaatttccaagagagagttgcctattgaaattgtagcattgattaatgatactgttggtactttaattgcctcatactacactgacccagagactaagatgggtgtgattttcggtactggtgtcaacggtgctttctatgatgttgtttccgatatcgaaaagttggagggcaaattagcagacgatattccaagtaactctccaatggctatcaattgtgaatatggttccttcgataatgaacatttggtcttgccaagaaccaagtacgatgttgctgtcgacgaacaatctccaagacctggtcaacaagcttttgaaaagatgacctccggttactacttgggtgaattgttgcgtctagtgttacttgaattaaacgagaagggcttgatgttgaaggatcaagatctaagcaagttgaaacaaccatacatcatggatacctcctacccagcaagaatcgaggatgatccatttgaaaacttggaagatactgatgacatcttccaaaaggactttggtgtcaagaccactctgccagaacgtaagttgattagaagactttgtgaattgatcggtaccagagctgctagattagctgtttgtggtattgccgctatttgccaaaagagaggttacaagactggtcacattgccgctgacggttctgtctataacaaatacccaggtttcaaggaagccgccgctaagggtttgagagatatctatggatggactggtgacgcaagcaaagatccaattacgattgttccagctgaggatggttcaggtgcaggtgctgctgttattgctgcattgtccgaaaaaagaattgccgaaggtaagtctcttggtatcattggcgcttaa

SEQ ID NO: 149220 - protein, 485 aa, Saccharomyces cerevisiae
MVHLGPKKPQARKGSMADVPKELMDEIHQLEDMFTVDSETLRKVVKHFIDELNKGLTKKGGNIPMIPGWVMEFPTGKESGNYLAIDLGGTNLRVVLVKLSGNHTFDTTQSKYKLPHDMRTTKHQEELWSFIADSLKDFMVEQELLNTKDTLPLGFTFSYPASQNKINEGILQRWTKGFDIPNVEGHDVVPLLQNEISKRELPIEIVALINDTVGTLIASYYTDPETKMGVIFGTGVNGAFYDVVSDIEKLEGKLADDIPSNSPMAINCEYGSFDNEHLVLPRTKYDVAVDEQSPRPGQQAFEKMTSGYYLGELLRLVLLELNEKGLMLKDQDLSKLKQPYIMDTSYPARIEDDPFENLEDTDDIFQKDFGVKTTLPERKLIRRLCELIGTRAARLAVCGIAAICQKRGYKTGHIAADGSVYNKYPGFKEAAAKGLRDIYGWTGDASKDPITIVPAEDGSGAGAAVIAALSEKRIAEGKSLGIIGA

SEQ ID NO: 149221 - DNA, 1626 bp, Drosophila melanogaster
  CDS (1)..(1626)
atggatcgggagctgaacggggcgatgaagagcgtgtccataaatagcgcccaactgaatggtcacaataacggtggcgggctagatgaaacggaccgcgtgggcgtggcacagggggcggcactgagtgcaacagagaaaattacaacaacgacggcggcagctacaaaatcagcgacagcgaccacaaatgcaaccacagcaacagccacaaccacaaatcttacaactcacagcccgcagcaaattgcactcttatccgctgcagagaaaagtaagatggtgcacgagttatgtcagcagctgcttctaacggacgaacaggtgcaggagctgtgctaccgcatcctgcacgagctgcgccgcggcctggccaaggatacacatcccaaggcgaatgtcaagtgcttcgtaacgtatgtgcaggatctgcccaatggcaatgagcgtggcaagttcttggccttggatctgggtggcaccaacttccgggtgctgctcatccatctgcaggagaacaacgattttcaaatggagtcccgcatctatgccataccgcagcacattatgattggatcgggtacacagctattcgatcacatcgccgaatgtctgtccaactttatggccgagcacaatgtgtacaaggagcgtttgccactcggtttcaccttctcgttcccgctgcgccaattgggtctgaccaagggcctgctggagacctggaccaagggcttcaactgcgctggcgtcgtcaacgaggatgttgtccagttgctaaaggatgccatcgcacggcgcggcgatgtccagatcgatgtgtgtgccatactcaatgacaccactggcacgctgatgagctgcgcctggaagaatcacaactgcaagatcggtctgattgtcggcaccggtgcaaatgcctgctatatggagcgtgtggaggaggcggagctcttcgccgccgaggatccgcgcaagaagcacgtcctgatcaacacggaatggggcgcattcggcgacaatggcgcactggactttgtgcgcaccgaattcgatcgggacatcgatgtgcacagcatcaatccgggcaagcagacgttcgagaagatgatatcgggcatgtatatgggcgagctggtgcgtctggtgctggtgaagatgacccaggcgggtatactcttcaatggacaggattccgaagtgctaaacacccgcggactgttcttcaccaagtatgtgagcgaaattgaagctgacgagccaggcaacttcaccaattgccgcctggtgctggaggagctcggtctgaccaatgccaccgacggggactgcgccaatgtgcggtacatctgcgagtgcgtctcgaaacgggctgcccacctggtgtccgccggcattgccacgctgatcaacaaaatggacgagccaacggtgacggtgggcgtcgatggcagtgtgtaccgcttccatcccaagttccataacctgatggtcgagaagatctcgcagctgatcaagccgggcatcaccttcgatctgatgctgtccgaggacggttccggtcgtggagctgccctggtggcggccgtcgcctgtcgcgaagacatactcaatggcaagaagtag

SEQ ID NO: 149222 - protein, 541 aa, Drosophila melanogaster
MDRELNGAMKSVSINSAQLNGHNNGGGLDETDRVGVAQGAALSATEKITTTTAAATKSATATTNATTATATTTNLTTHSPQQIALLSAAEKSKMVHELCQQLLLTDEQVQELCYRILHELRRGLAKDTHPKANVKCFVTYVQDLPNGNERGKFLALDLGGTNFRVLLIHLQENNDFQMESRIYAIPQHIMIGSGTQLFDHIAECLSNFMAEHNVYKERLPLGFTFSFPLRQLGLTKGLLETWTKGFNCAGVVNEDVVQLLKDAIARRGDVQIDVCAILNDTTGTLMSCAWKNHNCKIGLIVGTGANACYMERVEEAELFAAEDPRKKHVLINTEWGAFGDNGALDFVRTEFDRDIDVHSINPGKQTFEKMISGMYMGELVRLVLVKMTQAGILFNGQDSEVLNTRGLFFTKYVSEIEADEPGNFTNCRLVLEELGLTNATDGDCANVRYICECVSKRAAHLVSAGIATLINKMDEPTVTVGVDGSVYRFHPKFHNLMVEKISQLIKPGITFDLMLSEDGSGRGAALVAAVACREDILNGKK

SEQ ID NO: 149223 - DNA, 1347 bp, Drosophila melanogaster
  CDS (1)..(1347)
atggtgcacgagttatgtcagcagctgcttctaacggacgaacaggtgcaggagctgtgctaccgcatcctgcacgagctgcgccgcggcctggccaaggatacacatcccaaggcgaatgtcaagtgcttcgtaacgtatgtgcaggatctgcccaatggcaatgagcgtggcaagttcttggccttggatctgggtggcaccaacttccgggtgctgctcatccatctgcaggagaacaacgattttcaaatggagtcccgcatctatgccataccgcagcacattatgattggatcgggtacacagctattcgatcacatcgccgaatgtctgtccaactttatggccgagcacaatgtgtacaaggagcgtttgccactcggtttcaccttctcgttcccgctgcgccaattgggtctgaccaagggcctgctggagacctggaccaagggcttcaactgcgctggcgtcgtcaacgaggatgttgtccagttgctaaaggatgccatcgcacggcgcggcgatgtccagatcgatgtgtgtgccatactcaatgacaccactggcacgctgatgagctgcgcctggaagaatcacaactgcaagatcggtctgattgtcggcaccggtgcaaatgcctgctatatggagcgtgtggaggaggcggagctcttcgccgccgaggatccgcgcaagaagcacgtcctgatcaacacggaatggggcgcattcggcgacaatggcgcactggactttgtgcgcaccgaattcgatcgggacatcgatgtgcacagcatcaatccgggcaagcagacgttcgagaagatgatatcgggcatgtatatgggcgagctggtgcgtctggtgctggtgaagatgacccaggcgggtatactcttcaatggacaggattccgaagtgctaaacacccgcggactgttcttcaccaagtatgtgagcgaaattgaagctgacgagccaggcaacttcaccaattgccgcctggtgctggaggagctcggtctgaccaatgccaccgacggggactgcgccaatgtgcggtacatctgcgagtgcgtctcgaaacgggctgcccacctggtgtccgccggcattgccacgctgatcaacaaaatggacgagccaacggtgacggtgggcgtcgatggcagtgtgtaccgcttccatcccaagttccataacctgatggtcgagaagatctcgcagctgatcaagccgggcatcaccttcgatctgatgctgtccgaggacggttccggtcgtggagctgccctggtggcggccgtcgcctgtcgcgaagacatactcaatggcaagaagtag

SEQ ID NO: 149224 - protein, 448 aa, Drosophila melanogaster
MVHELCQQLLLTDEQVQELCYRILHELRRGLAKDTHPKANVKCFVTYVQDLPNGNERGKFLALDLGGTNFRVLLIHLQENNDFQMESRIYAIPQHIMIGSGTQLFDHIAECLSNFMAEHNVYKERLPLGFTFSFPLRQLGLTKGLLETWTKGFNCAGVVNEDVVQLLKDAIARRGDVQIDVCAILNDTTGTLMSCAWKNHNCKIGLIVGTGANACYMERVEEAELFAAEDPRKKHVLINTEWGAFGDNGALDFVRTEFDRDIDVHSINPGKQTFEKMISGMYMGELVRLVLVKMTQAGILFNGQDSEVLNTRGLFFTKYVSEIEADEPGNFTNCRLVLEELGLTNATDGDCANVRYICECVSKRAAHLVSAGIATLINKMDEPTVTVGVDGSVYRFHPKFHNLMVEKISQLIKPGITFDLMLSEDGSGRGAALVAAVACREDILNGKK

SEQ ID NO: 149225 - DNA, 1458 bp, Strongylocentrotus purpuratus
  CDS (1)..(1458)
atgcctggcgaacaaaatacagaattccctagtgaggtgacagcactcatcaagggctttgagctgacccgagagcttcaatatgatatcatgggaagacttgaagatgagatgaacaaaggtctgaaagctgctctaaatgccgaagccaagatcaagatgttgccaacatatgtcacatcgttacctgatggaactgaaaatggtgacttcctggcgctggatcttggcggctctaacttccgtgtgatgtgggtgaagattaaagatgggaagagcaaggcctgcatggatgtgtacacaatccctggcgaagtgatgagagggccgggagatcagctctttgactacatcgcagagcatcttgccaagttcaccagctaccacaaactttgtgagatgtgtattcccctcggtttcaccttctccttcccgtgcttccacaaaggtctcgcctcagctactctagtaacatggactaagggttacgacgcagctggcgtggaaggaaaagatgttgtaccccttcttgaagctgcctgtaagagaaagaatgtacgagttgacatagtagctgtgatcaatgatactgtagcgacgcaaatggctggtgctttcaagaatcatgactgtgttgtgggtttaattcttggcactggctgcaatgcgtcctacctggaatgtacagagaaagtggagatgtatgagggacctaaaggaccggacaagtttgtcatcctcgactgcgagtgtggagcgttcggtgataacgggtgtctggaagatatcaggaccgacttcgatcgggacattgacgggaggaccttcaatcatggaaaacaattttatgagaagatgatagctggcatgtaccttggggagatccttcgtctttctatgatccatttaatcaatcagaaagttatctttggaggtgtgcttccagaggccctcgagaaggaatggggcttcgacaccaagtatcttacatatattgaaaaggataaaactgaagacttatctgggacgagaaagatcctccagagctttgatcttcaacccaccgcagcagagcttcagatcatccgagcgctctcccgttccatctggacccgtgcgtccagactgatcgcctcggggatctcccagatagcgcggcgcatcaacaaacccagcatcaccgtggccgtggacggctccctctatctccacttccaccagttccgagagatgatggtgtccgagatcaaggccctggtgccccagtacgatgtcaagttccaccacgcggaggacggcagcggcatcggaggagccgtgacagcagcggttgccgtgcgacagagcaggagagtgcagaatggacaacccttccagaatggacaacccttcaagaatggacaacccttccagaacggacaacccacagcacccttcatgaatggggattgtgtatga

SEQ ID NO: 149226 - protein, 485 aa, Strongylocentrotus purpuratus
MPGEQNTEFPSEVTALIKGFELTRELQYDIMGRLEDEMNKGLKAALNAEAKIKMLPTYVTSLPDGTENGDFLALDLGGSNFRVMWVKIKDGKSKACMDVYTIPGEVMRGPGDQLFDYIAEHLAKFTSYHKLCEMCIPLGFTFSFPCFHKGLASATLVTWTKGYDAAGVEGKDVVPLLEAACKRKNVRVDIVAVINDTVATQMAGAFKNHDCVVGLILGTGCNASYLECTEKVEMYEGPKGPDKFVILDCECGAFGDNGCLEDIRTDFDRDIDGRTFNHGKQFYEKMIAGMYLGEILRLSMIHLINQKVIFGGVLPEALEKEWGFDTKYLTYIEKDKTEDLSGTRKILQSFDLQPTAAELQIIRALSRSIWTRASRLIASGISQIARRINKPSITVAVDGSLYLHFHQFREMMVSEIKALVPQYDVKFHHAEDGSGIGGAVTAAVAVRQSRRVQNGQPFQNGQPFKNGQPFQNGQPTAPFMNGDCV

SEQ ID NO: 149227 - DNA, 1482 bp, Nasonia vitripennis
  CDS (1)..(1482)
atgaagaacaagaacatctcggttctgagcaaactgtgcaagtgctactcgcgcgagcagatgcttcaggaggaggaagaccccgaggattcatcagggtcaagttcagcggtgacgtcacagcatttcctcatcagccaggttgaggttattgaagaaatcagagatgcgtgcaaagacctcatcctcacggacgagcagctccggcttgtcatggagcggctcaggcaccagatcgaccggggtctgtccaagcagagccacgaggaggctatcgtcagatgctacaccacctacgtgcaggatttacccaacggcaccgaaaagggcaacttcctggcgcttgatctgggcggtaccaacttccgcgtactgctgatcaccctggacggtcagagcttcgacatgaagagcaagatctacgcgataccgcagagcctgatgctgggcacgggtcgtcagctgttcgaccacatcgcccagtgtctggccctcttcgtcaaggacctcaaactcgagcaggaggttctgccccttggcttcaccttcagcttccccctgagccaacagggcctcaccaagggtcttctcgtcaggtggaccaagggattcaactgcagcggcgtcgtcgagcaggacgtcgttgccctcctcgaggatgccatcgctaggagaaatgacgtcaaaatcgacgtgtgcgcgatcttgaacgacaccactggtacgctgatgtcctgcgcttggaaaaacaagaactgtcgcgttggcctcattgttggtaccggcagtaacgcctgctacgtggagaagacggagaacgttgagtgcgcgataccgggccagtacgcggcgcacaaaccccacatgctgataaacacggagtggggcgcgttcggcgagcagggcaccctcgacttcgtcctgaccgagttcgaccgcgacatcgacgagaactcgatcaacccgagcaaacagctcttcgagaagatgatatcgggaatgtacatgggtgagctcgccaggctggtactggagaaactcaccaacaacggactgctctttaacggcaagtgttcctgcgatctgaggaagcgcggcaagttcttcaccaaatacgtgtccgaaatcgagtccgatcctaagggaaagtacgccaactgccgagagatcctggctgagctgggcatcaggaatgcgacggaccaggactgcgagaacgtgcggtacgtctgctcggtcgtctcgaggcgagcggctcatctggcgtccgcgggtatcgcgacgctcctcgtcaagatgggcgagaacaacgtgacggtcggcgtcgacggctctgtctacagattccatcctcacttccacgacctcatggtcgagaagatcagcgcgttgcagccgtacaagttcgacctgatgctttcggaagacggcagcggtcgcggtgcggcgttggttgccgcagtagccgcgcaaaagcggtga

SEQ ID NO: 149228 - protein, 493 aa, Nasonia vitripennis
MKNKNISVLSKLCKCYSREQMLQEEEDPEDSSGSSSAVTSQHFLISQVEVIEEIRDACKDLILTDEQLRLVMERLRHQIDRGLSKQSHEEAIVRCYTTYVQDLPNGTEKGNFLALDLGGTNFRVLLITLDGQSFDMKSKIYAIPQSLMLGTGRQLFDHIAQCLALFVKDLKLEQEVLPLGFTFSFPLSQQGLTKGLLVRWTKGFNCSGVVEQDVVALLEDAIARRNDVKIDVCAILNDTTGTLMSCAWKNKNCRVGLIVGTGSNACYVEKTENVECAIPGQYAAHKPHMLINTEWGAFGEQGTLDFVLTEFDRDIDENSINPSKQLFEKMISGMYMGELARLVLEKLTNNGLLFNGKCSCDLRKRGKFFTKYVSEIESDPKGKYANCREILAELGIRNATDQDCENVRYVCSVVSRRAAHLASAGIATLLVKMGENNVTVGVDGSVYRFHPHFHDLMVEKISALQPYKFDLMLSEDGSGRGAALVAAVAAQKR

SEQ ID NO: 149229 - DNA, 1434 bp, Magnaporthe grisea 70-15
  CDS (1)..(1434)
atggtggacgctccgaaggatctcgtcaaggagatcaaggaccttgaggagatgttcactgtagataccgccaagctcaagcaaatcaccaatcactttgtcggcgagcttgagcgggggttgagtgtagaaggcggggacattcctatgaaccctacgtgggtcatgtccttcccggacggctacgagaccgggacatttctggcccttgacatgggtggtacaaacctgagggtctgcgaaatcacgctcactgaccagaagtcggagtttgacattatccaatccaaataccggatgcccgaagagctcaagaccggccagtccgatgagctttgggactatatcgccgactgcctgctccagttcattgagactcaccatggagacccaaagaagattgagaagctgcctttgggcttcaccttctcttaccctgcaactcagaactacgtcgatgagggcatcctgcagcgatggactaaaggcttcgatatcgccggcgtcgaaggaaagaatgtcgcgccaatgctgatgaaggcactgtctgagaggggcgtgcccgtcaaactcgtggctctgatcaacgacaccactggcaccctcattgcctcggcttatacggacacccaaatgcgcattggctgcatctttggcactggttgcaatgctgcttacatggaggaatgtggttctattcccaagctggcgcatatgaacctgcccccagagacgcccatggctatcaattgtgaatggggtgctttcgacaaccagcacaaggttcttccgaggaccccctacgacgtgaaaatcgacgaggactctccccggcctggacaacaggcgttcgagaagatgatcgccggattatacctgggagagattttccgtcttattctggttgacttgcatgacaaccatgaggtccgcatcttcaagaaccaggacatctccaagttgcgacgcgcctacaccctcgactcgtcgttcctttcagctatcgaggacgacccctgggagaacctgtccgagaccttggacctgttccaggacaagctcaacttggttcctaaccggaacgagctcgaactcatccgacgcactgcggagctgatcggcactcgagctgccagactttcagcatgcggtgtggccgcaatctgcaagaagaagaactaccgctcttgccatgtgggcgccgatggatctgtcttcaacaagtatcccaacttcaagcagcggggtgcccaggccctcagggagatcctcgactggcctgcaaaggaggatcccaaggaggaggatcctattgagattcttgcggctgaggatggcagtggtgtaggtgccgcgctcattgctgcgttgacgctaaagagggccaaagagggtaatttccacggcatcagcaacccagagaactttaagtga

SEQ ID NO: 149230 - protein, 477 aa, Magnaporthe grisea 70-15
MVDAPKDLVKEIKDLEEMFTVDTAKLKQITNHFVGELERGLSVEGGDIPMNPTWVMSFPDGYETGTFLALDMGGTNLRVCEITLTDQKSEFDIIQSKYRMPEELKTGQSDELWDYIADCLLQFIETHHGDPKKIEKLPLGFTFSYPATQNYVDEGILQRWTKGFDIAGVEGKNVAPMLMKALSERGVPVKLVALINDTTGTLIASAYTDTQMRIGCIFGTGCNAAYMEECGSIPKLAHMNLPPETPMAINCEWGAFDNQHKVLPRTPYDVKIDEDSPRPGQQAFEKMIAGLYLGEIFRLILVDLHDNHEVRIFKNQDISKLRRAYTLDSSFLSAIEDDPWENLSETLDLFQDKLNLVPNRNELELIRRTAELIGTRAARLSACGVAAICKKKNYRSCHVGADGSVFNKYPNFKQRGAQALREILDWPAKEDPKEEDPIEILAAEDGSGVGAALIAALTLKRAKEGNFHGISNPENFK

SEQ ID NO: 149231 - DNA, 1488 bp, Magnaporthe grisea 70-15
  CDS (1)..(1488)
atgcctttggcagcagagacaaaacgcatcgtcgaccagttcgagtacacggacgacgatgtgaacaagggagtaaaggagttcctccgtcaaatggacgagggtctcgctaaggacggcaccagcttaagccagattcctacatatgtcgcagccgttccttctggcaaagaacagggtctttatcttgcggttgatcttggcggaacaaacttcagggtttgctcggttcatctcaatggcgacaacacgtacgacctcaacttcaacaaggtcgcgatcccaaaggagctcatggttgccaagacttccgaagaactctttgccttcctcgccaagcagattgaggttttcctcaaggaccaccacgaggatcacttcgagtccctgaagcgccgccgagaggccaccagcgccaccaatggatatcgcgaggaggatgtcttcaggctgggtttcaccttcagcttccccgtggaccaggttggtattaacaagggcaacttgatccggtggaccaagggtttcgacatcgatgacactgtcggcaaggacgtctgtgctttgctccaggctgagctcgacaagctcaagctgcctgtgaaggtggcggccttggtcaacgacactgtcggtaccctcatggctcgcgcatacacatcgccgagcaaaaagggaaccattcttggtgccattttcggaacgggtaccaacggagcatacatggagaagtacgacagcatcaagaagggcctcaaaggagccgactatgtcgacacaacgggcgaaatgatcatcaacgcagagtggggatccttcgacaaccagctcaacgtgcttcccagcacaccatgggacgacgccctggaccgcgaaagcaacaatcctggcgtccagatgtttgagaagcgggtatcgggcatgtttctcggcgagattctgcgtcaagctgtcgtggacgcagtcaagaacgacaaggtgcagcttttcaagcaggtgcaggttaactcgagctcttcacgactgttcacgtcatatggcgttgacagcgccatcatgtcagatgcagcagaggacaacactccagaactcgccacgcttcgcaagaagctcagctcagaggttggtctcaatgatgtatcggtcgaggatgcgcaagcgttcaaggctatatctgccgctgttggccgacgtgcagctcgtctctcagccgttgctgttgcagctgtggtcctgaagacgggcaagctgactcacccggattggaagggtgagcagatcgacataggtgtcgacggcagtcttttccagttctaccctcagttccccgacatgatctacgaggcgctgagggtgatcgatggcatcggtgagaagggagctgaacaaatcacgattgggctgactcaggacggctctggtgtcggtgctgcgctcattgctctgattgcggctgagatggagaagagtgcttcggggtcgaagtag

SEQ ID NO: 149232 - protein, 495 aa, Magnaporthe grisea 70-15
MPLAAETKRIVDQFEYTDDDVNKGVKEFLRQMDEGLAKDGTSLSQIPTYVAAVPSGKEQGLYLAVDLGGTNFRVCSVHLNGDNTYDLNFNKVAIPKELMVAKTSEELFAFLAKQIEVFLKDHHEDHFESLKRRREATSATNGYREEDVFRLGFTFSFPVDQVGINKGNLIRWTKGFDIDDTVGKDVCALLQAELDKLKLPVKVAALVNDTVGTLMARAYTSPSKKGTILGAIFGTGTNGAYMEKYDSIKKGLKGADYVDTTGEMIINAEWGSFDNQLNVLPSTPWDDALDRESNNPGVQMFEKRVSGMFLGEILRQAVVDAVKNDKVQLFKQVQVNSSSSRLFTSYGVDSAIMSDAAEDNTPELATLRKKLSSEVGLNDVSVEDAQAFKAISAAVGRRAARLSAVAVAAVVLKTGKLTHPDWKGEQIDIGVDGSLFQFYPQFPDMIYEALRVIDGIGEKGAEQITIGLTQDGSGVGAALIALIAAEMEKSASGSK

SEQ ID NO: 149233 - DNA, 1719 bp, Gibberella zeae PH-1
  CDS (1)..(1719)
atggtcggtcttggtcctcgtcgccctccctcccgaaaggctgttgcttgttcgagatactgccatggtggggcagaaccagcaaaaatgagctgcaatgacgatgttggctccatcaatcctgaccgtggggtcagacgtcagaagcaagacgaagccctgcatgatttcacggagatcacgatattgggaaagccagcagtgcaggatcgagagcccatgtcattgactttccgagcttgtccaaatgccggcttctactatggtggcagccagcgcggatccatggccgatgtccccaaggacctcgctgaagagatcaacaagctcgagaatctcttcaccgtacagcccagcaagctcaaggagatcaccaaccatttcgtttctgaactcgccaagggtctcagcgttgagggtggtagcattcctatgaatcctacctgggtcatgtcatacccggatggctatgaaaccggcacctacctggccctcgacatgggcggcaccaacctgagagtgtgccagatcacacttactgacgagaagtccgagttcgatatcatccagtccaagtaccgcatgcctgaggagctcaagtctggcacctctgaggagctttgggagtacattgccgaatgtctctaccagttccttgagacacaccacggagactgcacaaagttggagaagatccctctgggtttcacattctcgtaccccgccacccagaactacatcgatgagggtatcctccagcgatggaccaagggcttcgacattgacggtgtcgagggccagaacattgttcccatgttcgaggaggccttgaagactcggggcgttcctatcaagcttgccgctatcatcaatgatactaccggcacattgattgcctctgcctacaccgatactgccatgaagattggttgcattttcggcactggttgtaacgccgcatacatggaagactgcggctcaatccccaagattgctgacctgaacctccctgctgacctgcctatggccatcaactgcgaatggggagctttcgacaatgagcataaggtcctcccccgaaccccctacgacgtcatcattgacaaggagtctcctcgccctggacagcaggcttttgagaagatgattgctggtctgtaccttggcgagatcttccgactcattctcgtcgacctccacgacaacaagtctatccatatctttgagaaccaagacattgctctcctccgcaagccttattctctggatgcctccttcctgtctgctatcgaggaggacccctgggagaacctgtccgagaccagcgacctcttcagcaagaagctgaacttgaagtgcacacagcctgagcttgagcttatccgcagaaccgccgagctcatcggcacacgagctgcccgcctctcggcctgtggcgttgctgctatctgcaagaagaagaactaccaatcttgccacgtcggtgctgacggttccgtgttcaacaagtacccccacttcaaggagcgtggtgccaaggctctgcgagatattctcgactggcccgagaagaccaacaagaaggaagaggatcccattgaagtcctgactgccgaggacggtagcggtgtcggcgccgccctgattgccgccctgacgcttaagcgcatcaatgagggcaacatggcgggtatccttcatcccgagaacttcaaataa

SEQ ID NO: 149234 - protein, 572 aa, Gibberella zeae PH-1
MVGLGPRRPPSRKAVACSRYCHGGAEPAKMSCNDDVGSINPDRGVRRQKQDEALHDFTEITILGKPAVQDREPMSLTFRACPNAGFYYGGSQRGSMADVPKDLAEEINKLENLFTVQPSKLKEITNHFVSELAKGLSVEGGSIPMNPTWVMSYPDGYETGTYLALDMGGTNLRVCQITLTDEKSEFDIIQSKYRMPEELKSGTSEELWEYIAECLYQFLETHHGDCTKLEKIPLGFTFSYPATQNYIDEGILQRWTKGFDIDGVEGQNIVPMFEEALKTRGVPIKLAAIINDTTGTLIASAYTDTAMKIGCIFGTGCNAAYMEDCGSIPKIADLNLPADLPMAINCEWGAFDNEHKVLPRTPYDVIIDKESPRPGQQAFEKMIAGLYLGEIFRLILVDLHDNKSIHIFENQDIALLRKPYSLDASFLSAIEEDPWENLSETSDLFSKKLNLKCTQPELELIRRTAELIGTRAARLSACGVAAICKKKNYQSCHVGADGSVFNKYPHFKERGAKALRDILDWPEKTNKKEEDPIEVLTAEDGSGVGAALIAALTLKRINEGNMAGILHPENFK

SEQ ID NO: 149235 - DNA, 1362 bp, Gibberella zeae PH-1
  CDS (1)..(1362)
atggcagacttcaaggcttacctcgacgaactcgaacaagactttgtgatcgacacagcaaagctcaaacatgtcactaaccactttgtccaagagctggaaaaagggttgagcataaaaggcggcagcatcccaatgaatccgacatgggtaaccaactacccagacggcaatgagaaaggcaaatctcttgttctggatatgggaggcacaaatcttcgagtgtactccatccaactcactagcgaaaaaggcggattcgaagtcaagcaagaatcacacaagctcccagaagagctcaagactgccacagctgacgaactctgggactttattgcaggatgtctcgactccttccttcagtcggcagactttgacctaagcacggagatagatctgagctttatcttttcgttcccaacaacacagaggacgatagacgagggcatcttgcagaggtggacaaagggtttcaacatttccaacactgaaggaaaggatgctgctgaatcattaagacaagccatcaagaaaaagaatctcccgctcaaggtccgtgttgtaacaaatgatacaactgcgacaatgatggcctcggcctacctcaactccgacacagaaatcggctgcgttttcggcacaggttgcaatggcgcttactttgaaaaggtcggagccattcccaagctcgcgaatgacaacttgaatggggaatcgttcatggctatcaactgcgaatggggggcttttgataacgagcatgctgtgttgcccttgacgtcgtatgatattgctatcgatgaagactctccaagaaagggacaacaggcgtttgaaaagatggtggcaggactctatctcggagagctatttcgtcgcatcatcctggagatccatcagagggatccccataccttcttggagggtcaaagcatggagagattgaacgatacttattgtcttgactcttctttcctttccgctattgaggaggacgcatcagatggtctacgagaagcgtatgagacatgcgtttcaagcctgggaatctccccaactctcgccgagctccaattcatgaaagcagtcgctacgctcattactacccgcgccgctcgtttgtcagcaactggcgtcgcggccatctgtcagaagcgtgacctgcagcaatgtcacgtcggagtagagggctcattattcgagaagcatccccattttcagctggagttgtcaaaggctgtcggcgagatccttgctccagttgctgaacctgacacaagaaagagcaacgtcgagtttatgctttcaccgggtagtggtgtgggtgcagctgtcatcgcttcaaccttgaaagagaggtga

SEQ ID NO: 149236 - protein, 453 aa, Gibberella zeae PH-1
MADFKAYLDELEQDFVIDTAKLKHVTNHFVQELEKGLSIKGGSIPMNPTWVTNYPDGNEKGKSLVLDMGGTNLRVYSIQLTSEKGGFEVKQESHKLPEELKTATADELWDFIAGCLDSFLQSADFDLSTEIDLSFIFSFPTTQRTIDEGILQRWTKGFNISNTEGKDAAESLRQAIKKKNLPLKVRVVTNDTTATMMASAYLNSDTEIGCVFGTGCNGAYFEKVGAIPKLANDNLNGESFMAINCEWGAFDNEHAVLPLTSYDIAIDEDSPRKGQQAFEKMVAGLYLGELFRRIILEIHQRDPHTFLEGQSMERLNDTYCLDSSFLSAIEEDASDGLREAYETCVSSLGISPTLAELQFMKAVATLITTRAARLSATGVAAICQKRDLQQCHVGVEGSLFEKHPHFQLELSKAVGEILAPVAEPDTRKSNVEFMLSPGSGVGAAVIASTLKER

SEQ ID NO: 149237 - DNA, 1413 bp, Apis mellifera
  CDS (1)..(1413)
atggtcgtccctacagagaatgcccttcacgaggcgattcaagtagcaccattggtgctttcggacaacgtaaagcgacataagattgagcaaaaactggcacggctacaattttcgaccacagttgtgaaaaatatccaagatgtttttgaatcggaaatgaataaaggaattcatcagcaaccatcatcactgcagatggagaatacttatgttccagaacttctcgatggcacagaaaaaggtttatatttggcattggatcttggaggaacgaatttccgagttcttcttttagaactggatcatggtatacctaaacgagaagaagtgaagaaatatcacattagctctgatttgagagttggttcggggattcgtctgtttgattatctagcggaatgcgttagtgatttcgtcattgcacagggtcttcaggatgtagagcttccccttggatttacattctccttcccgatgattcaacattcgttagatattggaatattagtgacttggactaaaactttcaattgtcccgatgttgttaatgaagatgccgtgaaattattgcgtgaagctttggatcgtcgaggagatactaaagtgaaagttgtagcaattttgaacgataccacaggaacattggtacaaggatcaacgttggatcctgatactgcaattggacttatattaggtactggtagcaatgcttgttatattgaacgagctgatagagttgagcactgggagactgagagacatggagaacgtcaagtcattatcgatattgaatggggtgcatttggagataatggtgtattggattttatcaaaacagattttgatcgtgaaaatgatgcaaattctcttattgtgaattcttttacgtttgaaaagtatattagtggaaaatatttgggcgagattgtaagagtggtacttgcaaaattatacaaagatggccttctattcataggagatcatacacctggatctcttttagttcccggcaatcttaccagcgatttagtatctgatattgaacaagactctgtagatggtgattataatagtacgaaggaagttttaatgaagttcgggatcattccggatgaagatgacgtaaaaattgtacaatatgtttgcgaagtagtttctaatcgcgcagctcttcttgtttcaatatgcctagcagttttattaaagcgaattgacagaaaacatgtaacaatcgctgtagatggatctctatacaagcatcatcctcgactagagacatggatcaaacagtacattccattattagctcctgatcacaaattcaagatgatccatgctgaggatggaagtgggaaaggtgctgcacttgttgctgcaattgcacaaagacttcagaatagattagattag

SEQ ID NO: 149238 - protein, 470 aa, Apis mellifera
MVVPTENALHEAIQVAPLVLSDNVKRHKIEQKLARLQFSTTVVKNIQDVFESEMNKGIHQQPSSLQMENTYVPELLDGTEKGLYLALDLGGTNFRVLLLELDHGIPKREEVKKYHISSDLRVGSGIRLFDYLAECVSDFVIAQGLQDVELPLGFTFSFPMIQHSLDIGILVTWTKTFNCPDVVNEDAVKLLREALDRRGDTKVKVVAILNDTTGTLVQGSTLDPDTAIGLILGTGSNACYIERADRVEHWETERHGERQVIIDIEWGAFGDNGVLDFIKTDFDRENDANSLIVNSFTFEKYISGKYLGEIVRVVLAKLYKDGLLFIGDHTPGSLLVPGNLTSDLVSDIEQDSVDGDYNSTKEVLMKFGIIPDEDDVKIVQYVCEVVSNRAALLVSICLAVLLKRIDRKHVTIAVDGSLYKHHPRLETWIKQYIPLLAPDHKFKMIHAEDGSGKGAALVAAIAQRLQNRLD

SEQ ID NO: 149239 - DNA, 1461 bp, Candida glabrata CBS 138
  CDS (1)..(1461)
atggttcatctaggtccaaagaagccaccaacgagaaagggttccatggtggacatgccacaacaacttctagatcaaatcaaggtctttgaagaaatgtacactgttgatggtgaaactttgagaaaggttacaaagcacttcattacagaacttgacaagggtttgtctaaaaagggtggtaacattcctatgattccaggttgggttatggaatacccatctggtaaggaaaagggtgactacttggccattgacttgggtggaaccaacttgagagttgttttggttaagttgggtggtgaccgtacttttgacactactcagtctaagtacaagctaccagaagctatgagaacaactaagaatcatgaagaactatggagtttcattgctgattctctacaagcattcttggaagatcaattcccagaaggtgtcaagggtaagctacctttgggtttcaccttctcttacccagcttctcaagatagaattaaccaaggtgttctacaaagatggactaagggtttcgatattccaaacgtcgaaggtcatgacgtcgttccaatgctacaaaagcaaatcgaaaagagaaacttgccaatcgacatcgttgccttgattaacgatactactggtaccttagttgcatcattgtacactgatggtgaaactaaaatgggtgttatcttcggtactggtgtcaatggtgcttactacgatgttgtttctgatattccaaagttggaaggtaagttggctgatgatattccaaatgattcaccaatggctatcaactgtgaatatggttctttcgataacgaacacgttgttttgccaagaaacaagtatgacttgatcattgatgaagaatctccaagaccaggccaacaagcctttgaaaagatgtcttcaggttattacttgggtgaaatgttgcgtctagctctgttggacctatacgatcaaggtttgattttgaagggtcaagacatttctaagttgaagaagccatacgtaatggatacttcttacccatccaagattgaagacgatccatttgaaaacttggaagacactgacgaacttctacaaaagaacctgggtattcaaaccacagtccaagaacgtaagttgattagacgtctgtgtgaattgattggtactagatctgctagattgtctgtctgtggtattgctgccatctgtcaaaagagaggttacgaaaccgctcacattgctgccgatggttccgttttcaagatgtacccaggcttcaaggagaaggctgctcaaggtttggctgatatttacggttgggaacataaagatccaaaggattgtccaattgtcattgttgatgctgaagatggttctggtgctggtgccgccatcattgctgctttggctgaaaagagaattgctgagggtaagtccttgggtgtcttgggtgcttaa

SEQ ID NO: 149240 - protein, 486 aa, Candida glabrata CBS 138
MVHLGPKKPPTRKGSMVDMPQQLLDQIKVFEEMYTVDGETLRKVTKHFITELDKGLSKKGGNIPMIPGWVMEYPSGKEKGDYLAIDLGGTNLRVVLVKLGGDRTFDTTQSKYKLPEAMRTTKNHEELWSFIADSLQAFLEDQFPEGVKGKLPLGFTFSYPASQDRINQGVLQRWTKGFDIPNVEGHDVVPMLQKQIEKRNLPIDIVALINDTTGTLVASLYTDGETKMGVIFGTGVNGAYYDVVSDIPKLEGKLADDIPNDSPMAINCEYGSFDNEHVVLPRNKYDLIIDEESPRPGQQAFEKMSSGYYLGEMLRLALLDLYDQGLILKGQDISKLKKPYVMDTSYPSKIEDDPFENLEDTDELLQKNLGIQTTVQERKLIRRLCELIGTRSARLSVCGIAAICQKRGYETAHIAADGSVFKMYPGFKEKAAQGLADIYGWEHKDPKDCPIVIVDAEDGSGAGAAIIAALAEKRIAEGKSLGVLGA

SEQ ID NO: 149241 - DNA, 1488 bp, Candida glabrata CBS 138
  CDS (1)..(1488)
atgtctttcgagaacttccacaaagctaccagcgagcaattgactaaagccgttgatgaactatgtaaagagttcgaagtcactccaaagatgttggatgaattaactgcttacttcattgaatccatggaaaaaggtttggctgctgaggctgactctgagaacaagggtttgccaatgatcccatcttttgttactggtatgccaaatggtaccgaaaatggtgttttgttggctgctgacttaggtggtactaacttccgtgtctgttccgttactttgaatggtgataacactttcaagatggaacaaatgaagtctaagattccagatgaattgttagacgacgaaggtgttacttctgagcaattgttcggctatctaggtcgtagaactgttgcatttgtaaagaagtaccatcctgaattcttgaacaagggtgatgatatcccaccaattcgtttgggtttcaccttttcttacccagtcgatcagacttccttgaacagtggtactttgatcagatggaccaagggtttcaagattgaggatactgtcggtaaggatgttgttcaattataccaacaacaattggatgctcaaggtttggggatgattaagattgtcgctatgactaacgacacagtcggtacattcttatctcattgctatgcttctggttcccattcatcatctggtggtgaaatttctgaacctgttatcggctgtatttttggtactggtaccaatggttgttacatggaagaaattgagaacataaagaaacttccagaagatatgagacaccaattggccaatgaaggtaagacccatatgtgtgttaacactgaatggggttcttttgataatgaatgcagatatctgccaactaccaagtacgacgtcgacatcgaccaaaagtactccgctaaccctggtttccacttgtttgaaaagagagtttctggtatgtacttgggtgaagtcttgagaaatgttttggtggacttacacagccgtggtttaatgctaactcaataccgcgactacgaccaattacctcatcgtttaaagactccatttgagctatctagtgaagtcctatcccgtattgaaattgatgactccactggtttgcgtgaaactgaattgtctttcttgcaatcattgagacttccaacgacgccatctgaacgtgaagctattcaaaagttggttcgtgccatttctcgtagatccgcttatttggcctctgttccaattgctgctatcctaatcaagactaacgctttgaacaagagataccatggtgaagttgaagttggttgtgatggttctgttatcgaatattacccaggtttcagatcaatgttgagacatgccctatccttgtctccaatcggagctgatggtgagcgtaagatccacattagaattgccaaggatggttctggtgtcggtgcagcattgtgtgcattggttgcctaa

SEQ ID NO: 149242 - protein, 495 aa, Candida glabrata CBS 138
MSFENFHKATSEQLTKAVDELCKEFEVTPKMLDELTAYFIESMEKGLAAEADSENKGLPMIPSFVTGMPNGTENGVLLAADLGGTNFRVCSVTLNGDNTFKMEQMKSKIPDELLDDEGVTSEQLFGYLGRRTVAFVKKYHPEFLNKGDDIPPIRLGFTFSYPVDQTSLNSGTLIRWTKGFKIEDTVGKDVVQLYQQQLDAQGLGMIKIVAMTNDTVGTFLSHCYASGSHSSSGGEISEPVIGCIFGTGTNGCYMEEIENIKKLPEDMRHQLANEGKTHMCVNTEWGSFDNECRYLPTTKYDVDIDQKYSANPGFHLFEKRVSGMYLGEVLRNVLVDLHSRGLMLTQYRDYDQLPHRLKTPFELSSEVLSRIEIDDSTGLRETELSFLQSLRLPTTPSEREAIQKLVRAISRRSAYLASVPIAAILIKTNALNKRYHGEVEVGCDGSVIEYYPGFRSMLRHALSLSPIGADGERKIHIRIAKDGSGVGAALCALVA

SEQ ID NO: 149243 - DNA, 1461 bp, Candida glabrata CBS 138
  CDS (1)..(1461)
atggttcatttaggtccaaaaaagccacctgctagaaagggttctatggttgacatgccaaaggatcttcttgatgagatcaagaagttcgaggacatgttctccgttgacgctgccactttgcaaaaagtcaccaagcacttcatcagcgaattgtccaagggtttgtccaaggaaggtggtaacatccctatgatcccagcctgggttatggaaaacccaactggtaaggagaaaggtgacttcttggccattgacttgggtggtaccaacttgagagttgtcctagtcaagctaggtggtgaccgtactttcgacaccactcagtccaagtacaagttgcctggtcctatgagaaccaccaaggacccagaagaaatctggagcttcatcgctgattccttggagaccttcatcaaggagcaattcccagagggttgcaacgagactctgccattgggtttcactttctccttcccagcttcccaggacaagatcaaccaaggtgtcttgcaaagatggaccaagggtttcgacatcccaaacattgaaggccacgatgttatcccaatgttgcaaaagcaaatcgaaaagagaaacttgccaattgacattgtcgctttgatcaacgacactaccggtactttggttgcctccttgtacaccgatggtgaaaccaagatgggtgtcatcttcggtaccggtgtcaacggtgcttactacgatgtcgtctctgacattccaaagctggaaggtaagcttgccgacgatatcccatcttcttccttgatggccatcaactgtgagtacggttccttcgacaacgaacacgtcgtcttgccaagaaacaagtacgatatcgccatcgatgaagaatccccaagaccaggtcaacaaactttcgaaaagatgtcctccggttactacttgggtgaactgctacgtctagcccttttggacctatacaaccaaggtttgatcttcaagggccaagacgtccaaaagttgaaggaagcttacatcatggacacttcttacccatccagaatcgaagacgatcctttcgaaaacttggaagacactgacgaattgttccaagctgacttgggtatccaaactactgtccaagaacgtaagttgatcagacgcctgtgtgaattgatcggtaccagatctgctagattgtccgtctgtggtatcgctgccatctgtcaaaagagaggctacgaaaccgcccacattgctgctgacggttccgtcttcaacaagtacccaggcttccaacaaagagctgccgaaggtttgagagacatttacggctggaaggaagacaagccacaaaactacccaattgtcatcgtcgctgccgaggatggttctggtgctggtgccgctattattgctgccttggcccaaaagagaatcgctgaaggtaagtctttgggtgttattggtgcttaa

SEQ ID NO: 149244 - protein, 486 aa, Candida glabrata CBS 138
MVHLGPKKPPARKGSMVDMPKDLLDEIKKFEDMFSVDAATLQKVTKHFISELSKGLSKEGGNIPMIPAWVMENPTGKEKGDFLAIDLGGTNLRVVLVKLGGDRTFDTTQSKYKLPGPMRTTKDPEEIWSFIADSLETFIKEQFPEGCNETLPLGFTFSFPASQDKINQGVLQRWTKGFDIPNIEGHDVIPMLQKQIEKRNLPIDIVALINDTTGTLVASLYTDGETKMGVIFGTGVNGAYYDVVSDIPKLEGKLADDIPSSSLMAINCEYGSFDNEHVVLPRNKYDIAIDEESPRPGQQTFEKMSSGYYLGELLRLALLDLYNQGLIFKGQDVQKLKEAYIMDTSYPSRIEDDPFENLEDTDELFQADLGIQTTVQERKLIRRLCELIGTRSARLSVCGIAAICQKRGYETAHIAADGSVFNKYPGFQQRAAEGLRDIYGWKEDKPQNYPIVIVAAEDGSGAGAAIIAALAQKRIAEGKSLGVIGA

SEQ ID NO: 149245 - DNA, 1446 bp, Kluyveromyces lactis NRRL Y-1140
  CDS (1)..(1446)
atgtcagatcctaagttaaccaaggcggttgattctatatgcgatcagttcattgttactaaatcgaagatatctcagttgactgagtatttcatcgattgtatggaaaagggattagaaccctgtgaatcagatatcagtcaaaacaaagggttgcctatgattccgacgtttgtgactgacaagccatccggtcaggaacatggagtaaccatgttggcagctgatttaggtggtactaatttcagagtttgctctgtggaactattaggtaatcatgaattcaagattgaacaagagaagtcaaagattccaactttcttcttccaggacgatcatcatgttaccagtaaggatttgttccaacatatggccctgatcacgcatcagtttttgactaaacatcataaggatgtaattcaagattacaaatggaaaatgggtttcactttttcatatccagtcgatcaaacctccttgagcagtggtaagttgattagatggaccaagggtttcaagatcggtgatactgttgggcaagacgttgttcaactgttccaacaagaattgaacgatattgggttatcaaatgttcatgtggttgcattgactaatgacactactggaaccctattggctcgttgttacgcttccagtgatgcggcaagagccatcaacgaaccagtaattggctgtatctttggtactggtacgaacggctgctacatggaaaagcttgaaaatattcacaaattggatccagctagcagagaagaacttctgtctcaggggaagacccatatgtgcatcaataccgaatggggctcttttgataatgaactaaatcatttgcctactacaagttatgatattaagattgatcagcagttctccaccaatcccgggttccacttgtttgaaaaaagggtcagtggtctttatttgggtgaaatacttcgtaacatactactagaccttgaaaaacaagagttattcgacttgaaggaatctgttttaaagaacaatccctttattttaaccacagaaactttatcacatatcgaaattgataccgttgagaacgacttacaggacacaagggatgctcttttaaaggctgctgacttggagaccaccttcgaagaacgtgtcttgatccaaaaattggtaagagctatttccaggagagctgcattcttagccgcagtgccaattgctgcaattttgatcaaaaccaacgctttgaaccagagttatcactgccaagtagaggttggttgtgacggtagtgtcgttgagcactatccaggattcagatctatgatgagacatgcattagcactttctccaattggccccgagggtgaacgtgatgtccatctacgtatctccaaggatggttccggtgttggcgctgctttgtgtgctttgcatgcaaattattaa

SEQ ID NO: 149246 - protein, 481 aa, Kluyveromyces lactis NRRL Y-1140
MSDPKLTKAVDSICDQFIVTKSKISQLTEYFIDCMEKGLEPCESDISQNKGLPMIPTFVTDKPSGQEHGVTMLAADLGGTNFRVCSVELLGNHEFKIEQEKSKIPTFFFQDDHHVTSKDLFQHMALITHQFLTKHHKDVIQDYKWKMGFTFSYPVDQTSLSSGKLIRWTKGFKIGDTVGQDVVQLFQQELNDIGLSNVHVVALTNDTTGTLLARCYASSDAARAINEPVIGCIFGTGTNGCYMEKLENIHKLDPASREELLSQGKTHMCINTEWGSFDNELNHLPTTSYDIKIDQQFSTNPGFHLFEKRVSGLYLGEILRNILLDLEKQELFDLKESVLKNNPFILTTETLSHIEIDTVENDLQDTRDALLKAADLETTFEERVLIQKLVRAISRRAAFLAAVPIAAILIKTNALNQSYHCQVEVGCDGSVVEHYPGFRSMMRHALALSPIGPEGERDVHLRISKDGSGVGAALCALHANY

SEQ ID NO: 149247 - DNA, 1422 bp, Debaryomyces hansenii CBS767
  CDS (1)..(1422)
atgttaaacttaaaattacagacagcagttgacgatatcgtgaaccaattcaccgttactgaagaatttcttcacgatgcgactaaggaatttactaaatcaatggacactggtttacaaaacactgcgtcgaaaagagaatacatgccaatgatcccaacgtatgtcactggtattcctactggtaaggaaaaaggcttatttttagcagcagatttaggtggtactaattttagagtctgttctgtcaatcttcatggagaccacactcatgaattaaagcaatcaaaatacagtatcccattggatttgatgaagaactctactgccgatagtttattctctttcttagccaaaaaggttgaaacatttttgaaggataatcatgatgacctagaagcagatgagcaattaaaattaggctttactttctctttccctatcaaccagactgctttaaataggggcactttaattcgttggacaaagggattcgatttaccagattgtgttgacaaggacgttgttgagttattacaatccaacattgacttgttaggatgtaaagtcaatgtggtagcattagccaatgatactgttggtacattattatcaagagcctattccaataaccctgagaaaactaacgctaacactattgtgggtgctatttttggtactggtactaatggagcatattttgaaacccttgataatattcctaaattaaaatctactaatattccagaaggtgccaaaggtatggtaattaatactgaatggggttcgttcgataacactctaaaaatattaccaaaaactaaatatgatgaaattgtcgattcagaaactgctaataaaggctttcatttatttgaaaaaagaattagtggaatgtttatgggagaaattttacgtgtttgtttgattgatttatttcaacgtgaccttatctttgttgatttatataaatctagaggtggttcattacctcacagattatctgaagaatggttattatcttctgaggttttatcttacttgcagattgatgattcaactgacttaaaaatgtctgaattaatattagagaacgaattaagattgcctactactaaagaagaaaggatagttattcagaaattgactcaagctattgcgcatagagctgcttatctttcggctattcctgttgctgctatactcaatcgtgtcaagggacaattctccaacgataatagggactttgaattcggttgtgacggatctgttgtagaattttatccgggattccaggcttctattttagaagcattagaaataatcaatcctttagagggagaaaagaaaaaggtccacttaaaaattgccaaagatggcagtggagttggagctgcgttatgtgccagcacagcaaaataa

SEQ ID NO: 149248 - protein, 473 aa, Debaryomyces hansenii CBS767
MLNLKLQTAVDDIVNQFTVTEEFLHDATKEFTKSMDTGLQNTASKREYMPMIPTYVTGIPTGKEKGLFLAADLGGTNFRVCSVNLHGDHTHELKQSKYSIPLDLMKNSTADSLFSFLAKKVETFLKDNHDDLEADEQLKLGFTFSFPINQTALNRGTLIRWTKGFDLPDCVDKDVVELLQSNIDLLGCKVNVVALANDTVGTLLSRAYSNNPEKTNANTIVGAIFGTGTNGAYFETLDNIPKLKSTNIPEGAKGMVINTEWGSFDNTLKILPKTKYDEIVDSETANKGFHLFEKRISGMFMGEILRVCLIDLFQRDLIFVDLYKSRGGSLPHRLSEEWLLSSEVLSYLQIDDSTDLKMSELILENELRLPTTKEERIVIQKLTQAIAHRAAYLSAIPVAAILNRVKGQFSNDNRDFEFGCDGSVVEFYPGFQASILEALEIINPLEGEKKKVHLKIAKDGSGVGAALCASTAK

SEQ ID NO: 149249 - DNA, 1449 bp, Debaryomyces hansenii CBS767
  CDS (1)..(1449)
atggtgcacttaggtccaaaacctccacagcacagaaagggtacttttaccgatgttcctgaagatctcatgaaggagttgaatgagttagaagaattattgactgtttctccagacaccttaaaaaaaatcactgaacacttcattggtgaattggaaaaggggttatccaagcaaggaggtaacattcctatgatcccaggatgggttttagatttcccaactggtaaggaaaagggagactatttggctattgatttaggtggaactaacttaagagttgtgttagttaagttaggtggtaacagagatttcgataccactcaatctaagttcgcattaccagaaaccatgagaactgctacttctgatgaattgtggactttcattgctgaatgtttgaagaagttcgttcaagaagaattcccacaagggtgcactaaacctttaccgttaggtttcactttctcttacccagcaagtcaaaagtctatcaacactggtgttttacaaagatggactaaaggttgggatatcgatggtgttgaaggccacgacgttgttccaatgttacaaaaggctatcgagaaggttggagtcccaatcaatgttgttgctttgattaacgataccactggtactttagttgcttccatgtacaccgatgctgagactagaatgggtttgatctatggtactggttgtaatggtgcctactatgatgttgttagtgatattccaaagttggaaggcaagatgccaagcgatgttgaccaaagtgccccaatggcaatcaactgtgaatatggtgcatttgacaatgaactcgtcgtgttaccaagaacgaagtatgatattctcatcgacaaacaatctccaagaccaggccaacaatcttatgaaaagatgatttccggttactacttaggtgaagtcttgagattgattttacttgatttagccaaggaaaagaaattgatcttcaagggtcaagatttatctaagttagaaaccgaatttatcttagatacctcattcccttctaggatcgaagaagatccatttgaaaacttaagcgacactgccgaattattccaaaaagaattaggtattcaaaccacttcgccagaaagaaagatcattcgtcgtcttgctgaattaatcggtgaaagatctgctagattatttgtctgtggtattgccgcaatttgtaagaagagaggttacaagactgcccattgtgctgctgacggttccgtttacaacaaataccctggtgtcaaggaaagaactgctaaggccttaagagatatttttgaatgggaaactaaagaagaccttatcactattgtccacgccgaagatggttccggtgttggtgctgcagtcatcgctgccttaaccgaaaagagattggaacaaggcttatctgttggtattcaagattaa

SEQ ID NO: 149250 - protein, 482 aa, Debaryomyces hansenii CBS767
MVHLGPKPPQHRKGTFTDVPEDLMKELNELEELLTVSPDTLKKITEHFIGELEKGLSKQGGNIPMIPGWVLDFPTGKEKGDYLAIDLGGTNLRVVLVKLGGNRDFDTTQSKFALPETMRTATSDELWTFIAECLKKFVQEEFPQGCTKPLPLGFTFSYPASQKSINTGVLQRWTKGWDIDGVEGHDVVPMLQKAIEKVGVPINVVALINDTTGTLVASMYTDAETRMGLIYGTGCNGAYYDVVSDIPKLEGKMPSDVDQSAPMAINCEYGAFDNELVVLPRTKYDILIDKQSPRPGQQSYEKMISGYYLGEVLRLILLDLAKEKKLIFKGQDLSKLETEFILDTSFPSRIEEDPFENLSDTAELFQKELGIQTTSPERKIIRRLAELIGERSARLFVCGIAAICKKRGYKTAHCAADGSVYNKYPGVKERTAKALRDIFEWETKEDLITIVHAEDGSGVGAAVIAALTEKRLEQGLSVGIQD

SEQ ID NO: 149251 - DNA, 1605 bp, Yarrowia lipolytica CLIB122
  CDS (1)..(1605)
atggttcatcttggtccccgaaaacccccgtcccgaaagggctcaatggcagacgtcccgcgggacctgctggagcaaatctcccagcttgaaaccatcttcaccgtttcgcccgaaaagctgcgtcaaatcaccgaccactttgtgtccgagctcgctaaaggcctcacaaaggagggtggagatatccccatgaaccccacctggattctgggatggcccaccggaaaggagagcggctgctatctggctctcgacatgggtggcaccaacctgcgagttgtcaaggtgactctggacggcgaccgaggcttcgacgtcatgcagtccaagtaccacatgccccccaacatcaaggtcggcaagcaagaggagctgtgggagtacattgccgaatgtctgggcaagttcttggccgacaattatcctgaggctcttgatgcccatgagcgaggacgagatgtcgacagaaccgctgcgcagagcttcactcgagacaagtctcctcctccccacaaccagcacatttcgtgttctcctggcttcgacatccacaagattcctctcggtttcaccttttcatatccctgctctcagcccgccgtcaaccgaggtgtactgcagcgatggaccaagggtttcgacattgagggagtcgagggcgaggacgtggtccccatgctggaagctgccctcgaaagaaagaacattcctatttccatcaccgccctgatcaacgacaccaccggaactatggtggcctccaactaccacgacccccagatcaagctgggtaacatctttggtactggtgtcaacgccgcctactacgagaaggtcaaggacattcccaagctcaagggtctcatccccgacagcattgatcccgagacccccatggccgtcaattgcgagtatggagccttcgacaatgagcacaaggttctccctagaaccaagtgggacatcatcatcgatgaggagtctccccgacccggtcagcagaccttcgagaagatgagtgctggctactacctgggagaattgcttcgtctggttcttctggacctgtacaaggacgggtttgtgttcgagaaccagggcaagaacggtcaggagcttggaaacggcaacatcaacaagtcgtatttcttcgacacctctttcctgtctctgattgaggaggatccctgggagaacttgactgatgtcgagattctcttcaaggagaagcttggtattaacaccactgagcccgagcgaaagctcattcgtcgactggccgagctcattggtactcgatccgctcgaatctctgcctgtggtgtcgctgccatctgtaagaaggctggctacaaggaggctcacgctggagctgacggatccgtgttcaacaagtaccccggattcaaggagcgaggcgcccaggctctcaacgagatttttgagtggaacctgcccaaccctaaggaccaccccatcaaaatcgttcccgctgaggatggtagcggtgttggagctgctctgtgcgctgctctcaccatcaagcgagtcaagcagggtcttcccgttggtgtcaagcccggtgtcaagtacgatatttag

SEQ ID NO: 149252 - protein, 534 aa, Yarrowia lipolytica CLIB122
MVHLGPRKPPSRKGSMADVPRDLLEQISQLETIFTVSPEKLRQITDHFVSELAKGLTKEGGDIPMNPTWILGWPTGKESGCYLALDMGGTNLRVVKVTLDGDRGFDVMQSKYHMPPNIKVGKQEELWEYIAECLGKFLADNYPEALDAHERGRDVDRTAAQSFTRDKSPPPHNQHISCSPGFDIHKIPLGFTFSYPCSQPAVNRGVLQRWTKGFDIEGVEGEDVVPMLEAALERKNIPISITALINDTTGTMVASNYHDPQIKLGNIFGTGVNAAYYEKVKDIPKLKGLIPDSIDPETPMAVNCEYGAFDNEHKVLPRTKWDIIIDEESPRPGQQTFEKMSAGYYLGELLRLVLLDLYKDGFVFENQGKNGQELGNGNINKSYFFDTSFLSLIEEDPWENLTDVEILFKEKLGINTTEPERKLIRRLAELIGTRSARISACGVAAICKKAGYKEAHAGADGSVFNKYPGFKERGAQALNEIFEWNLPNPKDHPIKIVPAEDGSGVGAALCAALTIKRVKQGLPVGVKPGVKYDI

SEQ ID NO: 149253 - DNA, 1440 bp, Yarrowia lipolytica CLIB122
  CDS (1)..(1440)
atgacaatcactctgagtcagaaggttggcgagttcgcctccgagttcgccatcgatggcagctatgttcagcaaggcgtcaaacacttcgtcgatcagacagcacaggccctctcagcaaacatggaaagagcaatgcccatgattccctcgtttgtcacccgaattcccacagggaaggaaaagggtgtccagttggcagttgacctgggaggcactaacttccgggtctcatccgtgcacctgaatggtgaccacacccacaaaacggtggcatcaaaagttgctgtcagcgatgacctcatgactggcactcaagctgacttctttggatttttggcccagcaagtgaaagatttcttaacagaacaccactcagaacatttcagccagactgagcctttgcgaatgggagtgaccttctcgttccccgtcaatcaggtagctttagacaagggctatcttttgagatggaccaagggttatgatatcaaggatgctgttggaaaagacgtcgtggagctatttcagatccagctcgatgctcttgacctgaatgtgaagattgtggctctggtcaacgacaccgtgggcacactattggcgcgagcttacgcctctaaatccgacgatggtaagcataagcagaccttgatcggcgcaatctttggcaccggaaccaatggtgcttactcagaaagacttaagcgggtccccaagtttaccgctgcgaattaccctgaagttttcaagcgctactcaccagagcacatcgcgaaccaaactatgattatcaataccgagtggggatcttacgataatgacattgacgtcctcccaaacaccaaatgggatattgacttggacgaaaacactcacaacaagtcttttcacatgtttgaaaagcggatttctggaatgttcctgggtgagctgttgcggctctgtcttttggatttgaagagtgagggcctacttcttcaatccacaaagttggaaggaaaccctgtttggaagggatttggaatggacacttcggtcttgtcattcattgaagcagccactgaggcacagatcgagacaggaaagggcgactatgagaaaatcatcaaggccatgggtctggccgccaaggacatcactcctgaacaagttgctgccctgaaacccctggttacggctattggtagacgatctgcgtatctatctgccattcctttagctgccattactcttcatactcacgctttggagaaattcgacgttgttgacattggagttgacggttctgtcttccagttttaccccaaatttgctgatatggtgaaagaagcgatgggctatgtcgagggtatttctgttgaccgtatcgacatcggccacgcagaagatggctcaggggtgggagctgccttggctgcttacccggacgactcatag

SEQ ID NO: 149254 - protein, 479 aa, Yarrowia lipolytica CLIB122
MTITLSQKVGEFASEFAIDGSYVQQGVKHFVDQTAQALSANMERAMPMIPSFVTRIPTGKEKGVQLAVDLGGTNFRVSSVHLNGDHTHKTVASKVAVSDDLMTGTQADFFGFLAQQVKDFLTEHHSEHFSQTEPLRMGVTFSFPVNQVALDKGYLLRWTKGYDIKDAVGKDVVELFQIQLDALDLNVKIVALVNDTVGTLLARAYASKSDDGKHKQTLIGAIFGTGTNGAYSERLKRVPKFTAANYPEVFKRYSPEHIANQTMIINTEWGSYDNDIDVLPNTKWDIDLDENTHNKSFHMFEKRISGMFLGELLRLCLLDLKSEGLLLQSTKLEGNPVWKGFGMDTSVLSFIEAATEAQIETGKGDYEKIIKAMGLAAKDITPEQVAALKPLVTAIGRRSAYLSAIPLAAITLHTHALEKFDVVDIGVDGSVFQFYPKFADMVKEAMGYVEGISVDRIDIGHAEDGSGVGAALAAYPDDS

SEQ ID NO: 149255 - DNA, 1338 bp, Apis mellifera
  CDS (1)..(1338)
atgattaaacaggagattagagacatctgtaaagacctggtcctctcagatgaaaaacttcgacagcttatggacactttgaacgaccaattacataaaggtctaggtaaggaaacgcatgctactgcgacaacgaaatgcttcccaacctacgttcaagatcttccccaaggcacagagaagggcaactttttggccctggatcttggcgggacaaatttcagagtactattgatcactctggatgaacagaatttcgacatgaagagtaaaatttatgttataccgcaaagtttaatggtgggaaccggtgtacaactcttcgaccacatagctcactgtttggccttgttcgtcaaggacttgaatcttcagaatgaagttctacctcttgggtttacttttagcttcccattggaccagcatggactaaccaaaggctatttgatcaggtggacgaagggattcaaatgtgatgatataataggtgaagatatagttgatttacttgaacaggcgattaagaaaagaggtgatgtgaaaatccagatatgcgccattttaaatgacactactggcactttgatgtcatgcgcttggaaaaacaagaattgccgtatcggattaattgtcggaactggtaccaatgcctgctacgtagaaaagttagaaaacatacaaaccgtgtatccagaaaacgtattaccaggaaaacctaaaatgctgatcaatatcgaatggggtgccttcggtgagggtacacttcttgattttattgcaacagacattgatcgtgatgtcgacgagaattcgattaatccggcgaaacaagtattcgagaagatgatctctggcatgtatatgggagaattggtaaggttgctcattgagaaagcgataaatgctggactattgtttatcgggaagtctaccaacgagctcaaaaaacgtggaagattctacgcgaaatacgtttcagaaattgaaaatgatcctaatgggaaatatacgaattgtcgtgaagtattggcagaattaggattgcgaaatgttactgatcaagactgcgagaacgttaagtacatttgctctgttgtatcaaggagagcagctcatttggccagtgctggaattgctacattgttgaataaaatggacgaagataatgttgtcgtaggaattgatggctcggtatatagatatcatccacactttcacaatcttatgaccgagaagataagccaattacagaatcataagttcgaattaatgctctccgaggatggtagcggtcgtggagcggcgctggtcgccgcagtggctgctgggaatcgatga

SEQ ID NO: 149256 - protein, 445 aa, Apis mellifera
MIKQEIRDICKDLVLSDEKLRQLMDTLNDQLHKGLGKETHATATTKCFPTYVQDLPQGTEKGNFLALDLGGTNFRVLLITLDEQNFDMKSKIYVIPQSLMVGTGVQLFDHIAHCLALFVKDLNLQNEVLPLGFTFSFPLDQHGLTKGYLIRWTKGFKCDDIIGEDIVDLLEQAIKKRGDVKIQICAILNDTTGTLMSCAWKNKNCRIGLIVGTGTNACYVEKLENIQTVYPENVLPGKPKMLINIEWGAFGEGTLLDFIATDIDRDVDENSINPAKQVFEKMISGMYMGELVRLLIEKAINAGLLFIGKSTNELKKRGRFYAKYVSEIENDPNGKYTNCREVLAELGLRNVTDQDCENVKYICSVVSRRAAHLASAGIATLLNKMDEDNVVVGIDGSVYRYHPHFHNLMTEKISQLQNHKFELMLSEDGSGRGAALVAAVAAGNR

SEQ ID NO: 149257 - DNA, 1473 bp, Aspergillus nidulans FGSC A4
  CDS (1)..(1473)
atggtcggagtcggtcccaaacgccctccctctcgcaagggttccatgtcagacgtgccccaaaatctcctggagcatattaagcactttgaggagatcttcactgttgatactgccacgcttaaaaagatcgttgaccatttcgtcaacgagctgacgaagggtctctctgttgagggcggcaacattcccatgaacgtcacatgggttcttggattccccgacggaaaagaaacgggcacgttcctggccctcgatatgggcggcaccaacctgcgggtttgtgaaattaccctgaccgaggagaaaggtggattcgatatcatccaatccaaataccgaatgcccgaggagctcaagaccggcgaggcagaggagttgtggcaatatatcgtcgactgcgtcgagcagtttattcagttccaccacgagaacgagaacctatctaaattgccgctgggattcacgttctcctaccctgctactcaggactacatcgaccacggagttctccagcgctggaccaagggtttcgacattgatggtgtcgaaggtaaagacgtagtcccgcctcttgagaaggtcttcaaggaacggggcctgcccatcaaggtcgctgccttgatcaacgacacaaccggaaccctcattgcttcttcttacaccgaccccgctatgaagatcggctgcattttcggcaccggtgtgaatgcagcatacatggagaatgctggctctattccaaagctggcccacatgaatctgcctccggacatgcccgtcgccatcaattgcgaatacggtgcctttgacaacgaacatattgtcctcccgctcaccaagtacgaccacatcatcgaccgcgattcacctcgtcccggccagcaagcttttgagaagatgacggctggtctgtatctgggcgaaatcttccgcttggccttggtagatattttggacacacagccgggtctaatcttcaaggatcaggatacctcgcagctgcggatcccataccttctggattcatccttccccgcagctatcgaagaagacccttacgaaaaccttatcgagaccgccgaactcgtccaaaacatgctcaagataaaagcaacacgctcagagctcgaactgatgcgccggcttgccgagctgatcggtactcgcgctgctcgcctatccgcctgtggtgttgccgcaatctgcaagaagaagaacatcgagtcttgccacgtcggggccgacggctcggtattcacaaaatacccccacttcaaggcccgcggtgctcaggctctgcgtgagatcctcgactgggcccccagtgagaaggacaaggtcaccatccatgctgccgaggatgggtctggtgtgggtgcggctctcatcgccgccttgaccctgaagcgtgtcaaggctggcaacacggccggtattcgtgatgcgcaggccatgctggctatgtgctag

SEQ ID NO: 149258 - protein, 490 aa, Aspergillus nidulans FGSC A4
MVGVGPKRPPSRKGSMSDVPQNLLEHIKHFEEIFTVDTATLKKIVDHFVNELTKGLSVEGGNIPMNVTWVLGFPDGKETGTFLALDMGGTNLRVCEITLTEEKGGFDIIQSKYRMPEELKTGEAEELWQYIVDCVEQFIQFHHENENLSKLPLGFTFSYPATQDYIDHGVLQRWTKGFDIDGVEGKDVVPPLEKVFKERGLPIKVAALINDTTGTLIASSYTDPAMKIGCIFGTGVNAAYMENAGSIPKLAHMNLPPDMPVAINCEYGAFDNEHIVLPLTKYDHIIDRDSPRPGQQAFEKMTAGLYLGEIFRLALVDILDTQPGLIFKDQDTSQLRIPYLLDSSFPAAIEEDPYENLIETAELVQNMLKIKATRSELELMRRLAELIGTRAARLSACGVAAICKKKNIESCHVGADGSVFTKYPHFKARGAQALREILDWAPSEKDKVTIHAAEDGSGVGAALIAALTLKRVKAGNTAGIRDAQAMLAMC

SEQ ID NO: 149259 - DNA, 1470 bp, Aspergillus nidulans FGSC A4
  CDS (1)..(1470)
atgtccactgtggtagaagaggctacgcgcattgctcgccagttcgagtactcgccggagcaagtgcagcgcggagtgaaggagtacatcagggaggttgaggagggattgtccgaggagggcacaaccttaagtcagatcccgaccttcgtgacgtctgtgcccaatggcactgagaagggcttgtacttggccgttgaccttggaggcaccaacttccgagtctgctccatcgacttgcacggcaaccataccttctccctcacgcagtccaagatcatgattcctcgcgagatgatgacgtcaggatcagcaaaggagctcttcctctttcttgcgcgtcagatcgagtccttcctgcgcatccatcacaacgagcattttgaggctcatttgaaacgcaagattgccggaacagccagggaggaggatttgtttgatcttgggttcacatttagctttcctgtgcgccagttgggaattaacaagggtacgcttattcgctggacgaagggcttcgacattcccgacgccgtaggccaggatgtttgtgcgctcctgcaaaatgccatagaggaactgaacctccctgtgcgcgtggctgcgcttgtaaacgataccgtcggtacgctcatggctcgttcatacacgtctcctggcgagactggaacttttctcggtgcgatctttggaacaggcacgaacggtgcctacgtcgaaaaactcaacaagattaccaagatggccaagattgagcactctgattacgacaagtcaaccggcgagatgatcatcaatgctgaatggggtagcttcgataaccatctgagcgttctgcccactacggaatacgatcggcagctggatgctgacagcaacaacccgggtattcaaatgttcgaaaagcgcgtctctggtatgttcttgggcgagattctgcgtctggtcttgctcgacttgcacaagtcccaaggtctctttaagccggcttcggggtcggatgtcttcatcccagagtcgtcttccctctaccgacaatggggtattgacactagtcttctgagtattgtcgaggcagataagagcaaggatttcgagcaggttaaatccgcgctgaaggaccacctgaaggttgagcgggcgagcgaaaatgactgcaaggcagtccaaaccgttgttcatgctatcggcaaacgtgcggcccgcctggctgctgttcctattgccgccaccctcatttccacgggcaagctgaaggaagagctggtggacatcggcgttgacggcagcctggttgagttctaccccaactttgagggctatatgcgtgaagccatgcgcgaagttcctgaggtcggtgatgcgggagacaaaaaggtgcggataggtatctcaaaggacggcagtggagttggcgcggctcttattgctctcgtcgcaagcaaagaggggacaaagcccccgctgtga

SEQ ID NO: 149260 - protein, 489 aa, Aspergillus nidulans FGSC A4
MSTVVEEATRIARQFEYSPEQVQRGVKEYIREVEEGLSEEGTTLSQIPTFVTSVPNGTEKGLYLAVDLGGTNFRVCSIDLHGNHTFSLTQSKIMIPREMMTSGSAKELFLFLARQIESFLRIHHNEHFEAHLKRKIAGTAREEDLFDLGFTFSFPVRQLGINKGTLIRWTKGFDIPDAVGQDVCALLQNAIEELNLPVRVAALVNDTVGTLMARSYTSPGETGTFLGAIFGTGTNGAYVEKLNKITKMAKIEHSDYDKSTGEMIINAEWGSFDNHLSVLPTTEYDRQLDADSNNPGIQMFEKRVSGMFLGEILRLVLLDLHKSQGLFKPASGSDVFIPESSSLYRQWGIDTSLLSIVEADKSKDFEQVKSALKDHLKVERASENDCKAVQTVVHAIGKRAARLAAVPIAATLISTGKLKEELVDIGVDGSLVEFYPNFEGYMREAMREVPEVGDAGDKKVRIGISKDGSGVGAALIALVASKEGTKPPL

SEQ ID NO: 149261 - DNA, 1419 bp, Candida albicans SC5314
  CDS (1)..(1419): transl_table=12
atgtcactttcacccaaattagaagaaattgtcagctcaattgaaaaatcatttgaaattaaagatgattttttagtcaaagcaactgagtatttcgttgaatcaatgaatgttggtttggaatcgccaaaaccttcaaaagatgtcatgcctatgattccaacctatgttacctcaattccaactgggaaagaagtagggttatatttggcagctgatttaggtgggactaatttcagagtttgttcaattgacttaaaaggtgaccacacgttttccatgaaacaaagcaagtatcgaatccctgtggatttgatgaaagcagaaaagtccaatgatttatttggttttttggcaaagaaagtccaatctttcttacttgaaaaccattcggaagcctgtactgcaaaaaacaccgagcccctcaagttgggtttcactttctctttccctgttaatcaaactgcattgaatcgtggaacattaatcagatggactaaaggttttgatatccctgatactgttgaccgtgatgttgttgagttattacaagcaaatttgactatcttggaagtcaatgtcaaagttgtcgcaattgcaaacgatactgttggtactttgcttactgctgcttactccaatgactcagcaaagacaaacagaaacacaatcattggttgtatttttggtacaggaactaatggtgtttatttcgagtcaaaaattcccaaattatccagtttgactggcaaaagccaaggtatggtcatcaacacagaatggggttcatttgacaacggcttaaagatcttgccttccactgagtttgatgaaattgtcgattccgaaaccgctaaccctggttatcacttgtttgaaaagagaatcagtggaatgtttttgggagagattttgagggttgctttgattcatttatttaaaaatggtttgattttccaagagttgtacaaggcaagaggcggatcattgccacatcgcattgaagagccatggttgttggatgctgaagtgttgtcttatcttcagattgacgactctaccgatttgaaaacgtcaggtcttattctccaaaatgttctcagattggaaaccaacaaggaggaacgtgaagttattcaacgtttgacaagagctatttctcagagagctgcccatttgtctgcgatcccaattgcagctatagccaaaaaagtgaaagaccaatataaggatgatgatagagactttgaggttggttgtgatggttctgtgattgaattttatccaggattcagacaagcagtgttggagtcaattgaaaaaatcaatcctttgaagggcaccaataaaaagattcatttgaagatcgccaaagatgggtcaggcgttggtgcagcattgtgtgccagtaccgcatag

SEQ ID NO: 149262 - protein, 472 aa, Candida albicans SC5314
MSLSPKLEEIVSSIEKSFEIKDDFLVKATEYFVESMNVGLESPKPSKDVMPMIPTYVTSIPTGKEVGLYLAADLGGTNFRVCSIDLKGDHTFSMKQSKYRIPVDLMKAEKSNDLFGFLAKKVQSFLLENHSEACTAKNTEPLKLGFTFSFPVNQTALNRGTLIRWTKGFDIPDTVDRDVVELLQANLTILEVNVKVVAIANDTVGTLLTAAYSNDSAKTNRNTIIGCIFGTGTNGVYFESKIPKLSSLTGKSQGMVINTEWGSFDNGLKILPSTEFDEIVDSETANPGYHLFEKRISGMFLGEILRVALIHLFKNGLIFQELYKARGGSLPHRIEEPWLLDAEVLSYLQIDDSTDLKTSGLILQNVLRLETNKEEREVIQRLTRAISQRAAHLSAIPIAAIAKKVKDQYKDDDRDFEVGCDGSVIEFYPGFRQAVLESIEKINPLKGTNKKIHLKIAKDGSGVGAALCASTA

SEQ ID NO: 149263 - DNA, 1419 bp, Candida albicans SC5314
  CDS (1)..(1419): transl_table=12
atgtcactttcacccaaattagaagaaattgtcagctcaattgaaaaatcatttgaaattaaagatgattttttagtcaaggcaactgagtatttcattgaatcaatgaatgttggtttggaatcaccaaaaccttcaaaagatgtcatgcctatgattccaacctatgttacttcaattccaactgggaaagaagtagggctatatttggcagctgatttaggtgggactaatttcagagtttgttcaattgacttgaaaggtgaccacacattttccatgaaacaaagcaagtatcgaatccctgtggatttgatgaaagcagaaaagtccaatgatttatttggttttttggcaaagaaagtccaatctttcttatttgaaaaccattcggaagcctgtactgcaaaaaacaccgagcccctcaagttgggtttcactttctctttccctgttaatcaaactgcattgaatcgtggaacattaatcagatggaccaaaggttttgatatccctgatactgttgaccgtgatgttgttgagttattacaagcaaatttgactatcttggaagtcaatgtcaaagttgtcgcaattgcaaacgatactgttggtactttgcttactgctgcttactccaatgactcagcaaagacaaacagaaacacaatcattggttgtatttttggtacaggaacaaatggtgcttatttcgagtcaaaaattcccaaattatccagttcgactagcaaaagccaaggtatggtcatcaacacagaatggggttcatttgacaacggcttaaagatcttgccttccactgagtttgatgaaattgtcgattccgaaactgctaaccctggttatcacttgtttgaaaagagaatcagtggaatgtttttgggagagattttgagggttgctttaattcatttattcaaaaagggattgattttccaagagttgtacaaggcaagaggcggatctttgccacacagaattgaagagccatggttgttggatgctgaagtgttgtcttatctccagattgatgactccactgatttgaaaacgtcgggtcttattctccaaaatgttctcagattggaaaccaacaaggaggaacgtgaggttattcaacgtttgacaagagctatttctcagagagctgcccatttgtctgcgatcccaattgcagctatagccaaaaaagtgaaagatcaatataaggatgatgatagagactttgaggttggttgtgatggttctgtgattgaattttatccaggattcagacaagcagtgttggagtcaattgaaaaaatcaatcctttgaagggcaccaataaaaagatttatttgaagatcgccaaagatgggtcaggcgttggtgcagcattgtgtgccagtaccgcatag

SEQ ID NO: 149264 - protein, 472 aa, Candida albicans SC5314
MSLSPKLEEIVSSIEKSFEIKDDFLVKATEYFIESMNVGLESPKPSKDVMPMIPTYVTSIPTGKEVGLYLAADLGGTNFRVCSIDLKGDHTFSMKQSKYRIPVDLMKAEKSNDLFGFLAKKVQSFLFENHSEACTAKNTEPLKLGFTFSFPVNQTALNRGTLIRWTKGFDIPDTVDRDVVELLQANLTILEVNVKVVAIANDTVGTLLTAAYSNDSAKTNRNTIIGCIFGTGTNGAYFESKIPKLSSSTSKSQGMVINTEWGSFDNGLKILPSTEFDEIVDSETANPGYHLFEKRISGMFLGEILRVALIHLFKKGLIFQELYKARGGSLPHRIEEPWLLDAEVLSYLQIDDSTDLKTSGLILQNVLRLETNKEEREVIQRLTRAISQRAAHLSAIPIAAIAKKVKDQYKDDDRDFEVGCDGSVIEFYPGFRQAVLESIEKINPLKGTNKKIYLKIAKDGSGVGAALCASTA

SEQ ID NO: 149265 - DNA, 1419 bp, Candida albicans SC5314
  CDS (1)..(1419): transl_table=12
atgtcactttcacccaaattagaagaaattgtcagctcaattgaaaaatcatttgaaattaaagatgattttttagtcaaggcaactgagtatttcattgaatcaatgaatgttggtttggaatcaccaaaaccttcaaaagatgtcatgcctatgattccaacctatgttacctcaattccaactgggaaagaagtagggttatatttggcagctgatttaggtgggactaatttcagagtttgttcaattgacttgaaaggtgaccacacattttccatgaaacaaagcaagtatcgaatccctgtggatttgatgaaagcagaaaagtccaatgatttatttggttttttggcaaagaaagtccaatctttcttacttgaaaaccattcggaagcctgcactgcgaaaaacaccgagcccctcaagttgggtttcactttctctttccctgttaatcaaactgcattgaatcgtggaacattaatcagatggaccaaaggttttgatatccctgatactgttgaccgtgacgttgttgagttattacaagcaaatttgactatcttggaagtcaatgtcaaagttgtcgcaattgcaaacgatactgttggtactttgcttactgctgcttactccaatgactcagcaaagacaaacagaaacacaatcatcggctgtatttttggtacaggaacaaatggtgcttatttcgagtcaaaaattcccaaattatccagttcgactggcaaaagccaaggtatggtcatcaacacagaatggggttcatttgacaacggcttaaagatcttgccttccactgagtttgatgaaattgtcgattccgaaaccgctaaccctggttatcacttgtttgaaaagagaatcagtggaatgtttttgggagagattttgagggttgctttgattcatttatttaaaaagggtttgattttccaagagttgtacaaggcaagaggtggatcattgccacatcgtattgaagagccatggttgttggatgctgaagtgttgtcttatctccagattgatgactccactgatttgaaaacgtcaggtcttattctccaaaatgttctcagattggaaaccaacaaggaggaacgtgaggttattcaacgtttgacaagagctatttctcagagagctgcccatttgtctgcgatcccaattgcagctatagccaaaaaagtgaaagaccaatataaggatgatgatagagactttgaggttggttgtgatggttctgtgattgaattttatccaggattcagacaagcagtgttggagtcaattgaaaaaatcaatcctttgaagggcaccaataaaaagattcatttgaagatcgccaaagatgggtcaggcgttggtgcagcattgtgtgccagtaccgcatag

SEQ ID NO: 149266 - protein, 472 aa, Candida albicans SC5314
MSLSPKLEEIVSSIEKSFEIKDDFLVKATEYFIESMNVGLESPKPSKDVMPMIPTYVTSIPTGKEVGLYLAADLGGTNFRVCSIDLKGDHTFSMKQSKYRIPVDLMKAEKSNDLFGFLAKKVQSFLLENHSEACTAKNTEPLKLGFTFSFPVNQTALNRGTLIRWTKGFDIPDTVDRDVVELLQANLTILEVNVKVVAIANDTVGTLLTAAYSNDSAKTNRNTIIGCIFGTGTNGAYFESKIPKLSSSTGKSQGMVINTEWGSFDNGLKILPSTEFDEIVDSETANPGYHLFEKRISGMFLGEILRVALIHLFKKGLIFQELYKARGGSLPHRIEEPWLLDAEVLSYLQIDDSTDLKTSGLILQNVLRLETNKEEREVIQRLTRAISQRAAHLSAIPIAAIAKKVKDQYKDDDRDFEVGCDGSVIEFYPGFRQAVLESIEKINPLKGTNKKIHLKIAKDGSGVGAALCASTA

SEQ ID NO: 149267 - DNA, 1455 bp, Candida albicans SC5314
  CDS (1)..(1455): transl_table=12
atggtgcatctcggtccaaaaccagctcaaaaaagaaagggaactttcactgatgtttctcctcaattattagaagctcttaaaccaattcaagagcaattcaccatttctgcagacaaattgagagctattgttaaacatttcatctcagaattagaccgtggtttatcaaaagctggtggtaacattcctatgattccaggttgggtcatggatttcccaaccggtaaagaaactggttcttatcttgccattgacttgggtggaaccaacttgagagttgtcttggttaaattgggcggtaacagagactttgacaccactcaatccaagtttgctttgccagctcacatgagaactgccaccctggacgaattatgggattttattgctaaatgtttgaaagagtttgttgatgaaatctacccagatggttgcagtgaaccattgccattgggtttcacatttagttatccagcttctcaaaaccgtatcaatgaaggtatcttgcaaagatggactaaaggctggtcaattgatggaattgaaggaaaggatgttgttccaatgttgcaaaaagctattaagaaagttggtgtcccaattgatgttgttgcgttgatcaacgataccacaggtacattagttgcttctatgtacacagacccagaagctaagatgggtttgatttttggtactggtgtcaacggtgcttatttcgatgttgtcaaggacattcctaaattagaaggtaaatgtccatcagatattccaccagaatcaccaatggccatcaactgtgagtacggttcatttgataacgaaaagtatatcttgccaagaactaaatacgatgttcaaattgacgaagaatcaccaagaccaggtcaacaaactttcgaaaagatgatctccggttactatttgggagaagttttgagattgattttattggaatttgctgaagagaagaaattgatcttcaaaggtcaaaaccttgacaagttgaaggttccatacgtcatggatgcctcttatccatccaaaattgaagaagatccatttgaaaacttgtctgatgtcgccgacttatttagagaaaaattgggcattgaaaccacagaaccagaaagaaagattatccgttgtttagcggaattgattggtgaaagatctgctagattctctgtttgtggtattgctgctatttgccaaaagagaggttacaaaaccgctcattgtgctgctgacggttcagtgtacaacaagtacccagggttcaaagaaagaactgcccaagctttaagagacatctacgaatggccagctgatgtcaaggacccaatcatcattgttccagctgaagatggtagtggtgttggtgctgccgttattgctgctttgaccgaaaagagattaaaagaaggtaaatccgttggtttgttgggtgcttag

SEQ ID NO: 149268 - protein, 484 aa, Candida albicans SC5314
MVHLGPKPAQKRKGTFTDVSPQLLEALKPIQEQFTISADKLRAIVKHFISELDRGLSKAGGNIPMIPGWVMDFPTGKETGSYLAIDLGGTNLRVVLVKLGGNRDFDTTQSKFALPAHMRTATSDELWDFIAKCLKEFVDEIYPDGCSEPLPLGFTFSYPASQNRINEGILQRWTKGWSIDGIEGKDVVPMLQKAIKKVGVPIDVVALINDTTGTLVASMYTDPEAKMGLIFGTGVNGAYFDVVKDIPKLEGKCPSDIPPESPMAINCEYGSFDNEKYILPRTKYDVQIDEESPRPGQQTFEKMISGYYLGEVLRLILLEFAEEKKLIFKGQNLDKLKVPYVMDASYPSKIEEDPFENLSDVADLFREKLGIETTEPERKIIRCLAELIGERSARFSVCGIAAICQKRGYKTAHCAADGSVYNKYPGFKERTAQALRDIYEWPADVKDPIIIVPAEDGSGVGAAVIAALTEKRLKEGKSVGLLGA

SEQ ID NO: 149269 - DNA, 1410 bp, Tribolium castaneum
  CDS (1)..(1410)
atgcatccgaaacaacacccaagccagaaaagaacctgcatgtgcagaccccttcccattccacgcaccgaatgccagaatcctgaaatccgcgaaaaatgccaagagctcatcctgagcaacgcacaactggaagaatacaagaagaaactgctgaacgacttgaagaaaggtctcggaaaggcgacccacccgacatcgattgtaaaatgtttcattacctacgtccaagacctgcccgatggttcagaaacgggtaaattccttgcactggatcttggcggcacaaatttccgcgtacttttgatcgaactgagcaagaatcacttcgaaatgcggtcgaaaattttcgccatccctcagcacatcatgttgggctctggcgaacaacttttcgaccacatcgccgattgtttggccaagttcgccaaagatgagaagatccaacacgaggttttaccgttgggtttcacgttcagtttcccgttgatgcagaagggactgactaaggggattctggagcggtggaccaaagggttcaattgctcgaacgttgtgggtaacgacgtggtccagatgctcaaagatgcgattgacagacgcggggacattcagattgaggtttgtgccattttaaacgataccacgggaacactcatgtcatgtgcatggaaaaatcgctattgcaagatcggcttgatcatcggcactggcacgaacgcgtgttacgtggaagaccagaaaaacgccgaaatgtttgacgagcctgatcgcggttccggcaaagtgctaatcaattgcgaatggggggctttcggagacgacggagccctggatttcgtgcgaacgcaatacgaccgtgaagtggacgaacacacggtgaatcccgggaagcaactgcacgaaaaaatgatttccggcatgtacatgggagagttggtaagactggccctcgagcgcttcacaaacgagggattgttgttcgggggtaaaggttccgaccagttgtttacccgcgaccggttttacacgaaatacgtttcggaaatcgagagtgatcccccgggaacgttcacaaactgcaaggagattctcgaggagttgggcttgaaacatgccactgaacaagactgtattaatgtgaggtatgtctgcgaatgcatttctcgcagagctgctcatttggcgtcggctggaatcgccacgcttttgaataaaatgaaagagccgagggtgacagtcgggatcgatgggtctctgtacaggttccacccacatttccataatttgatgatggagaagatttccgagttggtcgagccggggattgtgtttgatttgatgttgtctgaggacgggagcggacgcggggctgcgctagtggcagccgtggcttcacgtaaacggtga

SEQ ID NO: 149270 - protein, 469 aa, Tribolium castaneum
MHPKQHPSQKRTCMCRPLPIPRTECQNPEIREKCQELILSNAQLEEYKKKLLNDLKKGLGKATHPTSIVKCFITYVQDLPDGSETGKFLALDLGGTNFRVLLIELSKNHFEMRSKIFAIPQHIMLGSGEQLFDHIADCLAKFAKDEKIQHEVLPLGFTFSFPLMQKGLTKGILERWTKGFNCSNVVGNDVVQMLKDAIDRRGDIQIEVCAILNDTTGTLMSCAWKNRYCKIGLIIGTGTNACYVEDQKNAEMFDEPDRGSGKVLINCEWGAFGDDGALDFVRTQYDREVDEHTVNPGKQLHEKMISGMYMGELVRLALERFTNEGLLFGGKGSDQLFTRDRFYTKYVSEIESDPPGTFTNCKEILEELGLKHATEQDCINVRYVCECISRRAAHLASAGIATLLNKMKEPRVTVGIDGSLYRFHPHFHNLMMEKISELVEPGIVFDLMLSEDGSGRGAALVAAVASRKR

SEQ ID NO: 149271 - DNA, 1359 bp, Tribolium castaneum
  CDS (1)..(1359)
atggcagcggaaaaagttgatccagtgctcaaagaaagatgcaaagatctgatcctcgaccttgacaccctcagggaaatctcgcgtcgcttcctgcacgacgtggacaaagggcttcgcaaagacacccatgccacgtccatcgtcaaatgtttcgtgacctacgtccaggacctgcccaatgggaccgaaaacgggaaattcctagctctagatctgggcgggaccaacttccgcgtccttttgatcgaactgagtaaagaccatttcgaaatgagatcaaaaatctacgctattccccagcacatcatgctgggctctggagagcagcttttcgaccatattgccgattgtctcgcttcgttcatgaagcaggagcaagtcattgccgagacgctgcctttggggttcactttcagttttcccttgacgcagaagggcctgactaaggggattttggagaggtggacgaagggcttcaactgctcgaattgtgtcgggaacgatgttgttcagctgctcaaagatgctatagccaggcgaggggacattcagatcaaagtgtgtgccattttaaacgacaccactggcaccctgatgtcctgtgcgtggaagaacccgaactgccgaatcggcctaatagttggcactggcagtaacgcttgttacgtcgagaagcaaaaaaacgccgaactcttcgacgacgaggacaaaggttccggaaacgtgataatcaacctcgaatggggcgcgttcggcgacgacggagccctcgatttcatccgaacggagtacgatcgtgacgtcgacgcgaattcggtgaatcccgggcgccaactgcacgagaaaatgatttcggggatgtacatgggggaattgacgcgtctagccttggagaaattcaccaaagaagggctgctgtttgagggcaaagcctcggatgcgttgttcacgcgcgggaagttttacaccaagtacgtgtcagagattgagggcgaccctgcgggggtgataacgagctgtcgggatattctggaggagttggggatttatcacgccacggatcaggactgcttcaatgtgagatacgtctgtgaatgcgtttcgaagcgggctgcggatttggcgtccacagggattgccaccttgttgaataaaatgaacgaggcgagggtcacagtggccattgatgggagtgtctataggtaccatccacatttccatgaccttatgatgcaaacgatttcgactttggtcaatccgggaattaagttcgatttgatgctgtcggaggacgggagtggacgaggggccgctctggtcgctgctgtggcctgtcggacccaacagaagggatag

SEQ ID NO: 149272 - protein, 452 aa, Tribolium castaneum
MAAEKVDPVLKERCKDLILDLDTLREISRRFLHDVDKGLRKDTHATSIVKCFVTYVQDLPNGTENGKFLALDLGGTNFRVLLIELSKDHFEMRSKIYAIPQHIMLGSGEQLFDHIADCLASFMKQEQVIAETLPLGFTFSFPLTQKGLTKGILERWTKGFNCSNCVGNDVVQLLKDAIARRGDIQIKVCAILNDTTGTLMSCAWKNPNCRIGLIVGTGSNACYVEKQKNAELFDDEDKGSGNVIINLEWGAFGDDGALDFIRTEYDRDVDANSVNPGRQLHEKMISGMYMGELTRLALEKFTKEGLLFEGKASDALFTRGKFYTKYVSEIEGDPAGVITSCRDILEELGIYHATDQDCFNVRYVCECVSKRAADLASTGIATLLNKMNEARVTVAIDGSVYRYHPHFHDLMMQTISTLVNPGIKFDLMLSEDGSGRGAALVAAVACRTQQKG

SEQ ID NO: 149273 - DNA, 1347 bp, Tribolium castaneum
  CDS (1)..(1347)
atggttattcaagttaccccaactatccgcgaaaaatgccaagagctcatcctgagcaacgcacaactggaagaatacaagaagaaactgctgaacgacttgaagaaaggtctcggaaaggcgacccacccgacatcgattgtaaaatgtttcattacctacgtccaagacctgcccgatggttcagaaacgggtaaattccttgcactggatcttggcggcacaaatttccgcgtacttttgatcgaactgagcaagaatcacttcgaaatgcggtcgaaaattttcgccatccctcagcacatcatgttgggctctggcgaacaacttttcgaccacatcgccgattgtttggccaagttcgccaaagatgagaagatccaacacgaggttttaccgttgggtttcacgttcagtttcccgttgatgcagaagggactgactaaggggattctggagcggtggaccaaagggttcaattgctcgaacgttgtgggtaacgacgtggtccagatgctcaaagatgcgattgacagacgcggggacattcagattgaggtttgtgccattttaaacgataccacgggaacactcatgtcatgtgcatggaaaaatcgctattgcaagatcggcttgatcatcggcactggcacgaacgcgtgttacgtggaagaccagaaaaacgccgaaatgtttgacgagcctgatcgcggttccggcaaagtgctaatcaattgcgaatggggggctttcggagacgacggagccctggatttcgtgcgaacgcaatacgaccgtgaagtggacgaacacacggtgaatcccgggaagcaactgcacgaaaaaatgatttccggcatgtacatgggagagttggtaagactggccctcgagcgcttcacaaacgagggattgttgttcgggggtaaaggttccgaccagttgtttacccgcgaccggttttacacgaaatacgtttcggaaatcgagagtgatcccccgggaacgttcacaaactgcaaggagattctcgaggagttgggcttgaaacatgccactgaacaagactgtattaatgtgaggtatgtctgcgaatgcatttctcgcagagctgctcatttggcgtcggctggaatcgccacgcttttgaataaaatgaaagagccgagggtgacagtcgggatcgatgggtctctgtacaggttccacccacatttccataatttgatgatggagaagatttccgagttggtcgagccggggattgtgtttgatttgatgttgtctgaggacgggagcggacgcggggctgcgctagtggcagccgtggcttcacgtaaacggtga

SEQ ID NO: 149274 - protein, 448 aa, Tribolium castaneum
MVIQVTPTIREKCQELILSNAQLEEYKKKLLNDLKKGLGKATHPTSIVKCFITYVQDLPDGSETGKFLALDLGGTNFRVLLIELSKNHFEMRSKIFAIPQHIMLGSGEQLFDHIADCLAKFAKDEKIQHEVLPLGFTFSFPLMQKGLTKGILERWTKGFNCSNVVGNDVVQMLKDAIDRRGDIQIEVCAILNDTTGTLMSCAWKNRYCKIGLIIGTGTNACYVEDQKNAEMFDEPDRGSGKVLINCEWGAFGDDGALDFVRTQYDREVDEHTVNPGKQLHEKMISGMYMGELVRLALERFTNEGLLFGGKGSDQLFTRDRFYTKYVSEIESDPPGTFTNCKEILEELGLKHATEQDCINVRYVCECISRRAAHLASAGIATLLNKMKEPRVTVGIDGSLYRFHPHFHNLMMEKISELVEPGIVFDLMLSEDGSGRGAALVAAVASRKR

SEQ ID NO: 149275 - DNA, 1476 bp, Botrytis cinerea
  CDS (1)..(1476)
atggtggggttaggtccaagaaagcctccttcccgtaagggttctatggctgatgtccccaaaaattacttggaacaaatcaagaagcttgagcaacagttcactgttgacacccaaaaactcaaggagatcactgaacacttcgtctccgagcttacaaaaggtctcactgtagagggtggaagtattccaatgaacccaacttggtgtatggcatttccagatggttatgaaaccggtacattcctcgccttggacatgggaggtaccaacttgcgtgtctgtgaaattatcttgactgatgagaagtccgagtttgatattatccaatcaaaataccgcatgccagaagagctcaagactggcgaagcagatgaactttgggaatacattgccgattgtcttcaacaattcattgaatcccaccatcatggcgaggatcttggaacgttgagtcttggtttcaccttctcctacccagctactcaaaactatatcgatgagggtatcttgcaaagatggaccaagggcttcgatattgcaggtgtcgaaggtgaaaacattgttccaatgtttgaggcagctcttgctaagagaggcgttccaattaagcttacagctttgatcaatgataccactggtaccttgattgcttccgcatatactgacacagccatgaagattggttgtattttcggaactggttgcaatgctgcgtacatggaaaactgcggctctattccaaaattggcacacatgaacttacctcctgacactccaatggcaatcaactgcgagtggggtgctttcgataatgagcacaaagttctcccccgtactccatacgatatcattattgataaagattctccacgtcctggtcagcaagcatttgagaagatgattgctggtctttaccttggagaacttttcagattggttcttgtcgatcttcatgacaacaaagatatccacatgtttgagggtcaagatattgaaaaactccgaaaggcttacaccttggactcttcattcttgtcattggttgaggaggacccttgggagaacttgtcagaaactgctgatcttttccaaaacaagctcagcatcagagccactgttccagaactcgagctcatccgtcgccttgctgagttgatcggtacccgtgccgcccgcctctccgcatgtggtgtcgccgccattgccaagaaaaagaactacgagacttgccacgtcggagctgacggatctgtcttcaacaaataccctcacttcaaggctcgtggtgccgccgcactccgtgaaattcttgattggcctgcaaagaagaatgctaaggaggctgatcccattgaaatcttggctgctgaggatggatctggtgtcggtgcagctttgattgctgctttgaccctcaagcgtgtcaaggcaggtaacatggctggtattttgcacccagagaacttcagatag

SEQ ID NO: 149276 - protein, 491 aa, Botrytis cinerea
MVGLGPRKPPSRKGSMADVPKNYLEQIKKLEQQFTVDTQKLKEITEHFVSELTKGLTVEGGSIPMNPTWCMAFPDGYETGTFLALDMGGTNLRVCEIILTDEKSEFDIIQSKYRMPEELKTGEADELWEYIADCLQQFIESHHHGEDLGTLSLGFTFSYPATQNYIDEGILQRWTKGFDIAGVEGENIVPMFEAALAKRGVPIKLTALINDTTGTLIASAYTDTAMKIGCIFGTGCNAAYMENCGSIPKLAHMNLPPDTPMAINCEWGAFDNEHKVLPRTPYDIIIDKDSPRPGQQAFEKMIAGLYLGELFRLVLVDLHDNKDIHMFEGQDIEKLRKAYTLDSSFLSLVEEDPWENLSETADLFQNKLSIRATVPELELIRRLAELIGTRAARLSACGVAAIAKKKNYETCHVGADGSVFNKYPHFKARGAAALREILDWPAKKNAKEADPIEILAAEDGSGVGAALIAALTLKRVKAGNMAGILHPENFR

SEQ ID NO: 149277 - DNA, 1428 bp, Aspergillus niger
  CDS (1)..(1428)
atgaaggaaccacaggacgctcccggatcgggcatccacttcccgcaaggagtcgtatcggaaaaggttttagaagaagttcaaaatatagcggatatgttccgtgtcgatgcagacactcttcgacatatcaccgatcattttgtcaaggagatggagaaaggttggtatacctctctggccgcatctatctcaccaatgaacgtaacctgggtaaccaaatccccgaccggccacgaaacaggccaatacctgaccgtggacatgggcgggaccaatctccgcgtgtgcaacgtcatcctgacagaagagaaaggtggatacaagattacacaaagcaagttcaagttaccaggtggcttgaagacaggtaatgcaaaggagttatgggagtacatagcagaccgtgtggcggactttctgcgcgagcatgaattgacgcccaatccggacgagaaactgccacttgcgtttactttttcttatccagtgacgcaggataatattcggcatggtgtgttgcaacgctggacaaagggatgggatgtatcgggtgtagagggcgaggatgttgttgcgcagttggaggaggcatttgcggagaggaatgtccccgtgcacattgtcgcattggttaacgacacgactggaacgcttatcgcatcggcatacaaagaccccgagatcaaaatcggtagcatctttggcaccggttgcaactctgcatacatggaaaagatcgggcgcgtgccaaagatctcagagcaccatcttcctgcggatcagttggtagctatcaataccgagtatggtgccttcgacaacagtcatcgtgttctgccgcgatgtcagttcgatctcgagattgaccgtacttccccgcgaccgggtcaacaaacatatgaaaagatggtggctggcctgtacgtgggagaaatagtaaggctgataattatccacctacatgaaaaagtgggctttttagaaaacatggatctcagtcgactccgacatattcatgctatggaatcgtcgtgtgtgtcgaggatggaagaggctgggtcagcggagaatagcgccatggcggagacacgaaactttctgaaagagaatttcggcattgagccgacactcgaggaactccgtgtctgttgtcgtcttggggagattgtctgcacgcgtgcggccagattgtatgcgtgcggtattgcggctatctgtaagaaggagggcatacgccaaggccgtgttggtgtagatggttctacgttcgagaagcttttccggttcaaggagcgggcagttactgctttacgagagattctggagtggcctgatgattcggaggatttgattacctttgtgccggcagaggatgggtcaggaattggtgcagctttgattgcggcgttgtccgggaaggagtga

SEQ ID NO: 149278 - protein, 475 aa, Aspergillus niger
MKEPQDAPGSGIHFPQGVVSEKVLEEVQNIADMFRVDADTLRHITDHFVKEMEKGWYTSLAASISPMNVTWVTKSPTGHETGQYLTVDMGGTNLRVCNVILTEEKGGYKITQSKFKLPGGLKTGNAKELWEYIADRVADFLREHELTPNPDEKLPLAFTFSYPVTQDNIRHGVLQRWTKGWDVSGVEGEDVVAQLEEAFAERNVPVHIVALVNDTTGTLIASAYKDPEIKIGSIFGTGCNSAYMEKIGRVPKISEHHLPADQLVAINTEYGAFDNSHRVLPRCQFDLEIDRTSPRPGQQTYEKMVAGLYVGEIVRLIIIHLHEKVGFLENMDLSRLRHIHAMESSCVSRMEEAGSAENSAMAETRNFLKENFGIEPTLEELRVCCRLGEIVCTRAARLYACGIAAICKKEGIRQGRVGVDGSTFEKLFRFKERAVTALREILEWPDDSEDLITFVPAEDGSGIGAALIAALSGKE

SEQ ID NO: 149279 - DNA, 1488 bp, Aspergillus niger
  CDS (1)..(1488)
atgtcatctgctctccttgacgaggctgcgcgcattgcccgccagttcgactaccccgctgctgaggtgcagcgtggagtgacggaatacattcgtgagatcgatgaaggtttgtccaaggagcacacgaccctcagtcagatccctacctatgtcacggcggtgcccaatggcacggaaaagggattgtacctggcagtagatctcggcggcaccaacttccgcgtgtgttcgatcgatctacatggagacactaccttctcccttacccagtccaagatcatgattcctcgtgagaccatggcgtccggtacggccaaggatctcttcttgttcttggcccgccaaatcgaatcgttcctgcgcattcaccacaacgaccacttcgaagctcacctgcgacgccgcaatgagaagaatggcaactgtgaagaggacctgttcgacttgggtttcaccttcagtttccccgtgcgtcagctgggcattaacaagggtaccctgattcgctggacgaagggcttcaacattcccgatgcggtgggtaaggatgtctgcgcattgctgcagaacgccatcgatgatctgggcctcccggtgcgcgtggctgccttggtcaacgacactgtcggaaccctgatggctcgttcatacacctctcctggagagacgggcacgttcctgggtgctatctttggcacgggcaccaatggcgcctatgttgagaagctggaccggatcactaagctgcagaccattgaacactccgagtacgacaagaccaccggtgagatgattatcaacgccgagtggggcagcttcgacaaccacctgagtgtactgccgaacaccatctacgaccagcagctcgatgccgacagcaacaaccccggcattcaaatgttcgagaagcgtgtctcgggtatgttcctgggtgagatcttgcgccgcgtcatgctggacatgcagcgcaacgagtccctgggcttcctccgggctggcggcgcttccaccgtttctgttccccaggagtcctccctgtaccgccaatggggtattgacaccagcttgttgagtctggtcgaggccgacaagactgagaatatggagcagatcaaggtcgctctgaaggatcacctcaagatcgaacgccccaccaccgacgactgcaaggccatccagaccgttgttcatgccattggcaagcgtgctgctcgtctgagtgccgtcccgctggctgccatcctcctctctactggcaagctgcagaaggatgacctcgtagacattggtgtggatggcagtctggtcgagttctaccccaacttcgaaggctacatgcgtgatgccctccgcgaagtgcccgaggttggagaagccggcaacaagaagatccgcattggtatctccaaggatggcagcggcgtgggtgctgctctaatcgccctcgttgctagcaaggaggaggcccgcagaaagtcgcaatag

SEQ ID NO: 149280 - protein, 495 aa, Aspergillus niger
MSSALLDEAARIARQFDYPAAEVQRGVTEYIREIDEGLSKEHTTLSQIPTYVTAVPNGTEKGLYLAVDLGGTNFRVCSIDLHGDTTFSLTQSKIMIPRETMASGTAKDLFLFLARQIESFLRIHHNDHFEAHLRRRNEKNGNCEEDLFDLGFTFSFPVRQLGINKGTLIRWTKGFNIPDAVGKDVCALLQNAIDDLGLPVRVAALVNDTVGTLMARSYTSPGETGTFLGAIFGTGTNGAYVEKLDRITKLQTIEHSEYDKTTGEMIINAEWGSFDNHLSVLPNTIYDQQLDADSNNPGIQMFEKRVSGMFLGEILRRVMLDMQRNESLGFLRAGGASTVSVPQESSLYRQWGIDTSLLSLVEADKTENMEQIKVALKDHLKIERPTTDDCKAIQTVVHAIGKRAARLSAVPLAAILLSTGKLQKDDLVDIGVDGSLVEFYPNFEGYMRDALREVPEVGEAGNKKIRIGISKDGSGVGAALIALVASKEEARRKSQ

SEQ ID NO: 149281 - DNA, 1473 bp, Aspergillus niger
  CDS (1)..(1473)
atggttggaatcggtcctaagcgtcccccctcccgcaagggttccatggccgatgttccccagaacctcttgcagcagatcaaggacttcgaggaccaattcaccgtcgatcgctccaagctcaagcagattgtcaaccactttgtcaaggaattggaaaagggtctctctgtcgagggtggaaacatccctatgaacgtcacctgggttctgggattccccgatggcgacgaacagggtactttcctcgccctcgacatgggtggcaccaacctgcgtgtttgtgagatcaccctgacccaggagaagggtgccttcgacatcacccagtccaagtaccgcatgcccgaggaattgaagaccggtaccgccgaggagctgtgggaatacatcgccgactgcctgcagcaattcatcgagtcccaccacgagaacgagaagatctccaagctgcccctgggtttcaccttctcctaccccgccacccaggattacatcgaccacggtgtcctgcagcgctggaccaagggtttcgacattgatggtgtcgagggccacgacgtcgtcccgccgttggaggccatcctgcagaagcgcggcctgcccatcaaggtggctgcactgatcaacgacaccaccggaaccctcatcgcctcttcttacaccgactccgacatgaagatcggctgcatcttcggtaccggtgtcaacgccgcctacatggagaacgccggctccatccccaagctggctcacatgaacctgcccgccgacatgcccgtggctatcaactgcgagtacggtgctttcgacaacgagcacatcgtgctgcctctgaccaagtacgaccacatcatcgaccgcgactcgccccgtcccggtcagcaggccttcgagaagatgaccgccggtctgtacctgggtgagatcttccgtctggccctgatggacctggtggagaaccgccccggcctcatcttcaacggccaggacaccaccaagctgcgcaagccctacatcctggatgcctccttcctggcagccatcgaggaggacccctacgagaacctggaggagaccgaggagctcatggagcgcgagctcaacatcaaggccaccccggcggagctggagatgatccgccgcctggccgagctgatcggtacgcgtgccgctcgcctgtcggcctgcggtgttgccgccatttgcacgaagaagaagatcgactcgtgccacgttggtgccgacggctccgtcttcaccaagtaccctcacttcaaggcgcgcggagccaaggctctgcgcgagatcctggactgggctccggaggagcaggacaaggtgaccatcatggcggccgaggatggatctggtgtgggagctgcgctgattgcggcgctgaccctgaagcgggtcaaggccggcaacctggccggtatccgaaacatggctgacatgaagaccctgctataa

SEQ ID NO: 149282 - protein, 490 aa, Aspergillus niger
MVGIGPKRPPSRKGSMADVPQNLLQQIKDFEDQFTVDRSKLKQIVNHFVKELEKGLSVEGGNIPMNVTWVLGFPDGDEQGTFLALDMGGTNLRVCEITLTQEKGAFDITQSKYRMPEELKTGTAEELWEYIADCLQQFIESHHENEKISKLPLGFTFSYPATQDYIDHGVLQRWTKGFDIDGVEGHDVVPPLEAILQKRGLPIKVAALINDTTGTLIASSYTDSDMKIGCIFGTGVNAAYMENAGSIPKLAHMNLPADMPVAINCEYGAFDNEHIVLPLTKYDHIIDRDSPRPGQQAFEKMTAGLYLGEIFRLALMDLVENRPGLIFNGQDTTKLRKPYILDASFLAAIEEDPYENLEETEELMERELNIKATPAELEMIRRLAELIGTRAARLSACGVAAICTKKKIDSCHVGADGSVFTKYPHFKARGAKALREILDWAPEEQDKVTIMAAEDGSGVGAALIAALTLKRVKAGNLAGIRNMADMKTLL

SEQ ID NO: 149283 - DNA, 1434 bp, Crassostrea gigas
  CDS (1)..(1434)
atgggccgggaattccagaccgtactggctgccctcctcaaaatcctccctgactatgaggatatgctggtagaaaacctagttcgtccattcattctgaaagatgaggactacaaactgctcatggacatcatgctgggggagttcaacaaagggctcgggaaggagaccaaccccaccgccaaggtcaagatgtaccccacctacgtcagggacgtccccgacggatcagaaaatgggaatttcttagcattggatttgggtgggacaaacttccgggttttactcataaacctgaatggtcaggaagtgaccatggagagcaagatctacctgatcccccagcacatcatgaccggcaccggtgaacaattgtttgaccacatcgcaaaatgcatccacaaattcatgagcaaccacgatctactgaaggagaaaattcccctgggattcaccttctccttcccctgtaaacagataggtttgaaccacgccatcctgacacagtggacaaaaggcttcaaatgtgagggggtggagggggaggatgtggtcagactcctccacgaagcaatcaaaaggaggggggatatagatgtggaatgcttagctgtgataaacgatacagttggtgcactgatgtcatgtgcacacagtgaccgagattgtgcaataggtctaattctaggcacaggaactaatgcttgctacattgaaaaactagaaaatgtgggattatgggatggggactacaatgaaccaaaccaggtcatgatcaacacagagtggggggcgctgggagacgacgggtgtctggactttgtcaagaccgagtatgaccgacaggtggacaaacactccatcaacccaggcagacaaatatatgaaaaaatgatctctggtatgtacatgggagaaatcgtcagactggccctggaaaagctacggaagcatggacttctgttcggcgggaaaggatcagaagaattatccaccagggggcgcttctacacaaaatatgtttcagaaattgaaagtgatgtagatgatcacttcaaaaacaccaaacaggtgtttgaggaattggctctagagaaatattctgatgaggactgtcggatcgctcagtacgtctgttccttggtgtccacgcgggcagctttcctagcctccgttggcgtggccgctcttctgaataagatggaccgacaggatgtgacggtggcagttgatgggtccctgtacagattccacccccactttcatgatctcatggaggaaaaaattcagcaacttgtaaaaccaggaattaagtttaaactaatgttgtcacatgacggcagtggaaagggggcagccattgtaacagctgtagctaatcgactacgagattcggggaaagagagtataggagaaaatggactagaaaactaa

SEQ ID NO: 149284 - protein, 477 aa, Crassostrea gigas
MGREFQTVLAALLKILPDYEDMLVENLVRPFILKDEDYKLLMDIMLGEFNKGLGKETNPTAKVKMYPTYVRDVPDGSENGNFLALDLGGTNFRVLLINLNGQEVTMESKIYLIPQHIMTGTGEQLFDHIAKCIHKFMSNHDLLKEKIPLGFTFSFPCKQIGLNHAILTQWTKGFKCEGVEGEDVVRLLHEAIKRRGDIDVECLAVINDTVGALMSCAHSDRDCAIGLILGTGTNACYIEKLENVGLWDGDYNEPNQVMINTEWGALGDDGCLDFVKTEYDRQVDKHSINPGRQIYEKMISGMYMGEIVRLALEKLRKHGLLFGGKGSEELSTRGRFYTKYVSEIESDVDDHFKNTKQVFEELALEKYSDEDCRIAQYVCSLVSTRAAFLASVGVAALLNKMDRQDVTVAVDGSLYRFHPHFHDLMEEKIQQLVKPGIKFKLMLSHDGSGKGAAIVTAVANRLRDSGKESIGENGLEN

SEQ ID NO: 149285 - DNA, 1509 bp, Arabidopsis thaliana
  CDS (1)..(1509)
atgggtaaagtggcagttgcaacgacggtagtgtgttcggtggcggtatgtgcggcggcggcgttgatagtacggaggagaatgaaaagcgcagggaaatgggcaagagtgatagagatattgaaagcctttgaagaagattgtgcaacgccaattgccaaattgagacaagtggctgatgctatgactgttgagatgcatgctggtcttgcttctgaaggtggcagcaagcttaagatgcttattagctacgttgataatcttccttctggggatgagactggttttttctatgcgttggatctaggcggaacaaacttccgtgttatgcgtgtgcttcttggtgggaagcacgaccgtgttgttaaacgagaattcaaagaagaatctattcctcctcatttgatgaccgggaagtcacatgaattattcgattttatcgttgatgttcttgccaagtttgtcgctacagaaggcgaggactttcatctcccacctggtagacaacgggaactaggttttactttctcatttccggttaagcagctatctttatcctctggcactctcatcaactggacgaagggcttttccattgacgatacagttgataaagatgttgttggagaacttgttaaagctatggaaagagttgggctggacatgcttgtcgcagcgcttgttaatgataccattggaacacttgcgggtggtagatacactagcccggatgtcgttgtcgcagttattttgggcaccggcacaaatgcagcctatgtcgaacgtgcacatgcaattcccaaatggcatggtttgctacccaaatcaggagaaatggtgatcaacatggaatggggaaacttcaggtcatcacatcttccattgacagagtacgaccactctctagatgtcgatagtttgaatcctggtgaacagattcttgagaaaatcatttccggaatgtatctgggagaaatcttgcgtagagttcttctgaagatggctgaagaagctgccttctttggcgatatcgtcccacctaagctgaaaataccattcatcataaggaccccgaacatgtctgctatgcacagtgatacttccccggatttgaaggttgtaggaagcaagttaaaagacatattggaggtccagactagttctctgaagatgaggaaagttgtgatcagcctatgtaacatcattgcaagccgaggagctcgtttatctgctgcggggatctatggaatcctcaagaaaataggaagagacgcaacaaaagatggagaagctcagaaatctgtgatagcgatggacggtgggctattcgagcattacactcagttcagtgagtcgatgaagagttcattgaaagagttgcttggagatgaagtttcagagagtgttgaagtgatactgtcgaatgatggttcaggtgttggagctgcattacttgctgcttctcactctcagtatctcgaacttgaagatgactctgaaacaagttaa

SEQ ID NO: 149286 - protein, 502 aa, Arabidopsis thaliana
MGKVAVATTVVCSVAVCAAAALIVRRRMKSAGKWARVIEILKAFEEDCATPIAKLRQVADAMTVEMHAGLASEGGSKLKMLISYVDNLPSGDETGFFYALDLGGTNFRVMRVLLGGKHDRVVKREFKEESIPPHLMTGKSHELFDFIVDVLAKFVATEGEDFHLPPGRQRELGFTFSFPVKQLSLSSGTLINWTKGFSIDDTVDKDVVGELVKAMERVGLDMLVAALVNDTIGTLAGGRYTSPDVVVAVILGTGTNAAYVERAHAIPKWHGLLPKSGEMVINMEWGNFRSSHLPLTEYDHSLDVDSLNPGEQILEKIISGMYLGEILRRVLLKMAEEAAFFGDIVPPKLKIPFIIRTPNMSAMHSDTSPDLKVVGSKLKDILEVQTSSLKMRKVVISLCNIIASRGARLSAAGIYGILKKIGRDATKDGEAQKSVIAMDGGLFEHYTQFSESMKSSLKELLGDEVSESVEVILSNDGSGVGAALLAASHSQYLELEDDSETS

SEQ ID NO: 149287 - DNA, 1482 bp, Aspergillus oryzae
  CDS (1)..(1482)
atgtcatccgccttgttggacgaagctgcgcggattgcccgccagttcgacttccccgccgagggggtccaacgcggggtgaaagagtacatccgagagattgatgaaggactgagtaaggagggcacaactctgagccaaatcccaacgttcgttacctcggtaccaaatgggacagagaagggactgtacctagccgtagatcttggcggtaccaactttcgtgtgtgttcagtagatctacacggtgataacaccttttctctcacccagtctaaaatcatgatccctcgtgaattgatggcttccggcacctccaaggatctcttcactttcttggctcgccagatcgaagctttcctgcgtatccaccacaacgaacacttcgaagctcacctcaaacgccgacgtgaaggaaatagcgaagaggatttgtttgatttgggctttactttcagtttccccgtgcgccaggtcggcattaacaagggtaccctcattcgctggacgaagggcttcaacattcccgatgccgtcggccatgatgtctgcgcgctattgcaaaatgcgcttgatgctctggagctccccgtgcgcgtggccgctcttgtcaatgacacagttggaaccctgatggcccgttcatacacctcccctggtgaaacgggaactttcctcggtgccatcttcggcacgggtaccaacggtgcctacgtcgagaagctcgacaagatcaccaagatggctactatcgaacattccgactacgataagacaacgggtgaaatgattatcaatgctgagtggggtagctttgataaccacctgagtgtcttgcccaacaccgtctacgaccagcagctggatgaggaaagtaacaaccctggcatccagatgttcgaaaagcgagtctccggaatgttcctcggtgagattctgcgccgtgtcctggttgatctgcaccgcaacgaatccctgggtctgttcaagcccagtgcctcgtcggatgttattgttccagaaaactctacgctcttccgtcagtggggccttgacactagcctcctgagcttggttgaagctgacaacagcgagagcatggagcctaccaagacggcattaaaggaccacttgaagatcgaacgggctagcaccacggactgcaaggctgttaagacgatcgtgcatgccattggcaagcgcgctgctcgtctgagcgccgtgcctattgctgccatcctcatcgccaccaagaaactcgagaccgacgatctagtggacgttggtgtcgacggaagcttggtcgagttctaccctaactttgagggatacatgcgtgacgccttgcgtgaggtgcccgaggtaggcgttgccggcgacaagaaggtgcgcattggtatctcaaaggatggcagtggtgttggtgcggctttgattgcactggtggctagcaaggaagaagccagaatgaaggcccagtag

SEQ ID NO: 149288 - protein, 493 aa, Aspergillus oryzae
MSSALLDEAARIARQFDFPAEGVQRGVKEYIREIDEGLSKEGTTLSQIPTFVTSVPNGTEKGLYLAVDLGGTNFRVCSVDLHGDNTFSLTQSKIMIPRELMASGTSKDLFTFLARQIEAFLRIHHNEHFEAHLKRRREGNSEEDLFDLGFTFSFPVRQVGINKGTLIRWTKGFNIPDAVGHDVCALLQNALDALELPVRVAALVNDTVGTLMARSYTSPGETGTFLGAIFGTGTNGAYVEKLDKITKMATIEHSDYDKTTGEMIINAEWGSFDNHLSVLPNTVYDQQLDEESNNPGIQMFEKRVSGMFLGEILRRVLVDLHRNESLGLFKPSASSDVIVPENSTLFRQWGLDTSLLSLVEADNSESMEPTKTALKDHLKIERASTTDCKAVKTIVHAIGKRAARLSAVPIAAILIATKKLETDDLVDVGVDGSLVEFYPNFEGYMRDALREVPEVGVAGDKKVRIGISKDGSGVGAALIALVASKEEARMKAQ

SEQ ID NO: 149289 - DNA, 1793 bp, Solanum chacoense
  CDS (50)..(1540)
aatcccaattccccttctctatcattttttccttaatcggatagtaaggatgaagaaggcgacggtggctgcggtggtggtaggtacagcggcggcggtagctgtggcggcgctcatcatgcgccaccgcatgggtaaatcgagcaaatgggcacgtgccagggcaattctgaaggaattcgaggagaaatgtgccaccccagatggcaagctgaagcaagtggctgatgccatgacggtggagatgcacgccggactcgcctctgaaggcggcagcaagctcaagatgcttattagctatgtcgataatctccctactggcgatgaaggaggagtcttttatgcattggatcttggtggaacaaattttcgagtattgcgggtgcaattggggggaaaagatggtggcattatccatcaagaatttgcggaggcatcaattcctccaaatttgatggttggaacttcagaagcactttttgactatattgcggcagaacttgcaaaattcgtagctgaagaaggagaagagtttcatccacctcctggtaggcagagagaattaggcttcaccttctcgttcccaataatgcagacttcaatcaattctggaactcttatcaggtggacgaaaggtttctccattgatgacacggttggcaaagatgttgttgcagaactgacaaaagcaatgcaaaaacgagaaattgatatgagggtctcagcgcttgtgaatgatactgttggaacattggctggtggtagattcaccaataaggatgtatccattgctgtgatattaggtactgggaccaatgcagcatatgtggaacgggctcaggcaattcccaaatggcacggtcctctgcctaaatctggagaaatggtgatcaatatggaatggggtaactttaggtcctcccaccttcccttgacagagtacgatcatgctatggataccgatagtttaaatcctggtgaacagatatttgagaagatatgttctggcatgtacttgggagaaattttacgcagagttctacttagaatggctgaagaagctggcatttttggcgaggaagttcctccaaaactcaagaattcattcatattgaggacacctgaaatgtctgctatgcatcatgacacatcctctgatttgagagtggttggcgacaagttgaaggatatcttagagatatccaatacctccttgaagacaaggagattagttgttgagctgtgtaatattgttgcaacacgtggcgccagacttgcggcagctgggatcttgggcattatcaaaaagatgggaaaggatacacccagggaaagtggtccagaaaagattgtcgtagccatggatggcggattgtatgaacattatacagaatacagtaagtgcttggagaacactttggttgaattacttggaaaggaaatggccacaagtattgttttcaagcacgcgaatgatggttctggcattggcgctgcactccttgcggcctctaactccgtgtatgttgaagacaagtgagagtgatcaaaatgatatttagctagaggaaactccatttaccttttatattatgttttttctctggccttttctttttggattctctctctcctttttggttcttcttacaattatttccagaattttccagcacttgtacttggttttctaggatattattcctgggaatgccaacatatttcttctggaaaagggtgcaaagaaattatatgaaactcagcattgcttattcaaaaaaaaaaaaaaaaaa

SEQ ID NO: 149290 - protein, 496 aa, Solanum chacoense
MKKATVAAVVVGTAAAVAVAALIMRHRMGKSSKWARARAILKEFEEKCATPDGKLKQVADAMTVEMHAGLASEGGSKLKMLISYVDNLPTGDEGGVFYALDLGGTNFRVLRVQLGGKDGGIIHQEFAEASIPPNLMVGTSEALFDYIAAELAKFVAEEGEEFHPPPGRQRELGFTFSFPIMQTSINSGTLIRWTKGFSIDDTVGKDVVAELTKAMQKREIDMRVSALVNDTVGTLAGGRFTNKDVSIAVILGTGTNAAYVERAQAIPKWHGPLPKSGEMVINMEWGNFRSSHLPLTEYDHAMDTDSLNPGEQIFEKICSGMYLGEILRRVLLRMAEEAGIFGEEVPPKLKNSFILRTPEMSAMHHDTSSDLRVVGDKLKDILEISNTSLKTRRLVVELCNIVATRGARLAAAGILGIIKKMGKDTPRESGPEKIVVAMDGGLYEHYTEYSKCLENTLVELLGKEMATSIVFKHANDGSGIGAALLAASNSVYVEDK

SEQ ID NO: 149291 - DNA, 1784 bp, Paxillus involutus
  CDS (37)..(1623)
gatcacatttctttccacaacttcaatctttcgcccatggcacatacttccgcccttcacgcccagtatcaacaagacatcctgaaggcgattaacgatcagctcactatatcagatgacacactcttgaacatcactagaaccttcctgcgggaggtaaccgatggactttccagctatggtcaccccatggcgatgattccgaccttcgtcaagggtgttccagatggttccgagactggcactttcctcgctctcgatctgggcggaactaaccttcgtgtatgcgaggtgactctgcacggcgacaaatccttctctctccgccagcagaaatacaaggtctctgagactcttaaaactggcgaggtgaccacgctgtttgactatcttgccgactctgtcgatgctttcctcacagactctggttcaccgacagctgctctcccgccttcactcacccacgaatcccacgccaacgttcttggcaacggagatactgatcaaccatatatttcacttgctctcacattctctttcccagtggaacaaactgcactggactctggcaaacttctcacatggacaaaaggtttcgcggccaagaatgccatcggtaaagatgtcgtcaagcttcttcaagacgcattcgacaggaagcatatccacgttaaatgtgttgcacttgtcaacgataccgttggggccctcctctctcgcgcttacacatccggcgggtgtatcctcggtgctattttcggtaccgggacgaacggagcatacgtggaagacgtggccaatattacaaagctcggaaatgagcccacggtcgcggaaggcggctacatgattgtaaacaccgaatggggagggtttaataatacacggtccgccttgccgagcacaccatatgacaacaaactcgaccgtgaatctatcaatcctcgattccaggcgttcgagaagtttatatcggggatgtaccttggagaaattacacgaaacattatactcagcctcatagattcctcgccaaaacctttgctcttcgggggacgctccaccggactcttgaataaacagtggggactggacacggccgtcctaagtgagatcgaggaagcatggcaggggatcgggagattcgcttccagcaaagcagcgaccacagacgcttctgacgaggtggagttaagtcgcgtacgagatgtcatcgtgcaacggctgggtttctccgacgcgcgagcatccgatgtgtcattagcggatgcagacactgtccggcaggtctgcacgctcgtggccgcacgggctgcgcgtctgagtgcctgtgcagtagctgctgtgttagtgcagaccggtcgtgcacaactcgttggtagtggtgctccaggatctggttccctgcgggatgatgggaagcggatcggcgttggtgtcgacggaagcttggtggaattttaccctcaattcgagcccaagctccgagcatccctccgcgtcctcattggtcccgaggtcgagagccgtgtcgatattggaatggcaaaggacggaagtggtgccggagctgccctgtgcgcgctggttgcgcaacggcaggaccgggcaaaacgtagctaggatggggacggaggcataagggtccaatccagatccaatcggaaggctacatacctcttttccatgttatgatgcgatgtgaaaactctcaccgtgtccacgccatcatcggcgaggaagaaaacaagcaagaatagaatgttgatcaaggaaaaaaaaaa

SEQ ID NO: 149292 - protein, 528 aa, Paxillus involutus
MAHTSALHAQYQQDILKAINDQLTISDDTLLNITRTFLREVTDGLSSYGHPMAMIPTFVKGVPDGSETGTFLALDLGGTNLRVCEVTLHGDKSFSLRQQKYKVSETLKTGEVTTLFDYLADSVDAFLTDSGSPTAALPPSLTHESHANVLGNGDTDQPYISLALTFSFPVEQTALDSGKLLTWTKGFAAKNAIGKDVVKLLQDAFDRKHIHVKCVALVNDTVGALLSRAYTSGGCILGAIFGTGTNGAYVEDVANITKLGNEPTVAEGGYMIVNTEWGGFNNTRSALPSTPYDNKLDRESINPRFQAFEKFISGMYLGEITRNIILSLIDSSPKPLLFGGRSTGLLNKQWGLDTAVLSEIEEAWQGIGRFASSKAATTDASDEVELSRVRDVIVQRLGFSDARASDVSLADADTVRQVCTLVAARAARLSACAVAAVLVQTGRAQLVGSGAPGSGSLRDDGKRIGVGVDGSLVEFYPQFEPKLRASLRVLIGPEVESRVDIGMAKDGSGAGAALCALVAQRQDRAKRS

SEQ ID NO: 149293 - DNA, 1479 bp, Trichoderma reesei
  CDS (1)..(1479)
atggttggactcggccctcgcccgcctccctctagaaagggctcagctgcggatttgcccaaggatctcctcaacgaggtgaggaagctggaggagatcttcactgtcgacaccgccaagctcaaggagattacggaccactttgtcaatgagctcgccaaaggtctcagtgtggagggtggcagcatcccaatgaaccctacctgggtcatgtcttaccctgatggccacgagactggttctttcctggctctggacatgggtggcaccaacctgcgggtgtgcgaaatcaccttgacggaccgcaagtcggagttcgacatcatccagtccaagtaccgcatgccggaagagctcaagaccggctccagcgaggagctgtgggagtacatcgccgactgcctgcaccagttcatcgagactcaccacggcgactgcagcaagctggaggccttgcctcttggcttcaccttctcctacccggccactcagcactacatcgacgagggcatcctccagcgctggaccaagggcttcgatattgccggtgttgagggaaagaatgtcgtgcccatgttcgaggctgcgattgctaagcgtggtgtgcccatcaaactgtcggctttgatcaacgacacgacaggcacattgattgcttccgcctacacagaccccaaggtgaagattggctgcatcttcggaacgggatgtaatgccgcctacatggaggattgcggctccatccccaagctggcgcacatgaacctcccccctgactgccccatggccatcaactgcgagtggggtgcctttgacaacgagcacaaggtcctgccccgcaccaagtacgacatcgccatcgatgaagactctcctcgccctggccagcaggcgtttgagaagatgattgccggtctctacctgggcgagatcttccgactggtcctggtggacctgcatgacaacaaggacattcacatctttgagaaccaggacatctctttgctccgcaggccctacacattggattcatccttcctctctggcatcgaagaggaccccttcgagaacctccaagagacctttgataccttccagtcgaagctcaacatcacacccacgggacccgagcttgagctggtccggaggctgtcagagctcatcggaacacgagctgcccgactgtccgcctgcggtgtcgcggccatctgcaagaagaagagctttgaaagctgccacgtcggtgccgacggatccgtcttcaacaagtaccctcacttcaaggcccgcggcgccaaggccctgcgagagatcctcgactggcccgcgaagagcaaccccaaggaggaggacccggtggagattctggcagccgaggatggcagcggtgttggcgctgccctgattgcggccctgacgctcaagcgggccaaggctggcaacttggccggcattttgcatcctgagaattttgtctag

SEQ ID NO: 149294 - protein, 492 aa, Trichoderma reesei
MVGLGPRPPPSRKGSAADLPKDLLNEVRKLEEIFTVDTAKLKEITDHFVNELAKGLSVEGGSIPMNPTWVMSYPDGHETGSFLALDMGGTNLRVCEITLTDRKSEFDIIQSKYRMPEELKTGSSEELWEYIADCLHQFIETHHGDCSKLEALPLGFTFSYPATQHYIDEGILQRWTKGFDIAGVEGKNVVPMFEAAIAKRGVPIKLSALINDTTGTLIASAYTDPKVKIGCIFGTGCNAAYMEDCGSIPKLAHMNLPPDCPMAINCEWGAFDNEHKVLPRTKYDIAIDEDSPRPGQQAFEKMIAGLYLGEIFRLVLVDLHDNKDIHIFENQDISLLRRPYTLDSSFLSGIEEDPFENLQETFDTFQSKLNITPTGPELELVRRLSELIGTRAARLSACGVAAICKKKSFESCHVGADGSVFNKYPHFKARGAKALREILDWPAKSNPKEEDPVEILAAEDGSGVGAALIAALTLKRAKAGNLAGILHPENFV

SEQ ID NO: 149295 - DNA, 1641 bp, Trichoderma reesei
  CDS (1)..(1641)
atgggccttgccgagcacacgagcagggttgtcgcccagttcgacttttcggacgaggagctcaaccgccatgtcgacgagtttctgaagcaagccaacgcgggattaaagcaggatggaaccagcctcagccagatcccctcatacgtgaccgccgtacccaacggcacagagaagggcatttatcttgctgtagacctgggcggcaccaatttccgcgtctgctccgtctcactaaacggcgacagcaccttcaacctggtgtacaacaaagtggctatcccaaagaaccttatggtcgccaagacagcgagagatctttttgccttccttgcgaagcagatcgagctcttccttcgagagcaccaccgggatcactttgaaagcgccgcccaccgccgcagcaccatgagcttcccagagggctaccgcgatgagcaaatattccgcctcggcttcacattcagcttcccagtacagcagctcggcatcaacaagggtaagctcattcggtggaccaagggctttgacattccagatgcggttggcaaggatgtctgcaagctcctccaagacgagattgaccggctcggtcttccggtcaaggtggctgccttggtcaacgataccgtcggcacgctcatggcgcgctcgtacacctcggccggaaagcatcgctctcttctcggcgccatctttggcaccggaaccaacggcgcctacattgagaagacggcgagcatcaccaagcccatcccgggcgagtacgacaagtcgaccggtgaaatggtcatcaacaccgagtggggctcattcgacaacgagctcaacgttctcccgtcgaccgtctgggatcagacgctcgaccgggagagtgtcaacccgggcatccagatgtacgagaagcgtgtgtctggcatgttcctgggcgagattgtgcgactggccatcaacgacatgatgaaggacgacgaggcgtccctcttccgcgatacgaactccagctacaacgactggtcaacgacgaccaacgtcagcccccagtccgggctcctgtctcagtggggactggacactgccgtgctgtccgtggctgccgccgacaacacgccagagctgtcaaccatccgacaagagctggagaacacgctccaggtgtacacgccctcgctggaggatgcacaggcattcaaggccgtcgccggcgctgttgtccgcagagcggccaggcttgcggccgtcgccattggcgccattgtcctccagtccggaaagctggacgaccccgaagaggagctcatcgacattggcgtcgacggcagcctggtcgagcactaccccttcttccgggacatgatctacgaggccctgcgcgccattgagggcatcggccccagcggcgcggacaagattcgcatcggcatcgccaaggacggcagcggcgtcggcgccgccctgattgccctgatagcccagaagatggagaagcccggcgacttccttgccgacctgcgacgggacattcgacgaagactgtctctgcctttcgaaaatgctggtatgttgcctctgcagaaccactcaacccccgctttctgctttctctgcagtgtttctctagccccgtctcttcttgcttaa

SEQ ID NO: 149296 - protein, 546 aa, Trichoderma reesei
MGLAEHTSRVVAQFDFSDEELNRHVDEFLKQANAGLKQDGTSLSQIPSYVTAVPNGTEKGIYLAVDLGGTNFRVCSVSLNGDSTFNLVYNKVAIPKNLMVAKTARDLFAFLAKQIELFLREHHRDHFESAAHRRSTMSFPEGYRDEQIFRLGFTFSFPVQQLGINKGKLIRWTKGFDIPDAVGKDVCKLLQDEIDRLGLPVKVAALVNDTVGTLMARSYTSAGKHRSLLGAIFGTGTNGAYIEKTASITKPIPGEYDKSTGEMVINTEWGSFDNELNVLPSTVWDQTLDRESVNPGIQMYEKRVSGMFLGEIVRLAINDMMKDDEASLFRDTNSSYNDWSTTTNVSPQSGLLSQWGLDTAVLSVAAADNTPELSTIRQELENTLQVYTPSLEDAQAFKAVAGAVVRRAARLAAVAIGAIVLQSGKLDDPEEELIDIGVDGSLVEHYPFFRDMIYEALRAIEGIGPSGADKIRIGIAKDGSGVGAALIALIAQKMEKPGDFLADLRRDIRRRLSLPFENAGMLPLQNHSTPAFCFLCSVSLAPSLLA

SEQ ID NO: 149297 - DNA, 1774 bp, Solanum lycopersicum
  CDS (29)..(1528)
ggcacgagagatctcactgttacctaaaatgtcggtcaccgttagctcgccggccgtccgatccttccatgtttcacgatcacctcataaaacgatctctaggccacgtgtcattatatctgccgtccgatctactgacagcttaggagtagcaccaattttgacgaagttgcagaaagattgtgctactcctcttccagttttgcgccacgtggcggatgcaatggccgatgatatgagggccgggcttgccgtcgacggcggcagtgatctgaagatgatccttagttatgtcgacactctaccaactgggaatgagaaaggcttgttttatgcgttggaccttggtggtacaaatttccgggtgctaagggtgcagctaggtggtaaagaagagcgtgtagtcgccactgagtttgagcaagtctctataccccaagaactgatgtttgctacctccgaggagcttttcgatttcatagcttctgcgctaggaaaatttgcacaaaaggaaggtggtaattttgagttgcaacagggacggacaagggaaataggattcacgttttcttttccggtgaaacagacttcaataagaactggaatcctaatcaaatggacaaaaggttttgctgtctctggaactgcgggaaaagatgttgttgcttgtctgaatgaagccatggagaggcggggaatggatatgcaagtgtctgccctggtcaatgacactgtgggaacacttgccggagcaagatactgggatgatgatgccatggttgctgtcattcttgggactggaaccaatgcttgctatgtagaacgtgtggatgctattcctaagctggcaaaaaggatgtctaagtctccaataacgattgtgaataccgaatggggagctttctcaaatggccttcctttaactgagtttgatagagaaatggatgccgagagcattaaccctggtgagcagatttttgaaaagaccatctctggtatgtaccttggggaaattgtgagacgggtgctggtcaaaatggccaaggttgggggcttatttggtagcagctatgttccggagaagctagtcactccatttgtgctgaggacacctgatatatgtgccatgcagcaggatacatcaatagatcttgaagctgttgagtctgtcctctatgatgtagctggggtaaaatccgatctaagtgcaaggaaaacagtcgtggacatttgcgatactattgcaaaacgagggggtcgtctagctggtgcaggaattgttggtatattacagaaaatggaggaagattctaaaggtctcatctttggtaaaagaacagttgtagcaatggatggaggcttatatgagcactatcctcagtacagaggatacctccaagaagctgtcacagagctactaggctcggaaatttcgaaaaatgtagtgatagaacattcaaaagatggatctggtattggagctgcattattagctgctgcaaattcaaagtatgaacatgatgattaagggaaaagctaaatttcatgtgttcaaaggtttgcttgaggaaaaatacatgagcatttgtaatttagaatgttctaaagaaggattgatgattggatttatagaggctcttgtttgtgatgccattttttgtactcccattaatgaagtacgaagaagtgaggatttatatagccaaccccaatttatttggaatcgaggcgtagttgtaattgtattatatgcagcactgacttatttatgtga

SEQ ID NO: 149298 - protein, 499 aa, Solanum lycopersicum
MSVTVSSPAVRSFHVSRSPHKTISRPRVIISAVRSTDSLGVAPILTKLQKDCATPLPVLRHVADAMADDMRAGLAVDGGSDLKMILSYVDTLPTGNEKGLFYALDLGGTNFRVLRVQLGGKEERVVATEFEQVSIPQELMFATSEELFDFIASALGKFAQKEGGNFELQQGRTREIGFTFSFPVKQTSIRTGILIKWTKGFAVSGTAGKDVVACLNEAMERRGMDMQVSALVNDTVGTLAGARYWDDDAMVAVILGTGTNACYVERVDAIPKLAKRMSKSPITIVNTEWGAFSNGLPLTEFDREMDAESINPGEQIFEKTISGMYLGEIVRRVLVKMAKVGGLFGSSYVPEKLVTPFVLRTPDICAMQQDTSIDLEAVESVLYDVAGVKSDLSARKTVVDICDTIAKRGGRLAGAGIVGILQKMEEDSKGLIFGKRTVVAMDGGLYEHYPQYRGYLQEAVTELLGSEISKNVVIEHSKDGSGIGAALLAAANSKYEHDD

SEQ ID NO: 149299 - DNA, 2166 bp, Solanum lycopersicum
  CDS (37)..(1536)
  misc_feature (1897)..(1897): n is a, g, c or t
  misc_feature (1902)..(1902): n is a, g, c or t
  misc_feature (1947)..(1947): n is a, g, c or t
acatacaccaaaaagtttgatttttttcaagaaagtatgggaaaattggttgtaggtgcaacagttgtgtgtactgctgctgtagtatgtggggtgacagttttgttaatgaaacatagggtgaagaattctggggagtggggaaaagttgaagctttattgaaagattttgaggagaagtgtgcaactccagtggaaaaattaaagcaggtagctgatgctatgactgtagagatgcaagctggacttgcttctgaaggtgggagtaagctcaagatgcttattagctatgttgataaccttcctactggggatgaaaaaggtctgttttatgcattggatctaggcggcacaaactttcgagtgatgcgtgtacagttgggtgggaaagaaaagcgtatagttaaacatgaagttaaagaagtttcaattccacagaatgtgatgactggatcatcatctgaagtgttatttgattttattgccacggcacttgcagaatttgtagctacagaaggtgatgattttcatcttccacctggtagacaaagggagttaggctttaccttctctttccctgtgaaacaattgtcaattgcatcaggaactcttattaaatggacaaagggcttctccatagaagatttggttgggcaagatgtggttggagaattagcaaaagcaatggaaagggccggccttgacgtgcgtgtggctgcattagtaaatgatactgttggaacgttagcgggaggtcggtacaataatcctgatgtcattgctgcagtaattttgggtaccggaaccaatgcagcatatgttgaacgggctcatgcgattcccaaatggcatggtctgttgcctaaatccggagaaatggttatcaacatggaatggggtaatttccgctcatcacatcttccagtaacagaatatgaccaaaatcttgatattgagagtttaaaccccggtgagcagatttatgaaaagattatttccgggatgtatcttggagaaattttgcgtagagtattgtgtagaatggctgaagaagcttcattattcggtgattatgtcccatccaaactgaaagttcctttcgtattgaggactccggacatggctgctatgcatcacgacgagtctgctgatctcaaggttgttggaaataagctgaaggatatcttagaggtacctaattctaccttgaaaatgaggaaaatagttgtggagctgtgcgatattatcacctctcgtggagctcgtctttctgcagcaggaattgtgggcatcctcaagaaattgggaagagacacttttaaagacggagagaagcagaggtctgtcatagctgtggacggtgcattgtttgagcattacaccaagttcagaaattgcttgaaggaaactatgaaagagttactgggagatgctgcagatagcacagtcattgagctttctaatgatggttcaggcgttggagctgcacttttggctgcctcacattcccaatacacagatctcgaggaatcttgatcatggtcagagtgacacaaccaaaagtgcctggtcaagagttctctacgtttacaatcgcccctcttcttgctaaagggaacccacttcttactttcttctacgagacgattgaaatatttcttgcttccttgtgcactgtgtcatgcaagagtgaactttgaagtgagccatagttcaatataccaaaatgagcacatctctcttcagctaaacaccaatatgctgaccttttcactcctggtgcctctaagaaccatcttttatcccaagtgttaacttaaatttttccctcactagccagaaaataaagttaggatacaaataaagttattctagttgccacatttttgtgtaatcntttcnaagatttattgttgccaaaagttacttaccgggaaacaacctctncatctctttaaggtagggataggattttcttactctataccctccctagagtccacttatgagattacatcagatatgttgttgtatcgttgccaaaagttttggatttgtggaattacatcgtatatgttgttgtatggttgccaaaagttatagtgctgaggtagttcaagcttgtttctatttttctggatttttaggaaatctctcctccattca

SEQ ID NO: 149300 - protein, 499 aa, Solanum lycopersicum
MGKLVVGATVVCTAAVVCGVTVLLMKHRVKNSGEWGKVEALLKDFEEKCATPVEKLKQVADAMTVEMQAGLASEGGSKLKMLISYVDNLPTGDEKGLFYALDLGGTNFRVMRVQLGGKEKRIVKHEVKEVSIPQNVMTGSSSEVLFDFIATALAEFVATEGDDFHLPPGRQRELGFTFSFPVKQLSIASGTLIKWTKGFSIEDLVGQDVVGELAKAMERAGLDVRVAALVNDTVGTLAGGRYNNPDVIAAVILGTGTNAAYVERAHAIPKWHGLLPKSGEMVINMEWGNFRSSHLPVTEYDQNLDIESLNPGEQIYEKIISGMYLGEILRRVLCRMAEEASLFGDYVPSKLKVPFVLRTPDMAAMHHDESADLKVVGNKLKDILEVPNSTLKMRKIVVELCDIITSRGARLSAAGIVGILKKLGRDTFKDGEKQRSVIAVDGALFEHYTKFRNCLKETMKELLGDAADSTVIELSNDGSGVGAALLAASHSQYTDLEES

SEQ ID NO: 149301 - DNA, 1767 bp, Cryptococcus neoformans
  CDS (1)..(1767)
atggccgccaccctccgccagcgcacagccatgtccgagacccccgaccagctcgcaacccgcgtccagaaccttagcacggcgcctacaaccacccagaggaccggctctggctctgccgttttggagaacggtacaaacattggctccgccgctggccgcaaggcctcgatccctgctcaggtagaccccgagagaatcatcagcaccagtggcagtggccgaaccagcaggcgaggcagtggtttggtgatgactccaggaggcgttcagactgtataccacaccaggacaaatgaggatatcgaattccctcatgctgggaagaccgatgttccaccgccgagactagactgcaaacctgagatccttgcagtgactccccagaggatgaggatgatcgtccatgccattgaagagactcttgataacgggttgcagaagaatggacaagttgtgcctatgattacttttccagttcctacttatgtgtttggctggcctaccggtaacgaagtcggggatttcctcgctctcgaccttggtggtaccaatcttcgagtctgtctcgttactcttctaggcagtggaaagtttgaagtcactcagaccaagtaccgattgaccgaggaacagaagcaaggcgagggacaagctctgtgcgtgccttgccatttcatccactgcattcctaacacgaagaacagtctggacttttgcgcagagtgtttaaacagcttcatccgcgataccctcggccgcactgaaaaagacggtatcctcccccttggtttcactttctcctacccttgctctcaagaccgaattgatcacggtgttcttatccgttggaccaagggattcggtgctcccaacattgaaggatacgatgtcgccgccatgttcaaggacagtctcaagcgtatggacgtccccgcggaactcactgctctcatcaatgacactaccggtactcttatcgcctccaactacgttgacccccacaccaagatcgctgtcatcttcggaaccggctgtaacgctgcctacatggagaccgccggcagcatccccaagatcgactacgtcggattgcccgaggaacagggaatggctatcaactgtgaatggggagcgttcgactctttcgaccaccaacaccttccccgaaccaagtacgacattatcattgatgaatcttccaacaagccaggagagcagtcctttgagaagatgattgctggtctttaccttggtgaaatcttccgtctcgttctctgcgagctcatcgattctggtgaccttttcttgggtcagaacacctacaagctcgaaaaggcctatgctttcgacaccgctttcttgtctctcatggaagccgatgttaccgaagagcttttgaccatcatcggtgtctttgctcacttcttcggccttgaaactacccttgaagagcgtcagttctttaaaaagcttgctgtgttggtcggcacccgatctgctaggctttctgcgtgtggtatcgccgccattgttagcaagaaggggtacctcgaagaaggatgtgccgttggcgccgatggaagtttgtacaacaaataccccaactttgcggaccgagttcatgaggcgcttacggacattttcggtgaaagcggcaagaagattgtcacccaccatgctgaggatggttcaggtgtcggtagcgcaatcattgccgcaatgaccaaggccaggaaggactctggattctttgtcgaatactaa

SEQ ID NO: 149302 - protein, 588 aa, Cryptococcus neoformans
MAATLRQRTAMSETPDQLATRVQNLSTAPTTTQRTGSGSAVLENGTNIGSAAGRKASIPAQVDPERIISTSGSGRTSRRGSGLVMTPGGVQTVYHTRTNEDIEFPHAGKTDVPPPRLDCKPEILAVTPQRMRMIVHAIEETLDNGLQKNGQVVPMITFPVPTYVFGWPTGNEVGDFLALDLGGTNLRVCLVTLLGSGKFEVTQTKYRLTEEQKQGEGQALCVPCHFIHCIPNTKNSLDFCAECLNSFIRDTLGRTEKDGILPLGFTFSYPCSQDRIDHGVLIRWTKGFGAPNIEGYDVAAMFKDSLKRMDVPAELTALINDTTGTLIASNYVDPHTKIAVIFGTGCNAAYMETAGSIPKIDYVGLPEEQGMAINCEWGAFDSFDHQHLPRTKYDIIIDESSNKPGEQSFEKMIAGLYLGEIFRLVLCELIDSGDLFLGQNTYKLEKAYAFDTAFLSLMEADVTEELLTIIGVFAHFFGLETTLEERQFFKKLAVLVGTRSARLSACGIAAIVSKKGYLEEGCAVGADGSLYNKYPNFADRVHEALTDIFGESGKKIVTHHAEDGSGVGSAIIAAMTKARKDSGFFVEY

SEQ ID NO: 149303 - DNA, 1467 bp, Cryptococcus neoformans
  CDS (1)..(1467)
atgaccctccccgaagtttgcaagcaatttgaaccttatttcatcttggacgatgcgaagctcgtcgatatcgtcaagcacttccgtaaggagatggaggaaggtcttgcgagctatggaaaagacatggctatgattcctactttcgttactggcgttccagatggtactgaggaaggcgtattcttggctttggatctgggaggcaccaatttacgcgtctgtttgattcttctgcaaggccacaaccaattcaagatcaaacagcaaaagtataaagtatcagaggagcttaaaacgggccaggcgcgggtgctctttgattacattgcagaatctgtcgataacttccttaccgaagttgagagtcacgaagatattgctatacccgccaccggcgagccaatgcatcttgggtttacctttagtttccctgtggaacaaactgctattgacgcgggcaaattacttacatggaccaagggcttcaacacgaagaacgctatcggccacgatgtcgttcgtcttttacaagacgctttcgaccgcaagcacatgcatgtccgatgcagtgcattggttaatgacactgtgggcacccttctttcccgctcatatcagagtggtcctgctctcatcggtgccatttttggcactggtacaaatggtgcctatatcgacaagacacgaaccatcagcaagttgggcaaagaaaaaattgaggacgccgaagagggcggcgagcatgctggagaatttatggtcgtcaacatggaatggggagcgtttgacaacaagaggcagtgcctacctatctccctttttgataataaactggaccgagaaagcataaacccgcggaagcaagctttcgagaaactggtgtctggcatgtacctaggtgaaatcactcgtaacatgcttctctacatgattgattcctctctcctcttcgggggtcactccagtgagattatcaacacgcattatggcttcgacacttctttcgtctctggtattgaaggaatctcttctcccgaggaggtaaaaaagttaatcgtcaaggaactcaaggttgacccaaagcacgttacggataagtgtcccgagattgttcagtgggcggtacgattggtttccgaccgagcttgcaagcttgccgcctgcgctattgcagctgttgtccttcatacaggcaatgacaaggctccagagggtgaggaagacaagggtgtggatgttggtgtggatggcagtgttgccgagttcttacccatgtttagtgagagggtgatggccgcattgaaggctattctcggtgagaagagtgcggcaagggtgaagttgggactggccaaggatgggagtggtgtcggtgcggctctcactgcactccaggccaagaaggcattagatcggcgatcagacaggtcaatgaagttcgtccctggcgaacgtggaccttaa

SEQ ID NO: 149304 - protein, 488 aa, Cryptococcus neoformans
MTLPEVCKQFEPYFILDDAKLVDIVKHFRKEMEEGLASYGKDMAMIPTFVTGVPDGTEEGVFLALDLGGTNLRVCLILLQGHNQFKIKQQKYKVSEELKTGQARVLFDYIAESVDNFLTEVESHEDIAIPATGEPMHLGFTFSFPVEQTAIDAGKLLTWTKGFNTKNAIGHDVVRLLQDAFDRKHMHVRCSALVNDTVGTLLSRSYQSGPALIGAIFGTGTNGAYIDKTRTISKLGKEKIEDAEEGGEHAGEFMVVNMEWGAFDNKRQCLPISLFDNKLDRESINPRKQAFEKLVSGMYLGEITRNMLLYMIDSSLLFGGHSSEIINTHYGFDTSFVSGIEGISSPEEVKKLIVKELKVDPKHVTDKCPEIVQWAVRLVSDRACKLAACAIAAVVLHTGNDKAPEGEEDKGVDVGVDGSVAEFLPMFSERVMAALKAILGEKSAARVKLGLAKDGSGVGAALTALQAKKALDRRSDRSMKFVPGERGP

SEQ ID NO: 149305 - DNA, 1386 bp, Aedes aegypti
  CDS (1)..(1386)
atggatttggtcaagccattcatggatctacacgtggatagagtcagcaaggaaatccgcgaacaatgtcaggaactgatactgtcagacaaacagatcgaggagatcatgcggcggttgctgaaggaaatcaaccgaggtctaggaaaagccacacagcccgaagcagacatcaaatggttcatcacctacgtacaagatctggcaaatgggaaagaaaagggaaaatttcttgcgctggatctgggcggtaccaacttccgggtgctgttgattcacctcaaggatgaaaacgacttcgagatgttgtcgaaaatctacgccattccacagagtattatgcttggcagtgggacgcaactgtttgatcacattgcggaatgtttagctaattttatgaaggaacattctgtctacgaagaaaaactacctctaggcttcacattctcattcccgctaacacagctcgggctgaccaaaggtattctggcacggtggaccaaaggtttcaactgttccggcgttgtcggagaagacgttgtccagctattaaaagatgccatcgccagaagaggggatgtccaaatcgaaatctgtgccattctcaacgataccaccggcacactgatgtcctgtgcttggaagaatcacaactgtagaatcggattgatcgtcggcaccggtagcaatgcatgctatgtggaaaaggtcgaaaactgcgagatgttcgacggaccgaaagatccgaagaaggaacacgtcctcatcaacaccgagtggggtgcgttcggcgataacggagcgctcgactttgtgcggacagagtacgaccgggagattgatcacttcagtataaacccgggaaggcagatacaagaaaagatgatctccggtatgtatatgggcgagctggctcgcctggccatcgtcaagttcacacgggccggcctcctgttcggaggtgtcggttccgacattctgttcaaacgtgggcagttcttcaccaagtacgtgtcagaaattgaatcggacaaaccgggtacctacatgtactgccgtgacgtgctggacgagttgggtttggagcacgcaaccgacgaggactgtgcgaacgtgcgttatatttgcgagtgtgtatcgagtcgagctgcccatcttgtgtccgccggtatcgctgccctcatcaacaagatggacgaaaagagtgtcaccgtcggcgttgacggttcggtgtatcgtttccacccgaaattccacgatctgatgaaggccaaaatcagacagtttgtgaagccggacatcagcttcgacctcatgctgtcggaggatggttctgggcgtggtgcggcactggtggccgccgtggcgtgtagagaagcccactaa

SEQ ID NO: 149306 - protein, 461 aa, Aedes aegypti
MDLVKPFMDLHVDRVSKEIREQCQELILSDKQIEEIMRRLLKEINRGLGKATQPEADIKWFITYVQDLANGKEKGKFLALDLGGTNFRVLLIHLKDENDFEMLSKIYAIPQSIMLGSGTQLFDHIAECLANFMKEHSVYEEKLPLGFTFSFPLTQLGLTKGILARWTKGFNCSGVVGEDVVQLLKDAIARRGDVQIEICAILNDTTGTLMSCAWKNHNCRIGLIVGTGSNACYVEKVENCEMFDGPKDPKKEHVLINTEWGAFGDNGALDFVRTEYDREIDHFSINPGRQIQEKMISGMYMGELARLAIVKFTRAGLLFGGVGSDILFKRGQFFTKYVSEIESDKPGTYMYCRDVLDELGLEHATDEDCANVRYICECVSSRAAHLVSAGIAALINKMDEKSVTVGVDGSVYRFHPKFHDLMKAKIRQFVKPDISFDLMLSEDGSGRGAALVAAVACREAH

SEQ ID NO: 149307 - DNA, 1916 bp, Nicotiana tabacum
  CDS (119)..(1612)
gaactctcctttgatcggatctccttcttaaccaacacagacacaaatttttactttactgatatcattttttctcagtggaccaactttttgccaacctcaaattccggcaaaaaaaatgaagaaagtgacggtgggagccgccgtggttggtgcagctgcggtgtgtgcagtggcggcgttaatagtgaaccaccggatgcggaaatctagtaaatggggtcgtgctatggctattcttcgcgagtttgaggaaaagtgtaagactcaagatgcaaagcttaagcaagttgctgatgctatgactgttgagatgcacgccggacttgcttctgaaggcggcagcaagctcaagatgcttatcacctatgtcgataatctcccaactggtgatgaagctggcgtcttttatgcattggatcttggtggaacaaattttcgagtattgcgagtgcaattgggtggaaaagatggtggtattattcatcaagaatttgctgaggcatcaattcctccaagtttgatggttgggacttcagatgcactttttgattatattgcggctgagcttgcaaaatttgttgctgcggaagaggaaaaatttcatcaacctcctggtaagcagagagaactaggtttcaccttctcattcccagtaatgcagacttcaatcaactctgggactattatgcggtggacaaaaggcttctctattgatgatgcggttggccaagatgttgttggagaactcacaaaagctatgaaaagaaaaggtgtcgatatgcgggtctcagctctggtgaatgatactgttggaacattagctggtggtaaatatacgcaaaaggatgtagctgttgctgttatcttaggtacagggaccaatgcagcttatgtggagcgggtgcaggcaattccaaagtggcatggtcctgtgccaaaatctggtgaaatggttatcaatatggaatggggtaattttaggtcatcccatctgcccttgacggagtatgatcatgcattggataacgagagtttaaatcctggtgaacagatatttgagaagatgacttctggcatgtacttgggagaaattttacgcagagttctactcagggtgtctgaagaagctggcgtttttggtgatgaggtccctccaaagctcaaggattcatttgtgttaaggacacctgatatgtctgctatgcatcatgacacatcccctgatctgaaagtggttggtgaaaagctgaaggatattttagagatatctaatacctccttgaagacaaggaaattagtggttgagctgtgcaatatcgttgcaacacgtggggcaagacttgcagctgcaggggtactaggcatcttgaaaaagatgggaagagatacgcctaagcagggtggttcagaaaggacggttatagccatggatggcgggttgtatgagcactatacagaatatagaatgtgtttagagaactctttgaaggacttgctcggagaggaattggcaacgagcatcgtttttgtgcactccaatgatggttctggcattggtgctgctcttcttgctgcctctcattcaatgtaccttgaagatcaagcttaggagagtgtgatcaaatccatatcttgttagaggggactacctttagactctatattttgctctcaagcattttcggtattttctctcctttattgtaccatcaaatgaaattaataatatccccagcagatacttttgacttttatctccaggagagttttcctagaagtgccttcaagcacagaattttcatggataaaagatccttttactacctgactggatgatcttcaatcatttactgaaaaacatacagaattttcgtagttgaacaaaaaaaaaaaaaaaaaaaaaaaaaaaaaaa

SEQ ID NO: 149308 - protein, 497 aa, Nicotiana tabacum
MKKVTVGAAVVGAAAVCAVAALIVNHRMRKSSKWGRAMAILREFEEKCKTQDAKLKQVADAMTVEMHAGLASEGGSKLKMLITYVDNLPTGDEAGVFYALDLGGTNFRVLRVQLGGKDGGIIHQEFAEASIPPSLMVGTSDALFDYIAAELAKFVAAEEEKFHQPPGKQRELGFTFSFPVMQTSINSGTIMRWTKGFSIDDAVGQDVVGELTKAMKRKGVDMRVSALVNDTVGTLAGGKYTQKDVAVAVILGTGTNAAYVERVQAIPKWHGPVPKSGEMVINMEWGNFRSSHLPLTEYDHALDNESLNPGEQIFEKMTSGMYLGEILRRVLLRVSEEAGVFGDEVPPKLKDSFVLRTPDMSAMHHDTSPDLKVVGEKLKDILEISNTSLKTRKLVVELCNIVATRGARLAAAGVLGILKKMGRDTPKQGGSERTVIAMDGGLYEHYTEYRMCLENSLKDLLGEELATSIVFVHSNDGSGIGAALLAASHSMYLEDQA

SEQ ID NO: 149309 - DNA, 1491 bp, Nicotiana sylvestris
  CDS (1)..(1491)
atgaagaaggcgacggtgggtgctgtggtggtgggtacagcggtggcggtagctgtggcggcgctcatcatgcgccaccgcatgggtaaatcgagcaaatgggcacgtgccagggcaattctgaaggaattcgaggagaaatgtgccaccccagatggcaagctgaagcaagtggctgatgccatgacggtggagatgcacgccggactcgcctctgaaggcggcagcaagctcaagatgcttattagctatgtcgacaatctccctactggcgatgaaggaggagtcttttatgcattggatcttggtggaacaaattttcgagtattgcgggtgcaattggggggaaaagatggtggcattatccatcaagaatttgcagaggcatcaattcctccaaatttgatggttggaacttcagaagcactttttgactatattgcggcagaacttgcaaaattcgtagctgaagaaggagaagagtttcatccacctcctggtaggcagagagaattaggcttcaccttctcgttcccaataatgcagacttcaatcaattctggaactcttatcaggtggacgaaaggtttctccattgatgacacggttggcaaagatgttgttgcagaactgacaaaagcaatgcaaaaacgagaaattgatatgagggtctcagcgcttgtgaatgatactgttggaacattggctggtggtagattcaccaataaggatgtatccattgctgtgatattaggtactgggaccaatgcagcatatgtggaacgggctcaggcaattcccaaatggcacggtcctctgcctaaatctggagaaatggtgatcaacatggaatggggtaactttaggtcctcccaccttcccttgacagagtacgatcatgctatggataccgatagtttaaatcctggtgaacagatatttgagaagatatgttcgggcatgtacttgggagaaattttacgcagagttctacttagaatggctgaagaagctggcatttttggcgaggaagtccctccaaaactcaagaattcattcatattgaggacccctgaaatgtctgctatgcatcatgacacatcctctgatttgagagtggttggcgacaagttgaaggatatcttagagatatccaatacctccttgaagacaaggagattagttgttgagctgtgtaatattgttgcaacacgtggcgccagacttgcagcagctgggatcttgggcattatcaaaaagatgggaaaggatacacccagggaaagtgatccagaaaagattgtcgtagccatggatggcggattgtatgaacattatacagaatacagtaagtgcttggagaacactttggttgaattgcttggaaaggaaatggccacaagtattgttttcaagcacgcgaatgatggttctggcattggcgctgcactccttgcggcctctaactccgtgtatgttgaagacaagtga

SEQ ID NO: 149310 - protein, 496 aa, Nicotiana sylvestris
MKKATVGAVVVGTAVAVAVAALIMRHRMGKSSKWARARAILKEFEEKCATPDGKLKQVADAMTVEMHAGLASEGGSKLKMLISYVDNLPTGDEGGVFYALDLGGTNFRVLRVQLGGKDGGIIHQEFAEASIPPNLMVGTSEALFDYIAAELAKFVAEEGEEFHPPPGRQRELGFTFSFPIMQTSINSGTLIRWTKGFSIDDTVGKDVVAELTKAMQKREIDMRVSALVNDTVGTLAGGRFTNKDVSIAVILGTGTNAAYVERAQAIPKWHGPLPKSGEMVINMEWGNFRSSHLPLTEYDHAMDTDSLNPGEQIFEKICSGMYLGEILRRVLLRMAEEAGIFGEEVPPKLKNSFILRTPEMSAMHHDTSSDLRVVGDKLKDILEISNTSLKTRRLVVELCNIVATRGARLAAAGILGIIKKMGKDTPRESDPEKIVVAMDGGLYEHYTEYSKCLENTLVELLGKEMATSIVFKHANDGSGIGAALLAASNSVYVEDK

SEQ ID NO: 149311 - DNA, 1797 bp, Nicotiana tabacum
  CDS (33)..(1565)
cctcaaataaaaagaaaaataaacggtgtcgtatggggaggttagcggtggggatatcggcggggtttgcggtggcggcgtgtattgtggcggcagctatggtgggtaagagggtaaaaaggaggaggaagtggaagaagatggtgaaggttctagaagaactggaagagtcgtgtggtacacccgtgggtaggctaaagcaagtagtggatgctatggctgttgaaatgcacgctggacttgcctctgaaggcgggagtaaactcaagatgttgcttacttatgttgataagctcccaaatgggagggaaaagggaacatattatgctctgcaccttggtggtacgaattttagagtcttgagagtccacttaggaggccaaaggtctgctattcttggacaagatatagaacgacaacccattccgcaacatctaatgactagcacaagcgaggatctccttgatttcgttgcgtcatcattaaaggacttcattgaaaaggaaggtaatggcttggagcagccttcacccaggaggagagaacttggctttacattttcatttcctgtgaagcaaacttccgcctcatctggcattttgatcaaatggacaaagggattttcgattgaagacatgattggaagagatgtttctgaatgtctacaacaagcaattgctagaaaaggtcaagatgtgcgggtggcagcattgataaatgacactgtgggaactctagctcttggacattataatgatgaagacacagttgccgcggttgtaattgggaccggcactaacgcatgctatttggagcgggcagatgcaattattaagtgccaaggtcttttaacaacatcaggaggcatggtagtcaatatggaatggggaaacttttggtcatctcatttacctagaacctcatatgatattgacttggatgttgctagcccaaacccaaatgatcagggttttgagaaaatgatatcaggactgtatttgggagacattgtcaggagagtactccttagaatgtcacaggaatcagatgattttggacctgcatcatcaaaattagcagttcctttcgccttgaggacaccgttgatggctgctatgcacgaggatgattcacctgacttaagtgaagtagccaggattctgggagaagttctagagttacctgatgtcccagtgaaagttcggaagcttgtagtgaaggtatgtgatgtaattactcgaagggctgctagattagcagctgctggtatcgtgggaatattgaagaagataggtcgagatggaagtggaggcatagctggtggaaaattcaggagcgatagaccaagtcggatgagaagaacggttgtggctatcgagggtggtttatacacaagttacaccttattcagagaatacctgaatgaagcgatgaaggaaattttaggggaagaaatttcctcgaacgtcattcttagggtcatggaagatggatcagggattggagcagctcttcttgctgctgcaaattcagcctctgaagtggatagggtacagctgcactgaatataaagcaaatactactatatatacacatctatacacagctttgtaaattgtagcaaaattgtttcatatattcaaatcctatcacaatgtaataggaaggttgtgtatatgtgtcatatactgttcaaatctgatgttatagtctagaatatccccacttgtgttcttagtaatgatcattgcaacccttgtatgtgaaattaatgctattgatgatttcagtatttag

SEQ ID NO: 149312 - protein, 510 aa, Nicotiana tabacum
MGRLAVGISAGFAVAACIVAAAMVGKRVKRRRKWKKMVKVLEELEESCGTPVGRLKQVVDAMAVEMHAGLASEGGSKLKMLLTYVDKLPNGREKGTYYALHLGGTNFRVLRVHLGGQRSAILGQDIERQPIPQHLMTSTSEDLLDFVASSLKDFIEKEGNGLEQPSPRRRELGFTFSFPVKQTSASSGILIKWTKGFSIEDMIGRDVSECLQQAIARKGQDVRVAALINDTVGTLALGHYNDEDTVAAVVIGTGTNACYLERADAIIKCQGLLTTSGGMVVNMEWGNFWSSHLPRTSYDIDLDVASPNPNDQGFEKMISGLYLGDIVRRVLLRMSQESDDFGPASSKLAVPFALRTPLMAAMHEDDSPDLSEVARILGEVLELPDVPVKVRKLVVKVCDVITRRAARLAAAGIVGILKKIGRDGSGGIAGGKFRSDRPSRMRRTVVAIEGGLYTSYTLFREYLNEAMKEILGEEISSNVILRVMEDGSGIGAALLAAANSASEVDRVQLH

SEQ ID NO: 149313 - DNA, 1964 bp, Nicotiana tabacum
  CDS (101)..(1600)
tctttaacaaaccccatttaaaatcaaccaaaaaagtttcaatctttacggtatattcactcaaatatacacaaaaagtttgattttttttcaagaaaatatgggaaaattggttgtaggtgtatcagttgtgtgtactgctgctgtagtatgtggggtggcagttttgttaatgaagcgcaggatgaagaattctggggagtggggaaaagttgaagctttattgaaggattttgaggagaagtgtgcaactccaatggggaaacttaagcaggtagctgatgctatgactgtagagatgcatgctggacttgcttctgaaggtgggagtaagctcaagatgcttattagctatgttgataaccttcctactggggacgaagaaggtctgttttatgcattggatctaggcggcacaaactttcgtgtgatgcgtgtgcagttgggtgggaacgaaaagcgtatagttaaacatgaagttaaagaagtttcaattccacagaatgtgatggctggatcatcatctgaagtgttatttgattttattgccacggcacttgcagaatttgtagctacagaaggtgatgattttcatcttccacctggtagacaaagggaattaggctttaccttctctttccctgtgaaacaattgtcaattgcatcaggaactcttattaaatggacaaagggcttctccatagaagacgtggttggccaagatgtggtgggagaattagcaaaagcaatggaaagggccggccttgatgtgcgtgtgactgctttagtcaatgatactgttggaacgttagcagggggtcggtacaatgatcctgatgtcattgctgcagtaattttgggtactggaaccaatgcagcatatgttgaacgggctcatgcgattcccaaatggcatggtctgttgccgaaatccggagagatggttatcaacatggaatggggtaatttcctctcatcacatcttccagtaacagaatatgaccaaaatcttgatgttgagagtttaaaccccggggagcagatttatgaaaagatgatctccgggatgtatcttggagaaattttgcgtagagtattgtgtagaatggctaaagaagcttcattattcggtgattatgtcccatccaaactgaaaattcctttcatattgaggactccggatatggctgctatgcatcacgacgagtcggctgatctcaaggtggttggcaataaactgaaggatatcttagaggtacctaattctaccttgaaaatgaggaaaatagttgtggagctatgcgacatcatcacctctcgtggagctcgtctttctgcagcaggaatcgtgggcatcctcaagaaattgggaaaagacactttgaaggacggagagaaccagaggtctgtcatagctgtggacggtgcattgtttgagcgttacaccaagttcagaaattgcttggaggaaactatgaaagagttactgggagacactgcggacagcatagttattgagctttctaatgatggttcaggtgttggagctgcacttttggctgcctcgccttcccaatacacagatctcgaggaatcatgatcatggtcagagtgacacaaccaaaagtgcctagccaaagtttgtacgtttacaatcacccctcttcttgctaaagagaaccctcttcttactttcttctccgagatgattgaaatattccttgcttccttgtgcaccgcatcatgtaagagtgagctttgaagtgagccatagttcaatgtatcaaatgagcacatctctcttcagctaaacatcaatatgctgaccttttcactcctggtgcctctaaggatcatctttatcccaagtgtaagcttaaattttttcctcactagtcagaaataaagctaggatacaaataaagttcttctagtagcaaaaaaaaaaaaaaaaaaaaaaaaaa

SEQ ID NO: 149314 - protein, 499 aa, Nicotiana tabacum
MGKLVVGVSVVCTAAVVCGVAVLLMKRRMKNSGEWGKVEALLKDFEEKCATPMGKLKQVADAMTVEMHAGLASEGGSKLKMLISYVDNLPTGDEEGLFYALDLGGTNFRVMRVQLGGNEKRIVKHEVKEVSIPQNVMAGSSSEVLFDFIATALAEFVATEGDDFHLPPGRQRELGFTFSFPVKQLSIASGTLIKWTKGFSIEDVVGQDVVGELAKAMERAGLDVRVTALVNDTVGTLAGGRYNDPDVIAAVILGTGTNAAYVERAHAIPKWHGLLPKSGEMVINMEWGNFLSSHLPVTEYDQNLDVESLNPGEQIYEKMISGMYLGEILRRVLCRMAKEASLFGDYVPSKLKIPFILRTPDMAAMHHDESADLKVVGNKLKDILEVPNSTLKMRKIVVELCDIITSRGARLSAAGIVGILKKLGKDTLKDGENQRSVIAVDGALFERYTKFRNCLEETMKELLGDTADSIVIELSNDGSGVGAALLAASPSQYTDLEES

SEQ ID NO: 149315 - DNA, 1568 bp, Nicotiana tabacum
  CDS (38)..(1534)
agaacaattgtgtgttgttgtgttacaagtgaaaaatatgggaaaagtggtggtgggtgcagcagtagtatgtacagctgcagtatgtgctgctgctgttttattaatgaggcacaaaatggaaaattcaggtaaatgggctaaagctatggatatattgaaagagtttgaggagaagtgtgaaactccaataggaaaacttaggcaagtggctgatgctatgactgtagagatgcatgctggacttgcttctgaaggtggtagcaaactcaagatgctcattagctatgttgataacctccccactggggacgaaaccggtctgttttatgcattagatctaggcggcacaaacttccgtgtgatgcgtgtgcagttgggcgggaaagaaaagcgtatagttaaacaagaagttaaagaagtttcaattccaaagaatgtgatggctggatcgtcatctgacgcgttatttgattttattgccacgacgcttgtaaaatttgttgctacagaaggcgacgattttcatcttccacccggtagacaaagggagttgggcttcaccttctctttcccagttaaacaactgtcaattgcatcaggaactcttattaaatggacaaagggcttctctatagatgatgcggttggccaagatgttgttagagagttaacaaaagcaatggaaagggtcggtcttgacgtgcgcgtggctgctttgatcaatgatactgttggaacattagcaggaggtcggtataacaaccctgatgtcattgctgcagtaatattgggtactggaaccaatgcagcatatgttgagcgggcaaatacgattcccaaatggcatggtctgctgcctaaatcaggagatatggttattaacatggaatggggtaatttccgctcatcacatcttccggtaacagaatacgaccaaagtcttgacgctgagagtttaaacccaggggagcagatttatgagaagatgatttccgggatgtatcttggagaaattttgcgcagagtcttgtgtagaatggctgaagaagcttcattttttgatgattatgtcccaccaaaactgaaaactccattcattttaaggactcaggacatgtctgctatgcatcacgacaagtctgctgatctcaaggtggttggcgacaagctgaaggatatcttagaggtacctaattctacctggaaaatgaggaaaataattgttgagctatgtgacattattacctctcgtggagctcgtctttctgcagcaggaatcgtgggtatcctcaagaaattgggaagagacactttgaaggatggagagaagcagaggtcagtaatagctgttgacggtgcattgtttgagcattacacaaagttcagaaattgcatggagggaactattaaagagttgttgggagacgccgcagaaaacatagtcgttaagctttcgtatgatggttctggtgttggagctgcactattggctgcttctcattcccagtacctcggactcaaggaatcttgatcatggtcagagtgatagaaaaagcctgagatgg

SEQ ID NO: 149316 - protein, 498 aa, Nicotiana tabacum
MGKVVVGAAVVCTAAVCAAAVLLMRHKMENSGKWAKAMDILKEFEEKCETPIGKLRQVADAMTVEMHAGLASEGGSKLKMLISYVDNLPTGDETGLFYALDLGGTNFRVMRVQLGGKEKRIVKQEVKEVSIPKNVMAGSSSDALFDFIATTLVKFVATEGDDFHLPPGRQRELGFTFSFPVKQLSIASGTLIKWTKGFSIDDAVGQDVVRELTKAMERVGLDVRVAALINDTVGTLAGGRYNNPDVIAAVILGTGTNAAYVERANTIPKWHGLLPKSGDMVINMEWGNFRSSHLPVTEYDQSLDAESLNPGEQIYEKMISGMYLGEILRRVLCRMAEEASFFDDYVPPKLKTPFILRTQDMSAMHHDKSADLKVVGDKLKDILEVPNSTWKMRKIIVELCDIITSRGARLSAAGIVGILKKLGRDTLKDGEKQRSVIAVDGALFEHYTKFRNCMEGTIKELLGDAAENIVVKLSYDGSGVGAALLAASHSQYLGLKES

SEQ ID NO: 149317 - DNA, 1568 bp, Nicotiana tabacum
  CDS (38)..(1534)
agaacaattgtgtgttgttgtgttacaagtgaaaaatatgggaaaagtggtggtgggtgcagcagtagtatgtacagctgcagtatgtgctgctgctgttttattaatgaggcacaaaatgaaaaattcaggtaaatgggctaaagctatggatatattgaaagagtttgaggagaaatgtgaaactccaataggaaaattaaggcaagtggctgatgctatgactgtagagatgcatgctggtcttgcttctgaaggtggtagcaaactcaagatgcttattagctatgttgataacctccctactggggacgaaaccggtctgttttatgcattagatctaggcggcacaaacttccgtgtgatgcgagtgcagttgggcgggaaggaaaagcgtatagttaaacaagaagttaaagaagtttcaattccaaagaatgtgatggctggatcatcatctgatgcgttatttgattttattgccacggcgcttgtaaaatttgttgctacagaagacgacgattttcgtcttccacccggtagacaaagggagctgggcttcaccttctctttcccagttaaacaactgtcaattgcatcagggactcttattaaatggacaaagggcttctccatcgatgatacggttgggcaagatgttgttagagagttaacaaaagcaatggaaagggtcggtcttgacgtgcgcgtggctgctttggtcaatgatactgttggaacattagcaggaggtcggtataacaaccctgatgtcattgctgcagtaatattgggtactggaaccaatgcagcatatgttgagcgggcaaatacaattcccaaatggcatggcctgctgcctaaatcaggagatatggttattaacatggaatggggtaatttccgctcatcacatcttccggtaacagaatacgaccaaagtcttgacactgagagtttaaaccccggggagcagatttatgagaagatgatttccgggatgtatcttggagaaattttgcgcagagtcttgtgtagaatggctgaagaagcttcattttttgatgattatgtcccaccgaaactgaaaactccattcatattgaggactccggacatgtctgctatgcatcacgacaagtctgctgatctcaaggtggttggcgacaagctgaaggatatcttagaggtacctaattctacctggaaaatgaggaaaataattgtagagctatgtgacattattacctctcgtggagctcgtctttctgcagcaggaattgtgggcatcctcaagaaattgggaagagacactttgaaggatggagagaagcagaggtcagtaatagctgttgacggcgcattgtttgagcattacacaaagttcagaaattgcatggagggaactatcaaagagttgttgggagacgctgcggaaagcatagtcattgagctttcgaatgatggttcaggcattggagctgcactattggctgcttctcattcacaatatctcggactggaggaatcttgatcatggtcagagtgatagaaaaagcctgagatgg

SEQ ID NO: 149318 - protein, 498 aa, Nicotiana tabacum
MGKVVVGAAVVCTAAVCAAAVLLMRHKMKNSGKWAKAMDILKEFEEKCETPIGKLRQVADAMTVEMHAGLASEGGSKLKMLISYVDNLPTGDETGLFYALDLGGTNFRVMRVQLGGKEKRIVKQEVKEVSIPKNVMAGSSSDALFDFIATALVKFVATEDDDFRLPPGRQRELGFTFSFPVKQLSIASGTLIKWTKGFSIDDTVGQDVVRELTKAMERVGLDVRVAALVNDTVGTLAGGRYNNPDVIAAVILGTGTNAAYVERANTIPKWHGLLPKSGDMVINMEWGNFRSSHLPVTEYDQSLDTESLNPGEQIYEKMISGMYLGEILRRVLCRMAEEASFFDDYVPPKLKTPFILRTPDMSAMHHDKSADLKVVGDKLKDILEVPNSTWKMRKIIVELCDIITSRGARLSAAGIVGILKKLGRDTLKDGEKQRSVIAVDGALFEHYTKFRNCMEGTIKELLGDAAESIVIELSNDGSGIGAALLAASHSQYLGLEES

SEQ ID NO: 149319 - DNA, 1849 bp, Nicotiana tabacum
  CDS (44)..(1537)
gctaattacccttctccatcatttttctttagtattaagagatatgaagaaggcgacggtgggagcggtggtggtgggggcggcggtgacggtagctgtgggggcactcatcgtccggcaccgaatgcggaaatcgagcaagtgggcacgtgcgagggcaattctgaaagaattcgaggagaagtgtgggaccccagatgccaagctaaagcaagtggcggatgccatgacggtggagatgcacgccggcctcgcctctgagggcggcagcaaactcaagatgcttatcagctatgtcgacaatctcccaactggcgatgaagaaggagtcttttatgcattggatcttggtggaacaaattttcgagtattgcgggtgcaattggggggaaaagatggtggtattgtccatcaagaatttacggaggcatcaattcctccaaatttgatggttgggacttcagaagcactttttgactatattgcggcagaacttgcaaaatttgttgctgaagaagaagaaaaatttcatcaacctcctggtaagcagagggaactcggtttcactttctcattcccaatcatgcagacttcaatcaattctggaactcttatcaggtggacgaaaggtttctccattgatgacacggttggacaagatgttgttgcagaactgacaaaagccatgcaaagaaaaggagttgatatgagggtgtcggcgctggtgaatgatactgttggaacattggctggtggtagattctccaataaggatgtatccattgctgtgatattaggtactgggaccaatgcagcatatgtggaacgggctcaggcaattcccaaatggcatggtcctctgcctaaatctggagaaatggttatcaacatggaatggggtaactttaggtcctcccatctccccttgacagagtacgaccatgcaatggatacagatagtttaaatcctggtgaacagatatttgagaagatatgctctggcatgtacttgggagaaattttacgcagagttctactcagaatgtctgaagaagctgccattttcggtgatgaggtccccccaaaactcaagaatcaattcatattgaggacacctgaaatgtctgctatgcatcatgacacatcctctgatttgagagtggttggcgacaagttgaaggatatcttagagatatccaatacctccttgaagacaagaagattagttgttgagctgtgcaacattgttgcaacacgtggcgcaaggcttgcagcggctggggtcttgggcattgtcaaaaagatgggcagggatacacccagggaaagtggtcaagaaaagatagtcgtagccatggatggtggattgtacgagcactatacagaatacagaaagtgcttggagaacactttagttgaattgcttggagaggaaatggcaacaagtattgttttcgagcacgcaaatgatggttctggcattggcgctgcacttcttgcggcctctaactccctatatgttgaagacaagtcttgagagcgatcaagatgatatttagctagaggaaactctctcaaccttttatatagtgcttttctctagccttttcttttgatttctctcctttttggttcttctaccaattatattcataattttgcagcacttgtgcttggtttatagtttaggatatttttcctgggaatgcctacttatttcttctggaaaagggtgcaagcaaattgtataacactcagcactgctgattcttccccttggtcttttgttttcaatctgcgatcaaattttagggtttaataaaatggggtgttaagtttttgttaaagc

SEQ ID NO: 149320 - protein, 497 aa, Nicotiana tabacum
MKKATVGAVVVGAAVTVAVGALIVRHRMRKSSKWARARAILKEFEEKCGTPDAKLKQVADAMTVEMHAGLASEGGSKLKMLISYVDNLPTGDEEGVFYALDLGGTNFRVLRVQLGGKDGGIVHQEFTEASIPPNLMVGTSEALFDYIAAELAKFVAEEEEKFHQPPGKQRELGFTFSFPIMQTSINSGTLIRWTKGFSIDDTVGQDVVAELTKAMQRKGVDMRVSALVNDTVGTLAGGRFSNKDVSIAVILGTGTNAAYVERAQAIPKWHGPLPKSGEMVINMEWGNFRSSHLPLTEYDHAMDTDSLNPGEQIFEKICSGMYLGEILRRVLLRMSEEAAIFGDEVPPKLKNQFILRTPEMSAMHHDTSSDLRVVGDKLKDILEISNTSLKTRRLVVELCNIVATRGARLAAAGVLGIVKKMGRDTPRESGQEKIVVAMDGGLYEHYTEYRKCLENTLVELLGEEMATSIVFEHANDGSGIGAALLAASNSLYVEDKS

SEQ ID NO: 149321 - DNA, 1853 bp, Nicotiana tabacum
  CDS (82)..(1575)
ttttttgtattttttttcatttgtttcggtggacaacttttagccaacctccaattcctccgccgtgacaaaaaagaaaggatgaagaaagcgacggtgggagccgccgtggttggcgccgctacggtatgtgctgtggcggcattcatagtgaaccaccgtatgcgcaaatctagtaaatgggcacgtgctatggctattcttcgtgaatttgaggaaaagtgtgggacccctgatgctaagctcaagcaagtcgctgatgctatgaccgtcgagatgcacgctggacttgcctccgaaggtggtagcaagctcaagatgcttatcacttacgtcgataatctccccaccggtgatgaagccggcgtcttttatgcgttggatcttggtggaacaaattttcgagtattgcgagtgcaacttggtggaaaagatggtggtattgttcatcaagaatttgcggaggcatcaattcctccaaatttgatggtcgggacttcagaagcactttttgattatattgcggcagaacttgcaaaatttgtcgctgaggaagaggaaaagtttcaacaacctcctggtaagcagagagaactaggtttcaccttctcattcccggtaatgcagacttcaatcaactctgggactattatgaggtggacaaagggcttctccattgatgatgcggttggccaagatgttgttggagaactcacaaaagctatgaaaagaaaaggagttgatatgcgggtctcagctctggtgaatgatactgttgggacgttggctggtggtaaatatacacacaacgacgtagctgttgctgttatcttaggtacagggaccaatgcagcttatgtggaacgggtgcaggcgattccaaagtggcatggtccagtgccaaaatctggtgaaatggttatcaacatggaatggggtaattttaggtcatcccatcttcccttgacacagtatgatcacgcgttggatactaatagtttgaatcctggtgatcagatatttgagaagatgacttctggcatgtacttgggagaaattttacgcagagttctactcagggtggctgaagatgctggcatttttggtgatgaggtccctccaaagctcaagagtccatttgtattgaggacacctgatatgtctgctatgcatcatgacatatcctctgatctgagagtggttggtgacaagctgaaggatattctagagatatctaatacctccttgaagacaaggagattagtcgttgagctgtgcaacatcgttgcaacacgaggggcaaggcttgcagctgcaggtatattgggtatcttaaagaagatgggaagggatacacctaggcaaggtggtccagaaaagacggttgtagccatggatggcggattgtatgagcactatacagagtacagaacgtgcttagagaacacattgaaggaattgcttggagatgaattggcgacaagcattgttttcgagcactccaatgatggttctggcattggtgctgctcttcttgctgcctctaactcaatgtaccttgaagataagtcctaggagtgatcaaatccctttcttgctagaggaaaccaccttttactctttatattttgctctcgagcatttttcttcaatttttctccggattataccatcaagcatatttaataaattttcccagtacctttttatctctaggaattttttcctagaaatgcctacacatctagcatacctttttaagtcgctttcagcactgttggttctctctttaatctctttttcatttacttttgaaatcaaattcaaaggcaataaattgggggaatttccgc

SEQ ID NO: 149322 - protein, 497 aa, Nicotiana tabacum
MKKATVGAAVVGAATVCAVAAFIVNHRMRKSSKWARAMAILREFEEKCGTPDAKLKQVADAMTVEMHAGLASEGGSKLKMLITYVDNLPTGDEAGVFYALDLGGTNFRVLRVQLGGKDGGIVHQEFAEASIPPNLMVGTSEALFDYIAAELAKFVAEEEEKFQQPPGKQRELGFTFSFPVMQTSINSGTIMRWTKGFSIDDAVGQDVVGELTKAMKRKGVDMRVSALVNDTVGTLAGGKYTHNDVAVAVILGTGTNAAYVERVQAIPKWHGPVPKSGEMVINMEWGNFRSSHLPLTQYDHALDTNSLNPGDQIFEKMTSGMYLGEILRRVLLRVAEDAGIFGDEVPPKLKSPFVLRTPDMSAMHHDISSDLRVVGDKLKDILEISNTSLKTRRLVVELCNIVATRGARLAAAGILGILKKMGRDTPRQGGPEKTVVAMDGGLYEHYTEYRTCLENTLKELLGDELATSIVFEHSNDGSGIGAALLAASNSMYLEDKS

SEQ ID NO: 149323 - DNA, 2577 bp, Pichia angusta
  CDS (691)..(2142)
cactagtttttttttaggatagtagttaattccttgttacggccggcactccagaatgaaaacccgtctgcaataaaattcatgacacctcacactcatttgtatgtagtttttttatcaacaagtattccagggggatcttgacgattgcgcatcggctggactcggttatggataatgaccgggtgctggtgctggataatggcgaggtgcaagagttcgacaacccgcaaaagttgctggaaaatccggactcatacttctaccggctctgcgtggacggcgggcatgtgaagagggattgacatgacatcagatgggcgactttttccgactgtttttgtcgcacctgcatggccacggaaaaacgtgtgcgaattttacgaaaaaagccagtcgctattgtttgctagaaaatttcgatttactttttcagcatgggccggtgcacatctttataaatctggagacttttctattgttgaataatgcagtagtatgaccccggtactaccccagtaaatgcttatagtgatgaaagtggagttaggtggaggtcgctggagaaatgtatgccgaggggtggtgcgttgtcctaaagaatttttccggcccaccagagtagaatataaaaagagctttattctctgttttgaaaaataataccacattattatattttagcctataatgagtatcgacgacaaaccgctgccagcagacctggctaaagagatcgagacctacaaggagctgttctgggtgccaaccgagactctccacaagatcatcgattacttcatcgaggaactcgagagaggtaacgcggacggaacagatcctaccggtatccccatgaaccctgcctgggtgttggaatacccgaacggttctgagaccggcgattaccttgccatcgacttgggaggaacaaaccttcgtgttgtccttgctcacttgcttggagaccacaagttttctaccgaacaaactaagtaccacatcccaagccacatgagaacaaccaagaacagagacgagctgtttgagttcattgctcaatgtctggaagactttcttaagtcgaaacaccctgacggaattccatcggacgctgttttccccttgggattcactttttcgtacccagccacgcaaaacagcatttttgagggtgttctacagagatggaccaaaggttttgatattcctaatgtcgagggccacgacgtggtgcctcttctgatggaacaggtcgagaagaaaggcctgcctatcaagattggtgccctgatcaacgacaccagcggaacccttgttgcatcgagatacacagacgagctcacggagatgggctgtatttttggtactggtgtcaacggagcatactacgaccgcatcaagaacatccctaagctgaagggaaagctttacgacgatatcgacccagagtctccaatgctgatcaactgcgaatacggttctttcgataatgcacacaaggttcttccaagaacgaagttcgacatcagaatcgacgacgagtctccaagaccgggacaacagtctttcgagaaaatgacttccggctactacctaggagaacttctcagaatgattatgctggacacctacaaaaagggactcattttcaagagctacactgagtcttcggagcagatcaagaacctcgaaaccccatacttcctggacacatctttcctgtctatcgctgaggctgacgacaccccttcattgagcgtcgtgtcgaatgagttctccaacaaactcttcatcgacaccactttcgaggagagactgtacgtgagaaagctgtcgcaatttatcggaaccagagcagccagactctcgatttgtggtatctctgccgtgtgcaaaaagatgaactacaaaaagtgccacgttgccgctgacggatccgtcttcctcaagtacccatacttcccagaaagggcagcacagggcctgagcgacgtgttcggctgggatggtatcgacatgaaggaccaccctatccagatcaaacaggccgaggacggatctggtgttggtgccgccatcattgctgcactttcgcatgccagaagagagaaaggtctgtctttgggtctgaaaaaataagcttgggataaagttacggcaagtgtacatatacaataaatttataaagtcttgagtgcatatattttttttccttatcttcggagaacgttctgtctttctcctcccatgttgtccatggcacggtaggtaacagagcgatccagttcccattgaacctgcgtggatggaacgtcgattgcatcaacacaacgaacctgtcgaaccatcctggctttaaaaccttcaagggctccaagaccgacgcggccacaatcgcagacatttttgagggacttgtagagatcgggctggagtacgacgccgtcatcgttggctatgttgctagtgtgccaaatctcgaatgtatcgctgacattctagctaaactgagccacaaaccgctggtggtgctcgatcccatcctcggcgacaacgacaagctgtacgtcgacc

SEQ ID NO: 149324 - protein, 483 aa, Pichia angusta
MSIDDKPLPADLAKEIETYKELFWVPTETLHKIIDYFIEELERGNADGTDPTGIPMNPAWVLEYPNGSETGDYLAIDLGGTNLRVVLAHLLGDHKFSTEQTKYHIPSHMRTTKNRDELFEFIAQCLEDFLKSKHPDGIPSDAVFPLGFTFSYPATQNSIFEGVLQRWTKGFDIPNVEGHDVVPLLMEQVEKKGLPIKIGALINDTSGTLVASRYTDELTEMGCIFGTGVNGAYYDRIKNIPKLKGKLYDDIDPESPMLINCEYGSFDNAHKVLPRTKFDIRIDDESPRPGQQSFEKMTSGYYLGELLRMIMLDTYKKGLIFKSYTESSEQIKNLETPYFLDTSFLSIAEADDTPSLSVVSNEFSNKLFIDTTFEERLYVRKLSQFIGTRAARLSICGISAVCKKMNYKKCHVAADGSVFLKYPYFPERAAQGLSDVFGWDGIDMKDHPIQIKQAEDGSGVGAAIIAALSHARREKGLSLGLKK

SEQ ID NO: 149325 - DNA, 2321 bp, Physcomitrella patens
  CDS (317)..(1858)
gctctctgagcctcacctccctcgctcccttgtcttgctctgcgatctctcgtcaagcttttttttcccccctttctttctttttctcccgtcctctgttgtgcttgcgccagccgatcgcctacacctagcagccgcggttggagtgctgtgtttttagctttttggagtcctcagatctggcagacagtttgatgtagggacgttggtgtaggtttattcagctgatcgattgagagtgcaaaaggcgaagctgtgtgcgtgtgcgtgtgcgtgtttgctcgtgagtgtttgggagtattgctaaagggtagcaatggcgatcgggaaggtactggggtgtgccgggtttcagcacagtgcagtgccaacgctccgtgaaccagtgcggctgagggcgcaatgcagacgccggggaaagaccgtgtctatgtcggttcagaagacgtcgaaaacggtacagcaggcggagaagatgtcgcaggagttccgtcagtcttcctctactcccctgcctcttttgcaccaggtagcggacgctctcgtgcaagaaatgtatgctggattggcgtcggaaggtggtagtgatcagctgaagatgcttccgacctatgtcgaaaacttgccttctgggagcgagaaggggctgttctatgccgtggatttgggcggcacaaacttccgtgttctgcgagtggaattgggaggcaaaacaggccaaattttgagccaagagttcaaggaagtggtaatccctccagagcttatggtgggcactggtaaggatcttttcgacttcattgctggtacactcgcatcatttgtcgacactgaagacgagtcaattaaagctcactttgttcaatcgggaaaaaccagggagtccggtttcgctttctccttccccgttcgacagacctcagtcaaatctggcattgtcatccactggacgaagggcttcaaagttgatgatgcggtgggcaaagacatcgtgaagcaatttcaggatgcaatcagcagaagtaaccatcagattatgatctcagccctggtaaacgacaccgttggcacgttggccggaggcagattcaacttcgacgaggagaccatgattggttgcattattggaacagggacaaacgcatgctatgtcgaacgtgccgatgctgtacataagtgggacgagccactgcccaaatcaggagaaatggttatcaatatggaatggggaaatttccgttcaccctacctgccacgaacatttgctgatgagactgttgacaaagacagcgtcaatccaggggaccagtggttcgagaaaatgatctctggaatgtacctcggcgagatcgtgcgccttgttctggctaggatggccaaagaagcggaactgtttggtggcaatgtccccgtgaagctcttggagcggctcaccctaggcaccccacatgtttccaaaatacatctggacaattcacctgacctcgacgtggttgccaaagttctcaaggacgtcttcgagatcgaaaccaccacacttgaggaaagaaagatagtacacgaggtgtgtgacatcatgggcgagcgaggtggaaggttggctgcagcaggtctctacggaatcctgaagaagatcggaagaaccggcaaatctcgaaacggatccaagaagaagaccgtgattgcaatggacggtggcctgttcgaacaccacgtccgttaccggtcatacatggaggaggcgctccaggagttgatgggttctgacgcagcgtacgaggtggcgttgagactacagaacgatggttctggaatcggtgccgctttgcttgccgcttcccactcacacttcaaataggataaaacgcacacaaagcttagggggatcatggcaggtgatgagcatcgcctgttttgcatgcctgtacaatattccgagtcctgatgatctgtctatcttctgagatgcacccatcgtctgtaccatttgtaccggcttatcgtaccgcaggaagacgccgttcttcaagtcgttgtctatctggtgaccaaaaccgcagagtttcaagctgagaggcctagtaggggtagtgtaggcagagtcaagttttattgtctctggtcagttacgtagaacagtttgcggttgagtctacccatctcatctagatctgcactgcacacctttcaataagctggtttcacttgaggttgccgtgcgcaagctagtatctggcacagagatgagaggttcattgctgcgcattctcttagcaatcctcacaatttccgaggtgattgtggggtgatggagctgggcg

SEQ ID NO: 149326 - protein, 513 aa, Physcomitrella patens
MAIGKVLGCAGFQHSAVPTLREPVRLRAQCRRRGKTVSMSVQKTSKTVQQAEKMSQEFRQSSSTPLPLLHQVADALVQEMYAGLASEGGSDQLKMLPTYVENLPSGSEKGLFYAVDLGGTNFRVLRVELGGKTGQILSQEFKEVVIPPELMVGTGKDLFDFIAGTLASFVDTEDESIKAHFVQSGKTRESGFAFSFPVRQTSVKSGIVIHWTKGFKVDDAVGKDIVKQFQDAISRSNHQIMISALVNDTVGTLAGGRFNFDEETMIGCIIGTGTNACYVERADAVHKWDEPLPKSGEMVINMEWGNFRSPYLPRTFADETVDKDSVNPGDQWFEKMISGMYLGEIVRLVLARMAKEAELFGGNVPVKLLERLTLGTPHVSKIHLDNSPDLDVVAKVLKDVFEIETTTLEERKIVHEVCDIMGERGGRLAAAGLYGILKKIGRTGKSRNGSKKKTVIAMDGGLFEHHVRYRSYMEEALQELMGSDAAYEVALRLQNDGSGIGAALLAASHSHFK

SEQ ID NO: 149327 - DNA, 1494 bp, Nicotiana benthamiana
  CDS (1)..(1494)
atgaagaaagcgacggtgggagccgccgtggttggcgccgctacggtatgtgctgtggcggcattgatagtgaaccaccgtatgcgcaaatctagtaaatgggcacgtgctatggctattcttcgtgaatttgaggaaaagtgtgggacccctgatgctaagctcaagcaagtcgctgatgctatgaccgtcgagatgcacgctggacttgcctccgaaggtggtagcaagctcaagatgcttatcacttacgtcgataatctccccaccggtgatgaagccggcgtcttttatgcgttggatcttggtggaacaaattttcgagtattgcgggtgcagcttggtggaaaagatggtggtattattcatcaagaatttgcagaggcatcaattcctccaaatttgatggttgggacttcagaagaactttttgattacattgcggcagaacttgcaaaatttgtcgctgaggaagaggagaaatttcaacaacctcctggtaagcagagagaactaggtttcaccttctcattcccggtaatgcagacttcaatcaactctgggactattatgaggtggacaaagggcttctccatcgatgatgcggttggccaagatgttgtcggagaactcacaaaagctatgaaaagaaagggcgttgatatgcgggtctcagctctggtgaatgatactgttgggacgttggctggtggtaaatatacacacaacgacgtagctgttgctgttatcttaggtacagggaccaatgcagcttatgtggaacgggtgcaggcgattccaaagtggcatggtcctatgccaaaatctggtgaaatggttatcaacatggaatggggtaattttaggtcatcccatcttcccttgacacagtatgatcatgcgttggatactaatagtttgaatcctggtgatcagatatttgagaagatgacttctggcatgtacttgggagaaattttacgcagagttctactcaggatggccgaagaagctggcatttttggtgatgaggtccctccaaagctcaagagtccatttgtattgaggacacctgatatgtctgctatgcatcatgacacatcatctgatctgagagtggttggtgacaagctgaaggatattttagagatatctaatacctcattgaagacaaggagattagtcgttgagctgtgcaacatcgttgcaacacgaggggcaaggcttgcagctgcaggtgtattggggatcttgaagaagatgggaagggatacgcctaggcaaggtggtccgcagaagatggttgtagccatggatggcggattgtatgagcactatgcagagtacaggacgtgcttagagaacacattgaaggaattgcttggagatgaattggcgacaagcattgttttcgagcactccaatgatggttctggcattggtgctgctcttcttgctgcctctaactcaatgtaccttgaagataagtcctag

SEQ ID NO: 149328 - protein, 497 aa, Nicotiana benthamiana
MKKATVGAAVVGAATVCAVAALIVNHRMRKSSKWARAMAILREFEEKCGTPDAKLKQVADAMTVEMHAGLASEGGSKLKMLITYVDNLPTGDEAGVFYALDLGGTNFRVLRVQLGGKDGGIIHQEFAEASIPPNLMVGTSEELFDYIAAELAKFVAEEEEKFQQPPGKQRELGFTFSFPVMQTSINSGTIMRWTKGFSIDDAVGQDVVGELTKAMKRKGVDMRVSALVNDTVGTLAGGKYTHNDVAVAVILGTGTNAAYVERVQAIPKWHGPMPKSGEMVINMEWGNFRSSHLPLTQYDHALDTNSLNPGDQIFEKMTSGMYLGEILRRVLLRMAEEAGIFGDEVPPKLKSPFVLRTPDMSAMHHDTSSDLRVVGDKLKDILEISNTSLKTRRLVVELCNIVATRGARLAAAGVLGILKKMGRDTPRQGGPQKMVVAMDGGLYEHYAEYRTCLENTLKELLGDELATSIVFEHSNDGSGIGAALLAASNSMYLEDKS

SEQ ID NO: 149329 - DNA, 1862 bp, Solanum lycopersicum
  CDS (139)..(1635)
gaattcggcaccagctttgatccgatctcctctctgtaatttttattatttctccttaaaaaatcacaaatctttactttactcatttcatttttttctcagtggaccaactttttgccaacctcaaattccggcaaaatgaagaaagtgacggtgggagtcgccgtggttggtgcagctgcggtgtgtgcagtggcggtgttaatagtgaatcaccggatgcggaaatctagtaaatggggtcgtgctatggctattcttcgtgaatttgaagaaaagtgtaagactcaagatgcaaagcttaagcaagttgctgatgctatgactgttgagatgcacgccggacttgcttctgaaggcggcagtaagctcaagatgcttatcacttatgtggataatctacccactggtgatgaagctggcgtcttctatgcgttggatcttggtggaacaaattttcgagtattgcgagtgcaattgggtggaaaagatggtggtattattcatcaagaatttgctgaggcatcaattcctccaagtttgatggttgggacttcagatgaactttttgattatattgcggctgagcttgcaaaatttgttgctgcggaagaggaaaaatttcatcaacctcctggtaagcagagagaactaggtttcaccttctcattcccagtaatgcagacttcaatcaactccgggaatattatgcggtggacaaaaggcttctctattgatgatgcggttggtcaagatgttgttggagaactcacaaaagctatgaaaagaaaaggtgtcgatatgcgtgtctcagctctggtgaatgataccgttggaacgttagctggtggtaaatatacgcaaaaggatgtagctgttgctgttatcttaggtacagggaccaatgcagcttatgtggaacgggtgcaggcaattccaaagtggcatggtcctgtgccaaaatctggtgaaatggttatcaatatggaatggggtaattttaggtcatcccatctgccgttgacagagtatgatcatgcattggataatgagagtttaaatcctggtgaacagatatttgagaagatgacttctggcatgtacttgggagaaattttacgcagagttctacttagggtggctgaagaagctggcgtttttggtgatgaggtccctccaaagctcaaggaaccatttgtgttaaggacacctgatatgtctgctatgcatcatgacacatcctctgatctgaaagtggttggtgaaaagctgaaggatattttagagatatctaatacctccttgaagacgagaaaactagtggttgagctgtgcaatatcgttgccacacgtggggcaagacttgcagctgcaggtgtattgggcatcttgaaaaagatgggaagagatacgcctaagcagggtggttcagaaaggacggttatagccatggatggcgggttgtatgagcactatacagaatacaggatgtgtttagagaactctttgaaggacttgctgggagaggagttagcaacgagcatcgtttttgtgcactccaatgatggttctggcattggtgctgctcttcttgctgcctctcattcaatgtaccttgaagatcaagatgcttaggagtgtgacaaaagccatatcttgctagagggaactacctttagactcctctctagcgttttcggtattttctctcctttatgtaccatcaaaatgaaattaataatatctccagcagatacatttaacttttatctctaggagagttttcctaagagtgccttcataaacacacaattttcatggataaagagtccttttactacctgaaaaaaaaaaaaaaaaaa

SEQ ID NO: 149330 - protein, 498 aa, Solanum lycopersicum
MKKVTVGVAVVGAAAVCAVAVLIVNHRMRKSSKWGRAMAILREFEEKCKTQDAKLKQVADAMTVEMHAGLASEGGSKLKMLITYVDNLPTGDEAGVFYALDLGGTNFRVLRVQLGGKDGGIIHQEFAEASIPPSLMVGTSDELFDYIAAELAKFVAAEEEKFHQPPGKQRELGFTFSFPVMQTSINSGNIMRWTKGFSIDDAVGQDVVGELTKAMKRKGVDMRVSALVNDTVGTLAGGKYTQKDVAVAVILGTGTNAAYVERVQAIPKWHGPVPKSGEMVINMEWGNFRSSHLPLTEYDHALDNESLNPGEQIFEKMTSGMYLGEILRRVLLRVAEEAGVFGDEVPPKLKEPFVLRTPDMSAMHHDTSSDLKVVGEKLKDILEISNTSLKTRKLVVELCNIVATRGARLAAAGVLGILKKMGRDTPKQGGSERTVIAMDGGLYEHYTEYRMCLENSLKDLLGEELATSIVFVHSNDGSGIGAALLAASHSMYLEDQDA

SEQ ID NO: 149331 - DNA, 1893 bp, Zea mays
  CDS (1)..(1530)
  misc_feature (1668)..(1668): n is a, g, c or t
  misc_feature (1740)..(1740): n is a, g, c or t
  misc_feature (1756)..(1756): n is a, g, c or t
  misc_feature (1758)..(1758): n is a, g, c or t
  misc_feature (1808)..(1808): n is a, g, c or t
  misc_feature (1811)..(1811): n is a, g, c or t
  misc_feature (1812)..(1812): n is a, g, c or t
  misc_feature (1823)..(1823): n is a, g, c or t
  misc_feature (1827)..(1827): n is a, g, c or t
  misc_feature (1833)..(1833): n is a, g, c or t
  misc_feature (1837)..(1837): n is a, g, c or t
  misc_feature (1848)..(1848): n is a, g, c or t
  misc_feature (1852)..(1852): n is a, g, c or t
  misc_feature (1866)..(1866): n is a, g, c or t
  misc_feature (1869)..(1869): n is a, g, c or t
  misc_feature (1879)..(1879): n is a, g, c or t
  misc_feature (1884)..(1884): n is a, g, c or t
  misc_feature (1888)..(1888): n is a, g, c or t
atggtgaaggccgtggtggtgggcgcggcggtcgtggcgtgtgcggcggtcggggtggcggtggtgctggagcgccgccggcggaagcgagacgccgacctcctggggtccgcggaggcggagaggaggaggcgcgcggccgccgtcatcgaggaggtcgagagcagcctcgccacgcccacggcgctgctgcggggcatcgcggacgccatggtcgccgagatggagcgcggcctgcgcggggacatccacgcgcagctcaagatgctcattagctacgtcgacagcctccccaccggagatgaacatgggctgttttatgcactggatcttggagggaccaacttccgtgtgctgcgagtccagctaggaggaaaggagaaacgtgttgtcaaacaacagtatgaggaggtttccattccaccacatttgatggtcgggacttccatggaactatttgatttcattgctgctgcattggctaaatttgttggtactgaaggtgaagatttccaactcccagagggtaggcagagagaacttggtttcactttttccttcccggcgaaccaaacatcaatatcatcaggaacactcatcaagtggacaaagggcttttccatcaatggcacggttggtgaagatgttgtttctgagttgagcagggccatggagaggcagggactagatatgaaagttacggcattggtcaatgatacagttggcacattggctggtgggagatatatggataacgatgtagttgcagccgtaatattgggcactggtacaaatgcagcatatgtggagcatgcaaatgcaattcctaaatggactgggttactgcctaaatctggaaacatggtaattaatacagagtgggggagcttcaaatccaacaaacttcctctttcagaatatgacaaagccatggactttgaaagtttgaaccctggagagcagatatacgaaaaaatgatttctggtatgtatctcggagagattgttcgaagaattttactgaagttagcacatgaagcttctctatttggggatgttgttccacctaagctggagctgccatttatattgaggacgccagatatggcagccatgcatcatgactcctcacatgacctcaaaactcttggagctaaactgaaggacatagtcggggtcgcggacacttccctggaagtaaggtacatcactcgtcacatctgtgaccttgtcgcagagcgtgcagcacgcctggccgccgcaggcgtgtacagcatcctgaagaagataggccgggacaaagtaccaagcggtggcggtaaaatgccgaggaccgtagttgccttggacggtgggctctacgaacactacaagaagttcagcagttgcgtagaagcgactctcacagacttgctcggcgaggaggcttcttcctccgtggtcgccaagctggccaacgacggctctggcattggagctgcgcttctcgcagcctcacactcccagtatcagtatggcgcgagtgactagtagtcctgaaatgggcgcggatcgagattttgagtgtagctctcatttatcttttcttttttcccttttcaaaacatctttttggggatttttttcggcttccttttgttggctattccgtggatgcacttacggctntgcattgggatgtagctagtatagagccaatgagtttggaggttatctaatggcacaaggcaggagcatggnaatggaagcagagcantnccattcatgctgtgcccattcttttgttccccttgtatggtgtaatctgnatnngtcgacgagcntctngagcgnaggntagctctagcncgcncgtgtggggggccnagntggcggccgncgagnatcncatac

SEQ ID NO: 149332 - protein, 509 aa, Zea mays
MVKAVVVGAAVVACAAVGVAVVLERRRRKRDADLLGSAEAERRRRAAAVIEEVESSLATPTALLRGIADAMVAEMERGLRGDIHAQLKMLISYVDSLPTGDEHGLFYALDLGGTNFRVLRVQLGGKEKRVVKQQYEEVSIPPHLMVGTSMELFDFIAAALAKFVGTEGEDFQLPEGRQRELGFTFSFPANQTSISSGTLIKWTKGFSINGTVGEDVVSELSRAMERQGLDMKVTALVNDTVGTLAGGRYMDNDVVAAVILGTGTNAAYVEHANAIPKWTGLLPKSGNMVINTEWGSFKSNKLPLSEYDKAMDFESLNPGEQIYEKMISGMYLGEIVRRILLKLAHEASLFGDVVPPKLELPFILRTPDMAAMHHDSSHDLKTLGAKLKDIVGVADTSLEVRYITRHICDLVAERAARLAAAGVYSILKKIGRDKVPSGGGKMPRTVVALDGGLYEHYKKFSSCVEATLTDLLGEEASSSVVAKLANDGSGIGAALLAASHSQYQYGASD

SEQ ID NO: 149333 - DNA, 1907 bp, Solanum tuberosum
  CDS (57)..(1556)
gccgctcccctttttttctccgtcacacaattgaattgatctcactgttacccaaaatgtcggtcaccgttagctcgccggccgtccgatccttccatgtttcacgatcacctcataaaacgatctataggccacgtgtcattatgtctgccgtccgatctagtgatagcttaggagtagcaccaattttgactaagttgcagaaagactgtgctactcctctcccagttttgcgccacgtggcggatgcaatggccgatgatatgcgggccgggcttgccgtcgatggcggcagtgatctgaagatgatccttagttatgtcgacactctaccaactgggaatgagaaaggcttgttttatgcgttggaccttggtggtacaaatttccgagtgctaagggtgcagctaggtggtaaagaagagcgtgtagtcgccactgagtttgagcaagtctctatacccccagaattgatgtttgctacctccgaggagctgttcgatttcatagcttctgcgctaggaaaatttgcacaaaaggaaggtggtaattttgagttgcaacagggacggacaagggaaataggattcacgttttcttttccagtgaaacagacttcaataagaactggaatcctaatcaaatggacaaaaggttttgctgtctctggaactgcaggaaaagatgttgttgcttgtttaaatgaagccatggagaggcggggaatggatatgcaagtgtctgccctggtcaatgacactgtgggaacacttgccggagcaagatactgggatgatgatgccatggttgctgtcattcttgggactggaaccaatgcttgctatgtagaacgtgtggatgctattcctaagctgacaaaaaggatgtccaagtctccaataacgattgtgaatactgaatggggagctttctcaaatggccttcctttaactgagtttgatagagaaatggatgccgagagcattaaccctggtgagcagatttttgaaaagaccatctccggtatgtaccttggggaaattgtgagacgggtgctggtcaaaatgtccaaggttgggggcttatttggtggcagctatgttccggaaaagttagtcactccatttgtgctgaggacacctgatatatgtgccatgcagcaggatacatcaagagatcttgaagctgttgaatctgtcctctatgatgtagctggggtaaaatccgatctaagtgcaaggaaaacagtcgtggacatttgcgatactattgcaaaacgagggggtcgtctggctggtgcaggaattgttgggattctacagaaaatggaggaggattctaaaggcctcatctttggtaaaagagcagttgtagcaatggatggaggcttatacgagcactatcctcagtacagaggatacctccaagaagctgtcacagagttactaggctcggaaatttcgaaaaatgtagtgatagaacattcaaaagatggttctggaattggagctgcattattagctgctgcaaactcaaagtatgaacatgattattaaggagaatgctaaatttcatgtctttcaaaggtttgcttgaggaaaaattacatgagcatttgtaattttcttgtaatttagaatgttctaagaaggattgatcattggacttctcattctttaagtagaggctcttgtttgtgatgccatttttgtactcccattagtgatgtacgaagaagtgaggattcatatagccaaccccaatttgtttgggaccgaggcatagttgttgttgtattatgcagcagtgacttatttatgtgataaaagcagatgtatcagtaaatatagaacatcttgtttgtttataattatgaaataagcacatttctttggtgttttagcggc

SEQ ID NO: 149334 - protein, 499 aa, Solanum tuberosum
MSVTVSSPAVRSFHVSRSPHKTIYRPRVIMSAVRSSDSLGVAPILTKLQKDCATPLPVLRHVADAMADDMRAGLAVDGGSDLKMILSYVDTLPTGNEKGLFYALDLGGTNFRVLRVQLGGKEERVVATEFEQVSIPPELMFATSEELFDFIASALGKFAQKEGGNFELQQGRTREIGFTFSFPVKQTSIRTGILIKWTKGFAVSGTAGKDVVACLNEAMERRGMDMQVSALVNDTVGTLAGARYWDDDAMVAVILGTGTNACYVERVDAIPKLTKRMSKSPITIVNTEWGAFSNGLPLTEFDREMDAESINPGEQIFEKTISGMYLGEIVRRVLVKMSKVGGLFGGSYVPEKLVTPFVLRTPDICAMQQDTSRDLEAVESVLYDVAGVKSDLSARKTVVDICDTIAKRGGRLAGAGIVGILQKMEEDSKGLIFGKRAVVAMDGGLYEHYPQYRGYLQEAVTELLGSEISKNVVIEHSKDGSGIGAALLAAANSKYEHDY

SEQ ID NO: 149335 - DNA, 1768 bp, Brassica oleracea
  CDS (29)..(1528)
tgtccttttgtcttagagatcgaatcttatgggtaaagtggctgttggtgcgacggtcgtgtgcgctgcggcggtttgcgcggcgtctgtgtacatcgtgcggcggcggatgcaaagctccgggaaatgggcgcgtgtgatagagatcctgagggttctcgaggaggattgcgcgacgccaatcgggaaactgagacaagtggcggatgcgatgacggttgagatgcacgcgggtctcgcttccgaaggtggaagcaagcttaagatgcttatcagctacgtcgataatcttccttctggggaagaacatggtttcttttatgcgctggacctaggaggaacgaacttccgtgtgatgcgtgtgcttcttggtggcaaacaaggccgtgttgtcaaacaagaagccaaagaagtctctattcctcctcatttgatgaccagcggttcagatgagctgttcaattttatcgctgaagcgcttgcaaatttcgtggctacagaaggagaggactttcatctcccagagggtagacaaagggagctaggtttcactttctcgtttccggttaagcagacatctttgtcttctggcactctcatcaagtggaccaaaggcttctccatcgaagatacagttggacaagatgtggttggtgcgcttgttaaagctatggaaagagttgggcttgacatgaatgtcacagcccttgttaatgataccgttggaacacttgctggtggtagatactataaccctgatgttgtcgccgctgttattctaggcactggcacaaacgcagcttatgttgaacgtgcacatgccattcccaaatggcacggcttacttcccaaatctggagaaatggtgatcaacatggagtggggaaacttcaggtcatcacatcttccattgacggagtacgaccacttgctggatttcgatagtctgaatcctggtgaacagattcttgagaaaatcatttctggtatgtatttgggagagatcttgcgtagagtccttctgaaaatggctgacgaggctgctttctttggcgactctgtcccacctaagctgagaataccattcataataaggacaccaaacatgtctgctatgcacagcgacacttctccggatttgaaggttgttggaagcaagttaaaggacatattggaggtccctaccacttctctgaagatgagaaaagttgtggtcagtctgtgtgacatcatagcttgccgcggagctcgtctatcagctgcagggatctacggaatcctcaagaaactaggaagagacgcaccgaaagacggagagacgcagaaatctgtgatagccatggacggtggactgtttgagcactacactcagttcagcgagtgtatggagagctcgttgaaagagttgcttggagatgaagcatcagacagcgtggaggtgattcattcgaatgatggatctggcgttggagctgcattactcgctgcctcgcactctcagtacctcgatgactctcaaacaagttaagttaaagaaggtttggactttcaatggactctttgtttgcctttagggtttaaacaaataaaagagagaaaaaaaaggtaagcccttccttttgaggaaagtttttttttttatatttttgttatcaaagtacgagaacagtaataaaccatggatggtttcgtctccagggtatggcaaatttcaagaatcagccaaaatgttgtagaactatatatttctgagttctatatataaaaa

SEQ ID NO: 149336 - protein, 499 aa, Brassica oleracea
MGKVAVGATVVCAAAVCAASVYIVRRRMQSSGKWARVIEILRVLEEDCATPIGKLRQVADAMTVEMHAGLASEGGSKLKMLISYVDNLPSGEEHGFFYALDLGGTNFRVMRVLLGGKQGRVVKQEAKEVSIPPHLMTSGSDELFNFIAEALANFVATEGEDFHLPEGRQRELGFTFSFPVKQTSLSSGTLIKWTKGFSIEDTVGQDVVGALVKAMERVGLDMNVTALVNDTVGTLAGGRYYNPDVVAAVILGTGTNAAYVERAHAIPKWHGLLPKSGEMVINMEWGNFRSSHLPLTEYDHLLDFDSLNPGEQILEKIISGMYLGEILRRVLLKMADEAAFFGDSVPPKLRIPFIIRTPNMSAMHSDTSPDLKVVGSKLKDILEVPTTSLKMRKVVVSLCDIIACRGARLSAAGIYGILKKLGRDAPKDGETQKSVIAMDGGLFEHYTQFSECMESSLKELLGDEASDSVEVIHSNDGSGVGAALLAASHSQYLDDSQTS

SEQ ID NO: 149337 - DNA, 1750 bp, Brassica oleracea
  CDS (20)..(1519)
tcgagagagagagagagagatgggtaaagtggctgtcggtgcgacggttgtttgcgctgcggcggtttgcgcggcgacggtgtatgtggtgaggcggcggatgaaaagctgcgggaaatgggggcgcgtgatagagatcctgaaggtgttcgaggaggattgcgcgacgccgatagggaagctgagacaagtggcggatgcgatgacggttgagatgcacgcgggtctcgcatcggaaggtggaagcaagcttaagatgctcatcagctacgtcgacaatctcccttctggggatgaacaaggtttcttttacgcgctggacctaggaggaacaaacttccgtgtcatgcgtgtgcttctcggtggcaaacaagaccgtgttgtcaaacaagaattcgaagaagtctctatccctcctcctttgatgaccggtgcttcagatgaattgttcaattttatcgctgaagcgcttgcaaagttcgtcgctacggaaggagaggactttcatctcccagcgggtagacaaagggagttaggtttcactttctcgtttcctgttaagcagacgtctttgtgctctggcactctcatcagctggactaaaggcttctccatcgaagatgcacttggacaagatgttgtgggagagcttattaaagctatggaaagagttgggctcgacatgaatgtcacagcgcttgttaatgatacggttggaacacttgctggtggtagatactataactctgatgttgtagccgctgttattctaggcactggcactaatgcagcttatgtcgaacgcgcaaatgccattccaaaatggcagggcttacttcccaaatctggagaaatggtgatcaacatggagtggggaaacttcaggtcatcacatcttcccttgaccgagtacgaccacttgctggatttcgatagtttgaatcctggtgaacagattcttgagaaaataatttccggtatgtatttgggagagatcttgcgtagagttcttctgaagatggctgaagaggctgctttctttggcgactccatcccacctaagctgaaagtaccattcatcataaggactccgaccatgtctgctatgcacagcgacacttctccggatttgaaggttgttggaagcaagttaaaggacatactggaggtccctactactctgaagatgagaaaagttgtgatcagtctctgtaacatcatagccacccgaggagctcgtctctctgcagctgggatctacggaatcctcaagaaactaggaagagacgcacctaaagatggagaaacaacgcagaaatctgtgattgccatggacggtggactgttcgagcactacactcagttcagtgagtgtatggagagctcattgaaagagttgcttggagatgaagcatcagagagcgtcgaggtgattcattcgaatgacgggtccggcgttggcgctgcattgctcgctgcctcgcactctcagtacctcgaggactctgaaacaagttaaatttaaaagaaggtttcgacttccaagcatggaaggtaaaaagacctttgtgattttttgtttgcccattattgaggttttctttttttttttgttatcattgttcaggaacaataataaacaaccaacctggatatcttcttcaggttatggcaaattcaaaaacaagccaatgttgtagaactatatatttcatagttctatataagtgaccatttttgtttttataaa

SEQ ID NO: 149338 - protein, 499 aa, Brassica oleracea
MGKVAVGATVVCAAAVCAATVYVVRRRMKSCGKWGRVIEILKVFEEDCATPIGKLRQVADAMTVEMHAGLASEGGSKLKMLISYVDNLPSGDEQGFFYALDLGGTNFRVMRVLLGGKQDRVVKQEFEEVSIPPPLMTGASDELFNFIAEALAKFVATEGEDFHLPAGRQRELGFTFSFPVKQTSLCSGTLISWTKGFSIEDALGQDVVGELIKAMERVGLDMNVTALVNDTVGTLAGGRYYNSDVVAAVILGTGTNAAYVERANAIPKWQGLLPKSGEMVINMEWGNFRSSHLPLTEYDHLLDFDSLNPGEQILEKIISGMYLGEILRRVLLKMAEEAAFFGDSIPPKLKVPFIIRTPTMSAMHSDTSPDLKVVGSKLKDILEVPTTLKMRKVVISLCNIIATRGARLSAAGIYGILKKLGRDAPKDGETTQKSVIAMDGGLFEHYTQFSECMESSLKELLGDEASESVEVIHSNDGSGVGAALLAASHSQYLEDSETS

SEQ ID NO: 149339 - DNA, 2372 bp, Pichia angusta
  CDS (639)..(2054)
taatacactagtttttttttaggatagtagttaattccttgttacggccggcactccagaatgaaaacccgtctgcaataaaattcatgacacctcacactcatttgtatgtagtttttttatcaacaagtattccagggggatctgggttggcaagcaagcctacaagcttaggacgtctagccaacaaagctgcctttgcctgaatttcatcagtgaagcgtttggcaatcttggaggccagaatggtttttgctggtgacatgtcaagataagaattaattaaccttatattatttatttattcaagtcagaaaataaaaaaaaagtttatgcggtgcagaggtgtgctaccgggaaagatttcggaaaaatacgcaggtctaaaagaatttgagacgaggatcagccgacgtgtgaatacctccgaactgaatgtaccgttccggaacggattattcacatagtcattgaaggggaaatagaacccaacatatgcagctccgcatttccccggtctccccataattagaaagatcatcccatcccaagtcgtgcgcccgctaatcgtttgacatccttccgtgatatttaacaccaccaaagtccgtgaaaatacataatctgctagaataaatatgagtttggatactgaagtcgataagattgtgtcggagtttgccgtcacccaggagacactccaaaagggtgtggagcgtttcattgagcttgcaactgccggactgaatagtgatgaggacaagtatggtctgccaatgatcccaacttttgttacctccatcccaaccggtaaagagaagggcattctttttgccgcagacttgggaggaaccaatttcagagtttgctctgttgccttgaacggagatcacactttcaaactgatccagcagaagtcacatattcctgccgaactgatgacctccacctcggacgaattgttttcgtatcttgcaagcaaggtcaagaatttcttagagactcatcatgaaggggctgttacttctacaggaagccagaaattcaagatgggtttcactttcagtttccctgtctcgcagaccgccttaaacgccggtactttgctaagatggaccaagggattcaatattccggatactgttggtcaagaggttgtttctctattccaaatgcatttagacgcccaggaaattcctgttactgtgtctgccctgtccaacgatactgtgggaacccttcttgcaagatcctacacgggttccaataaggagggcactactgttctaggatgcatcttcggaacgggaacaaacggtgcttacaacgagaagctcgagaatatcaagaagcttccggccgaggtgagagagaagctgaaggctcaaggtgtcacccacatggtcattaatactgaatggggttccttcgataaccagctcaaggttttgccaaatacgaagtatgacgctcaagttgacgaacttaccggcaataagggcttccacatgtttgaaaagcgtgtttccggaatgttcttgggtgagattctgagacatattttggtcgaccttcactctaagggagtgctatttactcagtacgccagctacgaatccctgccccacagattgaggacgccgtgggatctggactctgaggttctctcactgattgagatcgacgaatccaccaatttgcaggccactgagctgtctttgaaacaggcattgagactgccaactactactgaggagagacttgctattcaaaaacttactcgtgctgtggccaagagatctgcctatcttgctgctattcctattgctgctattctacacatgaccgagtcttttaagggccacaacgttgaggtggacgttggagcagacgggtctgtggttgagttctaccctggattcagaactatgatgagagacgccattgcgcagacgcagataggtgccaaaggagagagaagactgcacattaacattgccaaagacggctcatctgtgggcgctgcattgtgcgcattaagcgagaaagactaagtatacgattataaaccggactccgagtataatgatataaattagagatttgctaccaaaaaaaaaatgtcccttttcctcgtaatttttcaccagcctgctccccgcacggcaattaaaacatgaatataaaaacatttgttcattaagggtaacgtaattcgtatcgtctggtttttggtatgtggcattttgacggctaaaatcgcggggagcctttatcgactagttgaatctagatatatagaagaattttgtacccggtttccttatcttgaaataaattgacccaagcgatacatcttgtcaattctggtg

SEQ ID NO: 149340 - protein, 471 aa, Pichia angusta
MSLDTEVDKIVSEFAVTQETLQKGVERFIELATAGLNSDEDKYGLPMIPTFVTSIPTGKEKGILFAADLGGTNFRVCSVALNGDHTFKLIQQKSHIPAELMTSTSDELFSYLASKVKNFLETHHEGAVTSTGSQKFKMGFTFSFPVSQTALNAGTLLRWTKGFNIPDTVGQEVVSLFQMHLDAQEIPVTVSALSNDTVGTLLARSYTGSNKEGTTVLGCIFGTGTNGAYNEKLENIKKLPAEVREKLKAQGVTHMVINTEWGSFDNQLKVLPNTKYDAQVDELTGNKGFHMFEKRVSGMFLGEILRHILVDLHSKGVLFTQYASYESLPHRLRTPWDLDSEVLSLIEIDESTNLQATELSLKQALRLPTTTEERLAIQKLTRAVAKRSAYLAAIPIAAILHMTESFKGHNVEVDVGADGSVVEFYPGFRTMMRDAIAQTQIGAKGERRLHINIAKDGSSVGAALCALSEKD

SEQ ID NO: 149341 - DNA, 1770 bp, Solanum lycopersicum
  CDS (138)..(1628)
  misc_feature (908)..(908): w is a or t
  misc_feature (923)..(923): k is g or t
  misc_feature (935)..(935): y is t or c
  misc_feature (1329)..(1329): n is a, g, c or t
cttctttttttcaatgaattaatcaaatacataatcttgatctgatctcatttattcataaagaaagaacattattattactctaataacaatccttaattaatctgtaattttatacgatttcggatagtaaaaggatgaagaaggcgacggtgggtgcggtggtggtaggtacagcggcggcggtagctgtggcggcgctcgtcatgcgccaccgcatgggtaaatcgagcaaatgggcacgtgccagggcaattctgaaggaattcgaggagaaatgtgccaccccagatgccaagctgaagcaagtggctgatgctatgacggtggagatgcacgccggactcgcctctgaaggaggcagcaagctcaagatgcttattagctatgtagacaatctccctactggtgatgaagcaggagtcttttatgcattggatcttggtggaacgaattttcgagtattgcgggtacagttggggggaaaagatggtgggattatgcatcaagaatttgcggaggcatcaattcctccaaatttgatggttggaacttcagaagccctttttgactatattgcggcagaacttgcaaaattcgtagatgaagaaggagaaaaatttcatccacctcctggtaagcagagagaattaggcttcaccttctcgttcccaataatgcagacttcaatcaattctggaactcttatcaggtggacgaaaggtttctccattgatgacacggttggcaaagatgttgttgcagaactgacaaaagcaatgcaaaaacgagaaattgatatgagggtgtcagcgcttgtgaatgatactgttggaacattggctggtggtagattcacggataaggatgtatccattgctgtgatattaggtactgggacaaatgcwgcatatgtggaacgkgctcaggcaatycccaaatggcacggtcctctgcctaactctggagaaatggtgatcaatatggaatggggtaactttaggtcctcccatcttcccttgacacagtatgataatgctatggataccgatagtttaaatcccggtgaacagatatttgagaagatatgttctggtatgtacttgggagaaattttacgcagagttctacttagaatggctaaagaagctggcatttttggcgaggaagttcctccaaaactcaagaattcattcatattgaggacacctgaaatgtctgctatgcatcatgacacatcctctgatttgagagtggttggcgacaagttgaaggatatcttagagatatccaatacctccttgaagacaaggagattagttgttgagntgtgtaatattgttgcaacacgtggcgccagacttgcggcagctggtatcttgggcattatcaaaaagatgggaaaggatacaccgagggaaagtggtccagaaaagattgtggtagccatggatggcggattgtatgagcactatacagaatacagcaagtgcttggaaaacacattggttgaattgcttggaaaggaaatggcaacaagcattgtcttcaagcacgcgaatgatggttctggcattggcgctgcactcctcgcggcctccaactctgtgtatgttgaagacaagtgagagtgatcaaaatgatatttagctagaggaaactccatttaccttttatattatgttttttctctagccttttcttttttgttcttctaacaattatttccagatttattattcctgggaatgccaacatatttcttctgga

SEQ ID NO: 149342 - protein, 496 aa, Solanum lycopersicum
  misc_feature (398)..(398): The Xaa at location 398 stands for Leu, Met, or Val.
MKKATVGAVVVGTAAAVAVAALVMRHRMGKSSKWARARAILKEFEEKCATPDAKLKQVADAMTVEMHAGLASEGGSKLKMLISYVDNLPTGDEAGVFYALDLGGTNFRVLRVQLGGKDGGIMHQEFAEASIPPNLMVGTSEALFDYIAAELAKFVDEEGEKFHPPPGKQRELGFTFSFPIMQTSINSGTLIRWTKGFSIDDTVGKDVVAELTKAMQKREIDMRVSALVNDTVGTLAGGRFTDKDVSIAVILGTGTNAAYVERAQAIPKWHGPLPNSGEMVINMEWGNFRSSHLPLTQYDNAMDTDSLNPGEQIFEKICSGMYLGEILRRVLLRMAKEAGIFGEEVPPKLKNSFILRTPEMSAMHHDTSSDLRVVGDKLKDILEISNTSLKTRRLVVEXCNIVATRGARLAAAGILGIIKKMGKDTPRESGPEKIVVAMDGGLYEHYTEYSKCLENTLVELLGKEMATSIVFKHANDGSGIGAALLAASNSVYVEDK

SEQ ID NO: 149343 - DNA, 2097 bp, Citrus sinensis
  CDS (233)..(1729)
ctcgagactagttctctgaaatattttataattctataaataaaaaaattaatataaaaaattaatactctcgttcagctccaatattcagctcgatctaggattgacaaaacctttaaatttgaatcaaaaagcgaaggggagggttggagttctgtttctaataaaagtccaagtcaaagagtaagttacttcttctttttttgtttctaattattttcgcgcgggggtgatggggaaagtgacggtagcggcgacggtggtgtgcgcggcggcggtgtgtgcggcggcggcgctggtggtgaggcgtaggatgaagagcacggggaggtgggccagggcggttgctatattgaaggagatggaggagaagtgtgggacccccatagggaagctgaggcaggtagctgatgcgatgacggtggagatgcacgccggcctcgcgtcggagggcggcagcaagctcaagatgctcatcagctatgtcgataatctccccactggggatgagaagggattgttttatgcattggacctgggcggcacaaacttccgtgtcctgcgagtacagttgggtggaagagaaggccgtgttgttaaacaagaatttgaggaagtttcaattcctccacatttgatgactgggagttcgcatgaattatttgactatattgctgcagcactcgcaaaatttgttgctactgaaggtgaaggatttcatgtttcaccaggtagacaaagagagttgggttttaccttctcatttcctgttaggcaaacatcaatagcatcaggggatcttataaagtggaccaagggcttctctattgaggatacggttggagaagatgtagtcggagaattgactaaagccatggaaagaatcgggcttgatatgcgtgtggcagctttggtgaatgacaccatcggaacattagctggtggtagataccacaacaaggatgccattgctgctgtaatcttgggcactggaactaatgcagcatatgtagagcgagcacatgcaattcccaagtggcatggtcttctgcctaaatcaggggaaatggttatcaatatggaatggggtaatttccggtcatcgcaccttccactaacagaatatgatgaagcattggacactgagagtttgaaccccggtgaacagatttttgaaaaaatcatctctggcatgtatttgggagaaattgtacgcagagtcttgtgcaggatggcagaggaagctaacttttttggtgatactgttcctccaaaattgaaaattccattcatattgaggactcctcacatgtcggctatgcatcacgacacatctccagatttgagagtagttgggaagaaactaaaggatatattagagatatccaatacctctttgaagatgagaaaacttgttgttgagctctgtgacatagttgcaactcgaggtgcccgcctatctgctgcagggattgtaggcatcctcaagaaattaggacgagacacagtaagagatggggaaaaacagaagtcagtaatagcattggatggcggtttgtttgagcactacacgaaatttagtgcctgcatgcagagcacggtcaaggagttgctgggagaggaagtttctgagaccgtcgtcattgagcattctaatgatggatcaggcattggagccgcactccttgcagcttcgcactcccaataccttgaggttgaagagtcttgaaaattgcctccattacacacaacatcctagtttttgtatattttcccatttctcactctcccttcttagttctttcggcttatttagagctctccccatccctgcttcaagaattctagctacaaaagttttgaatttggctcctgtggagtgtataattgagtaatggatcaattgtgcagtcattttgggcagcccctggccaatagctttattgctgtcattctgcattttgcttctttttttttccccaaaagctggggcacaatgttggtacaagtgtataacattatatgtcctgaattagaaaataaaatgggggatagaactttttctttcaaaaaaaaaaaaaaaaaaaaaaaaaaaaa

SEQ ID NO: 149344 - protein, 498 aa, Citrus sinensis
MGKVTVAATVVCAAAVCAAAALVVRRRMKSTGRWARAVAILKEMEEKCGTPIGKLRQVADAMTVEMHAGLASEGGSKLKMLISYVDNLPTGDEKGLFYALDLGGTNFRVLRVQLGGREGRVVKQEFEEVSIPPHLMTGSSHELFDYIAAALAKFVATEGEGFHVSPGRQRELGFTFSFPVRQTSIASGDLIKWTKGFSIEDTVGEDVVGELTKAMERIGLDMRVAALVNDTIGTLAGGRYHNKDAIAAVILGTGTNAAYVERAHAIPKWHGLLPKSGEMVINMEWGNFRSSHLPLTEYDEALDTESLNPGEQIFEKIISGMYLGEIVRRVLCRMAEEANFFGDTVPPKLKIPFILRTPHMSAMHHDTSPDLRVVGKKLKDILEISNTSLKMRKLVVELCDIVATRGARLSAAGIVGILKKLGRDTVRDGEKQKSVIALDGGLFEHYTKFSACMQSTVKELLGEEVSETVVIEHSNDGSGIGAALLAASHSQYLEVEES

SEQ ID NO: 149345 - DNA, 1362 bp, Drosophila simulans
  CDS (1)..(1362)
atgccgagcctggtgcacacggaaattgagaccgcggtcaagggcttcctgatcgaccaggagaagatgaccgaggtggtggagcgcatgaccaaggagataaagatgggtctggccaaagacacgcatgcgcgagccgtgatcaagtgcttcgtcagccatgtgcaggatctgcccactggcaaggagcggggcaagtatttggccctggatctgggtggctccaacttcagggtgcttctggtgaacctgataagcaactcggacgtggaaatcatgtcgaagggctacaattttcccctgactctgatgtccggatcgggaaaggcgcttttcgacttccttgccgaatccctgtccgagttttgccacacccatggactggagaacgaatcactgcctctgggcttcaccttctcgtttccgctccagcagcagggactctccaagggtatccttgtggcctggaccaaaggattcagctgcgaaggcgtggtgggcaagaatgtggtgagtctcctccaggaggccatcgatcgaaggggcgatataaagatcaacaccgtcgccattctcaacgatacggtgggcactctgatgtcctgcgctttctatcatcccaactgccggataggattgatcgtgggaaccggctccaatgcgtgctatgtggagaaaacagtgaatgccgaatgcttcgaaggataccagaccagtcccaagccgtcaatgatcatcaactgcgagtggggcgccttcggagacaatggtgtcctggagttcgtgcgaacttcctacgacaagatagtcgacaaggtgacacccaatcccggcaagcagacgttcgaaaagtgcatatccggcatgtatatgggtgaacttgtgcgtttggtcgtcatcgatatgatagccaagggctttatgttccacggcataatttccgagaagatccaggagcgatggagctttaaaaccgcctatatttccgatgttgaaagtgatgcacctggcgagtatcgtaactgcaataaggtacttagcgaactgggcatcttgggctgccaggaacccgacaaagaagcgctgcgttacatctgcgaggcggtgtcctccaggtctgccaagctatgtgcctgcggcctggtcaccatcatcaacaagatgaacatcaacgaggtggtcatcggcatcgacggtagcgtgtatcgcttccatcccaagtaccacgacatgctccagcaccacatgaagaagctcctcaagccgggcgtcaagttcgagctgattgtttcggaggacggatccggaagaggagcggctctggtggcggccacggcagtccaggccaagagcaaactctaa

SEQ ID NO: 149346 - protein, 453 aa, Drosophila simulans
MPSLVHTEIETAVKGFLIDQEKMTEVVERMTKEIKMGLAKDTHARAVIKCFVSHVQDLPTGKERGKYLALDLGGSNFRVLLVNLISNSDVEIMSKGYNFPLTLMSGSGKALFDFLAESLSEFCHTHGLENESLPLGFTFSFPLQQQGLSKGILVAWTKGFSCEGVVGKNVVSLLQEAIDRRGDIKINTVAILNDTVGTLMSCAFYHPNCRIGLIVGTGSNACYVEKTVNAECFEGYQTSPKPSMIINCEWGAFGDNGVLEFVRTSYDKIVDKVTPNPGKQTFEKCISGMYMGELVRLVVIDMIAKGFMFHGIISEKIQERWSFKTAYISDVESDAPGEYRNCNKVLSELGILGCQEPDKEALRYICEAVSSRSAKLCACGLVTIINKMNINEVVIGIDGSVYRFHPKYHDMLQHHMKKLLKPGVKFELIVSEDGSGRGAALVAATAVQAKSKL

SEQ ID NO: 149347 - DNA, 1362 bp, Drosophila simulans
  CDS (1)..(1362)
atgccgagcctggtgcacacggaaattgagaccgcggtcaagggcttcctgatcgaccaggagaagatgaccgaggtggtggagcgcatgaccaaggagataaagatgggtctggccaaagacacgcatgcgcgagccgtgatcaagtgcttcgtcagccatgtgcaggatctgcccactggcaaggagcggggcaagtatttggccctggatctgggtggctccaacttcagggtgcttctggtgaacctgataagcagctcggacgtggaaatcatgtcgaagggctacaattttcccctgactctgatgtccggatcgggaaaggcgcttttcgacttccttgccgaatccctgtccgagttttgccacacccatggactggagaacgaatcactgcctctgggcttcaccttctcgtttccgctccagcagcagggactctccaagggtatccttgtggcctggaccaaaggattcagctgcgaaggcgtggtgggcaagaatgtggtgactctcctccaggaggccatcgatcgaaggggcgatataaagatcaacaccgtcgccattctcaacgatacggtgggcactctgatgtcctgcgctttctatcatcccaactgccggataggattgatcgtgggaaccggctccaatgcgtgctatgtggagaaaacagtaaatgccgaatgcttcgaaggataccagaccagtcccaagccgtcaatgatcatcaactgcgagtggggcgccttcggagacaatggtgtcctggagttcgtgcgaacttcctacgacaagatagtcgacaaggtgacacccaatcccggcaagcagacgttcgaaaagtgcatatccggcatgtatatgggtgaacttgtgcgtttggtcgtcatcgatatgatagccaagggctttatgttccacggcataatttccgagaagatccaggagcggtggagctttaaaaccgcctatatttccgatgttgaaagtgatgcacctggcgagtatcgtaactgcaataaggtacttagcgaactgggcatcttgggctgccaggaacccgacaaagaggcgctgcgttacatctgcgaggcggtgtcctccaggtctgccaagctgtgtgcctgcggcctggtcaccatcatcaacaagatgaacatcaacgaggtggtcatcggcatcgacggtagcgtgtatcgcttccatcccaagtaccacgacatgctccagtaccacatgaagaagctcctcaagccgggcgtcaagttcgagctgattgtttcggaggacggatccggaagaggagcggctctggtggcggccacggcagtccaggccaagagcaaactctaa

SEQ ID NO: 149348 - protein, 453 aa, Drosophila simulans
MPSLVHTEIETAVKGFLIDQEKMTEVVERMTKEIKMGLAKDTHARAVIKCFVSHVQDLPTGKERGKYLALDLGGSNFRVLLVNLISSSDVEIMSKGYNFPLTLMSGSGKALFDFLAESLSEFCHTHGLENESLPLGFTFSFPLQQQGLSKGILVAWTKGFSCEGVVGKNVVTLLQEAIDRRGDIKINTVAILNDTVGTLMSCAFYHPNCRIGLIVGTGSNACYVEKTVNAECFEGYQTSPKPSMIINCEWGAFGDNGVLEFVRTSYDKIVDKVTPNPGKQTFEKCISGMYMGELVRLVVIDMIAKGFMFHGIISEKIQERWSFKTAYISDVESDAPGEYRNCNKVLSELGILGCQEPDKEALRYICEAVSSRSAKLCACGLVTIINKMNINEVVIGIDGSVYRFHPKYHDMLQYHMKKLLKPGVKFELIVSEDGSGRGAALVAATAVQAKSKL

SEQ ID NO: 149349 - DNA, 1365 bp, Drosophila melanogaster
  CDS (1)..(1365)
atgctggacgcggaggtgcgagaacttatgcaaccctttgtgttgagtgattaccaggtgcaggaagtgtacagtcgcttttgcctggaagtggcccgtggacttaagcggtccacgcatccacaggccaacgtcaagtgttttcccacgtacgtgcaggatctgcccacgggcgacgagatgggcaagtacctggccctggatctcggcggtaccaacttccgagtactgctcgtctcgctgaaaggtcaccacgacgccacggtggattctcagatctatgccgtgccaaaggacctgatggtggggcccggtgtggacctattcgatcacattgcgggctgcctggccaaatttgtggagaaacacgacatgaagaccgcatatctgccactgggcttcactttttcctttccttgcgtgcagctaggccttaaggagggcatcctggtacgctggactaagggattcgattgtgctggggttgagggcgaggatgtgggccgaatgctgcacgaggccattcagcggcgcggagatgccgacattgccgtggtggctatactcaacgataccactggcaccttgatgtcctgcgcccatcgtaatgcagattgccgggtgggtgtcattgtgggaactggctgcaatgcctgctacgttgaagatgttgagaatgtggacctattgcgcgcagactttaaaaaaacaaagcggagtgtgattgtaaatgctgagtggggcgcctttggtgagggtggtcagttggactttgtgcgcaccgaatacgatcgcgaagttgacgaaaagtctctaaaccgatcggagcagctgttcgaaaagatgacggcgggcatgtacttgggcaacctggtgcgccttgtgctacttcgtgccctcgagcgcaagctgatctttaaacagagcagtcgacgtccagaattcgccagcgtgctgcagagaaacgaagaggttttcgagacgcgctacatttcggaaatcgaggacgactccttcccagagtttgccagcacaaggaagattgtgaaaaacctgtttggtctagagaaggcctccgtggaggactgccagactctgagatacatctgcgagtgcgtagctaagcgagcggctacattagtagccatcggagtcagtgggctggtgaacaggacctccaaccgccgcgtgatagtcggcatggatggctccgtctaccgataccatccagagttcgatgcctacatgaggcaaacactccaaaagctggtgaaagaagacaaggagtgggacatcatgctctcggaggacggatccggacgtggagctgcgctggtggccgcggtggccagtaaaacaaagtag

SEQ ID NO: 149350 - protein, 454 aa, Drosophila melanogaster
MLDAEVRELMQPFVLSDYQVQEVYSRFCLEVARGLKRSTHPQANVKCFPTYVQDLPTGDEMGKYLALDLGGTNFRVLLVSLKGHHDATVDSQIYAVPKDLMVGPGVDLFDHIAGCLAKFVEKHDMKTAYLPLGFTFSFPCVQLGLKEGILVRWTKGFDCAGVEGEDVGRMLHEAIQRRGDADIAVVAILNDTTGTLMSCAHRNADCRVGVIVGTGCNACYVEDVENVDLLRADFKKTKRSVIVNAEWGAFGEGGQLDFVRTEYDREVDEKSLNRSEQLFEKMTAGMYLGNLVRLVLLRALERKLIFKQSSRRPEFASVLQRNEEVFETRYISEIEDDSFPEFASTRKIVKNLFGLEKASVEDCQTLRYICECVAKRAATLVAIGVSGLVNRTSNRRVIVGMDGSVYRYHPEFDAYMRQTLQKLVKEDKEWDIMLSEDGSGRGAALVAAVASKTK

SEQ ID NO: 149351 - DNA, 1365 bp, Drosophila melanogaster
  CDS (1)..(1365)
atgctggacgcggaggtgcgagaacttatgcaaccctttgtgttgagtgattaccaggtgcaggaagtgtacagtcgcttttgcctggaagtggcccgcggacttaagcggtccacgcatccacaggccaatgtcaagtgttttcccacgtacgtgcaggatctgcccacgggcgacgagatgggcaaatatctggccctggatctcggcggtaccaacttccgagtactgctcgtctcgctgaaaggtcaccacgacgccacggtggattctcagatctatgccgtgccaaaggacctgatggtggggcccggtgtggacctattcgatcacattgcgggctgcctggccaaatttgtggagaaacacgacatgaagaccgcatatctgccactgggcttcactttttccttcccttgcgtgcaactaggccttaaggagggcatcctggtacgctggactaagggattcgattgtgctggggttgagggcgaggatgtgggccgcatgctgcacgaggccattcagcggcgcggagatgccgacattgccgtggtggctatactcaacgataccactggcaccttgatgtcctgcgcccatcgtaatgcagattgccgggtgggtgtcattgtgggaactggctgcaatgcctgctacgttgaagatgttgagaatgtggacctattgcgcgcagactttaaaaaaacaaagcggagtgtgattgtaaatgctgagtggggcgcctttggtgagggtggtcagttggactttgtgcgcaccgaatacgatcgcgaagttgacgaaaagtctctaaaccgatcggagcagctgttcgaaaagatgacggcgggcatgtacttgggcaacctggtgcgccttgtgctacttcgtgccctcgagcgcaagctgatctttaaacagagcagtcgacgtccagaattcgccagcgtgctgcagagaaacgaagaggttttcgagacgcgctacatttcggaaatcgaggacgactccttcccagagtttgccagcacaaggaagattgtgagaaatctgtttggtctagagaaggcctccgtggaggactgccagactctgagatacatctgcgagtgcgtagctaagcgagcggctacattagtagccatcggagtcagtgggctggtgaacaggacctccaaccgccgcgtgatagtcggcatggatggctccgtctaccgataccatccaaagttcgatgcctacatgaggcaaacactccaaaagctggtgaaagcagacaaggagtgggacatcatgctctcggaggacggatccggacgtggagctgcgctggtggccgcggtggccagtaaaacaaagtag

SEQ ID NO: 149352 - protein, 454 aa, Drosophila melanogaster
MLDAEVRELMQPFVLSDYQVQEVYSRFCLEVARGLKRSTHPQANVKCFPTYVQDLPTGDEMGKYLALDLGGTNFRVLLVSLKGHHDATVDSQIYAVPKDLMVGPGVDLFDHIAGCLAKFVEKHDMKTAYLPLGFTFSFPCVQLGLKEGILVRWTKGFDCAGVEGEDVGRMLHEAIQRRGDADIAVVAILNDTTGTLMSCAHRNADCRVGVIVGTGCNACYVEDVENVDLLRADFKKTKRSVIVNAEWGAFGEGGQLDFVRTEYDREVDEKSLNRSEQLFEKMTAGMYLGNLVRLVLLRALERKLIFKQSSRRPEFASVLQRNEEVFETRYISEIEDDSFPEFASTRKIVRNLFGLEKASVEDCQTLRYICECVAKRAATLVAIGVSGLVNRTSNRRVIVGMDGSVYRYHPKFDAYMRQTLQKLVKADKEWDIMLSEDGSGRGAALVAAVASKTK

SEQ ID NO: 149353 - DNA, 1365 bp, Drosophila simulans
  CDS (1)..(1365)
atgctggacgcggaggtgcgagaacttatgcaaccctttgtgctgagtgattaccaggtgcaggaagtgtacagtcgcttttgcttggaagtggcccgtggactcaagcggtccacgcatccacaggccaatgtcaagtgttttcccacgtacgtgcaggatctgcccacgggcgacgagatgggcaagtatctggccctggatctcggaggaaccaacttccgggtgctgctcgtctcgctgaaaggtcaccatgacgccacggtggattctcagatctatgccgtgccaaaggacctgatggtggggcccggtgtggacctattcgatcacattgcgggctgcctggccaaatttgtggagaaacacgacatgaagaccgcatatctgccactgggcttcactttttcctttccttgcgtgcagcaaggccttaaggagggcatcctggtacgctggactaagggattcgattgtgctggtgttgagggcgaggatgtgggccgcatgctgcacgaggccattcagcggcgcggagatgccgacattgccgtggtggctatactcaacgataccactggcaccttgatgtcctgcgcccatcgtaacgcggattgccgggtgggtgtcattgtgggcactggctgcaatgcctgctacgttgaggatgttgagaatgtggacctcttgcgcgcagactttaaaaaaacgaagcggagtgttattgtaaatgctgagtggggcgcttttggtgagggtggtcagttggactttgtgcgcaccgaatacgatcgcgaaatcgacgaaaagtctctcaaccgatcggagcagctgttcgaaaagatgacggcgggcatgtacttgggcaacctggtgcgccttgtcctacttcgtgccctcgagcgcaagctgatctttaaacagagcagtcgacgtccagaattcgccagcgtgctgcagagaaacgaagaggttttcgagacgcgctacatatcggaaatcgaggacgactcctttccggagtttgccagcacaaggaagattgtgaaaaatctgtttggattggagaaggcctccgtggaggactgccagactctgagatacatctgcgagtgcgtagctaagcgagcggccacattagtagccatcggagtgagtggactggtgaacaggacctccaaccgccgcgtgatagtcggcatggatggctccgtctacagataccatccaaagttcgatgcctacatgaggcagacactccaaaagctggtgaaagcagacaaggagtgggacatcatgctatctgaggacggatccggacgtggagctgcgctggtggccgcggtggccagtaaaacaaagtag

SEQ ID NO: 149354 - protein, 454 aa, Drosophila simulans
MLDAEVRELMQPFVLSDYQVQEVYSRFCLEVARGLKRSTHPQANVKCFPTYVQDLPTGDEMGKYLALDLGGTNFRVLLVSLKGHHDATVDSQIYAVPKDLMVGPGVDLFDHIAGCLAKFVEKHDMKTAYLPLGFTFSFPCVQQGLKEGILVRWTKGFDCAGVEGEDVGRMLHEAIQRRGDADIAVVAILNDTTGTLMSCAHRNADCRVGVIVGTGCNACYVEDVENVDLLRADFKKTKRSVIVNAEWGAFGEGGQLDFVRTEYDREIDEKSLNRSEQLFEKMTAGMYLGNLVRLVLLRALERKLIFKQSSRRPEFASVLQRNEEVFETRYISEIEDDSFPEFASTRKIVKNLFGLEKASVEDCQTLRYICECVAKRAATLVAIGVSGLVNRTSNRRVIVGMDGSVYRYHPKFDAYMRQTLQKLVKADKEWDIMLSEDGSGRGAALVAAVASKTK

SEQ ID NO: 149355 - DNA, 1362 bp, Drosophila yakuba
  CDS (1)..(1362)
atgccgagcctggtgaacacggaaattgaggccgcggtcaagggcttcctgatcgaccaggagaagatgaccgaggtggtggagcgcatgaccaaggagatcaagatgggcctggccaaggacacgcattcgcgggcggtgatcaagtgcttcgtcagccatgtgcaggatcttcccactggcaaggagcgtggcaagtatttggcactcgatctgggtggctccactttcagggtgctgctcgtgaacctgctaagcgaatcggacgtggagattgtctcgaagagtttcaattttcccgtaacactgatgtccggatctggaaaggcgctattcgacttcctggccgaatgcctgtcggagttttgccactaccatggcctggagaacgagtcactgccgctgggcttcaccttctcgtttccggtccagcagcagggactctccaagggcatcctagtggcctggaccaaaggattcagctgcgaaggcgtggtgggcaagaatgtggtaactctgctccaggaggccatcgatcgcaggggcgacatgaaggtgaacaccgtggccattctcaacgatacggtgggcaccctgatgtcctgcgcctactaccatcccaactgccgcataggactgatcgtgggcaccggcagcaatgcgtgctatgtggagaagaccgtgaatgccgaatgcttcgagggatatcagaccagtcccaagccttcgatgatcatcaactgcgagtggggcgcctttggtgacaatggtgtcctggagttcgttcgcaccacctacgacaagatcgtcgacaaggtgacaccaaatcccggcaagcagacgttcgaaaagtgcatctcgggcatgtatatgggtgagctggtgcgcttggtcgtcatggatatggtaggcagggaccttatgttccacggcaccacttccgaaaggatgcaggagcgctggagcttcaagtcctcctatatttccgacattgaaagcgatgcaccgggagagtatcgcagctgcaacaaggtcctcagcgaactgggcatcgtgggctgccaggaaccggacaaggaggcactgcgtttcatctgcgaggcggtgtcctccaggtcggccaagttgtgtgcctgcggcctggtcacgatcatcaacaagatgaacatcaacgaggtggtcatcggcatcgacggcagcgtgtatcgcttccatcccaagtaccacgatatgctgcagtttcacatgaagaagctcctcaagccgagcgtcaagttcgaactggttgtctccgaggacggatccggcaggggagccgctctggtggcggccacagctgttcagggcaaggccaagctctaa

SEQ ID NO: 149356 - protein, 453 aa, Drosophila yakuba
MPSLVNTEIEAAVKGFLIDQEKMTEVVERMTKEIKMGLAKDTHSRAVIKCFVSHVQDLPTGKERGKYLALDLGGSTFRVLLVNLLSESDVEIVSKSFNFPVTLMSGSGKALFDFLAECLSEFCHYHGLENESLPLGFTFSFPVQQQGLSKGILVAWTKGFSCEGVVGKNVVTLLQEAIDRRGDMKVNTVAILNDTVGTLMSCAYYHPNCRIGLIVGTGSNACYVEKTVNAECFEGYQTSPKPSMIINCEWGAFGDNGVLEFVRTTYDKIVDKVTPNPGKQTFEKCISGMYMGELVRLVVMDMVGRDLMFHGTTSERMQERWSFKSSYISDIESDAPGEYRSCNKVLSELGIVGCQEPDKEALRFICEAVSSRSAKLCACGLVTIINKMNINEVVIGIDGSVYRFHPKYHDMLQFHMKKLLKPSVKFELVVSEDGSGRGAALVAATAVQGKAKL

SEQ ID NO: 149357 - DNA, 1365 bp, Drosophila yakuba
  CDS (1)..(1365)
atgctggacgcggaggtgcgagaacttatgcaaccctttgtgctaagtgattatcaggtgcaggaagtgtacagccgcttttgcctggaagtggcccgtggacttaagcgatccacacatccacaggccaatgtcaagtgctttcccacgtacgtgcaggatctgcccacgggcgacgagatgggcaagtatctggccctggatctcgggggtaccaacttccgggtgcttctcgtctcgctgaaaggtcaccatgacgccacagtggattctcagatctatgccgtgccaaaggacctgatggtgggatccggtgtgcagctattcgatcacattgcgggctgtctggccaaatttgtggagaaacacgacatgaagaccgcatatctgccactgggcttcactttctcctttccttgcgtgcagctaggccttaaggagggcatcctggtacgctggaccaagggcttcgattgtgctggtgttgagggcgaggatgtgggccgtatgctgcacgaggccattcagcggcgcggagatgccgacattgccgtggtggctatactcaacgatactacaggcaccttgatgtcctgcgcccatcgtaacgcagattgccgtgtgggcgtcattgtgggcactggctgtaatgcctgctacgttgaggatgtggagaatgtggaccttttgcgcgcagacttcaaaaaatcgaagcggagtgttattgtaaatgctgagtggggcgcttttggtgagggtggtcagttggactttgtgcgcaccgaatacgatcgcgaagtggacgaaaagtctatcaatcgtgcggagcagctgttcgaaaagatgactgccggcatgtacttgggcaatctggtgcgccttgtcctgctccgtgccctcgagcgcaagctgatcttcaaacagagcagtcggcgtccagaattcgccggcgtgctgcagagaaatgaagaggttttcgagacgcgctacatatcggagatcgaggacgactccttcccagagtttgccagcaccaggaagatcgtgaggaatctgtttggcctggagaaggcctccgtggaggactgccaaaccctgagatacatctgcgagtgcgtggctaagcgagcggccacattagtagccatcggagtaagtgggctggtgaacaggacctccaaccgccgcgtgatagtcggcatggatggatccgtctacagataccatccaaagttcgatgcctacatgaggcagaccctgcaaaagctggtgaaagcagacaaggagtgggacatcatgctctcggaggacggatccggacgtggagctgcgctggtggccgcagtggccagtaaatcaaagtag

SEQ ID NO: 149358 - protein, 454 aa, Drosophila yakuba
MLDAEVRELMQPFVLSDYQVQEVYSRFCLEVARGLKRSTHPQANVKCFPTYVQDLPTGDEMGKYLALDLGGTNFRVLLVSLKGHHDATVDSQIYAVPKDLMVGSGVQLFDHIAGCLAKFVEKHDMKTAYLPLGFTFSFPCVQLGLKEGILVRWTKGFDCAGVEGEDVGRMLHEAIQRRGDADIAVVAILNDTTGTLMSCAHRNADCRVGVIVGTGCNACYVEDVENVDLLRADFKKSKRSVIVNAEWGAFGEGGQLDFVRTEYDREVDEKSINRAEQLFEKMTAGMYLGNLVRLVLLRALERKLIFKQSSRRPEFAGVLQRNEEVFETRYISEIEDDSFPEFASTRKIVRNLFGLEKASVEDCQTLRYICECVAKRAATLVAIGVSGLVNRTSNRRVIVGMDGSVYRYHPKFDAYMRQTLQKLVKADKEWDIMLSEDGSGRGAALVAAVASKSK

SEQ ID NO: 149359 - DNA, 1494 bp, Tuber borchii
  CDS (1)..(1494)
atgtatctcaatgcatctcgcaagccgcctagccgcaaaggctccatgcacgatgtgccgaacgatcttatgaagcatatccatgacctcgagaagatgttcaccatcgataccacaaagctccatgaggttgtgtccgtattccaggaggaactcgtcaaggggttatccgtgacaggaggcacaattcccatgaacccgacttgggtgattggatatcctactggtgatgagacaggcacctacctcgctcttgatatgggtggaacaaatcttcgtgtttgcgaagttgagcttcctgaagagcagggccagtatgacatctatcagtccaagtatcgccttcctgaagagatcaaatccggcaccggtgaacaacttttcgattacattgccgagtgtgtcaagcagttcttgatcgccaatcacgagggccaagacatcaaggatttgaaggagctacatcttggttttacattctcatacccgtgcgagcagaacgccattgatcacggtatcttgcagcgttggactaaaggtttcgatattgaaggtgttgagggtcatgacgttgttcccatgttcgaagaggctcttgagagaaaaggggtccctatcaagattactgctttagtcaatgacactaccggaactcttatcgcttccgcttataccgacaacactaccagaattggttgcattttcggtactggttgcaacgctgcctacatggagactatcggctgcattcctaaacttgctcatatgaatctcgatcctagtcttgagattgccattaactgtgaatggggagcgttcgacaatgaacatcgcgtccttcctcgtactgtatatgacaagcatatcgatgaaaactctccccgcccggggcagcaaacatttgagaagatggttgccggtctttacttaggagaaatcttccgtttggttctcgtcgatctctattctaatcctgatgtttcaatttttgaaaagcaggacattagtactcttcaggctgagtactctttggatgcatccttcctagccgagattgagagcgatccttgggagaatttgatggaaactcatgctctctttgagaagaagttgaagattgtgaccaccgagcctgagcgtaagctcatccgccgccttgcggagctcatcggaactcgcgctgctcgtcttggggcctgtggtgttgccgccatttgcaagatgaagaatattgagtcttgccatgttggtgctgacggctcagtgttcaacaagtatcccaacttccaggagcgtggtgcaaaggctcttcgcgaaatcttcggctggggaagaacaattagaaaggatcctatccagattgttccctctgaggacggaagtggcgtcggcgccgctttgatcgcagcactcaccatgaagcgtattaggaagggtattcatgctggtgttaacgtcaagcgcaagaactcgttgattcctccggtcccataa

SEQ ID NO: 149360 - protein, 497 aa, Tuber borchii
MYLNASRKPPSRKGSMHDVPNDLMKHIHDLEKMFTIDTTKLHEVVSVFQEELVKGLSVTGGTIPMNPTWVIGYPTGDETGTYLALDMGGTNLRVCEVELPEEQGQYDIYQSKYRLPEEIKSGTGEQLFDYIAECVKQFLIANHEGQDIKDLKELHLGFTFSYPCEQNAIDHGILQRWTKGFDIEGVEGHDVVPMFEEALERKGVPIKITALVNDTTGTLIASAYTDNTTRIGCIFGTGCNAAYMETIGCIPKLAHMNLDPSLEIAINCEWGAFDNEHRVLPRTVYDKHIDENSPRPGQQTFEKMVAGLYLGEIFRLVLVDLYSNPDVSIFEKQDISTLQAEYSLDASFLAEIESDPWENLMETHALFEKKLKIVTTEPERKLIRRLAELIGTRAARLGACGVAAICKMKNIESCHVGADGSVFNKYPNFQERGAKALREIFGWGRTIRKDPIQIVPSEDGSGVGAALIAALTMKRIRKGIHAGVNVKRKNSLIPPVP

SEQ ID NO: 149361 - DNA, 1473 bp, Aspergillus oryzae
  CDS (1)..(1473)
atggttggaattggccccaaacgtcccccatcccgcaagggatcgatgcatgagctgccccagaacctgttggagcagatcaagcaattcgaggacatctttaccgtggacggcgccaaactcaagcagattgcggaccatttcgtgaaggagctcgaaaagggtctaagcgtcgaggggggtaacattcccatgaatgtgacctgggtcatgggattccccgatggcgacgagcagggaaccttcctcgctttggacatgggcggtactaatctgcgtgtctgtgagatcactttgacggaagagaagggcgctttcgacatcacccagtccaagtatcgtatgccggaggagttgaagacgggtacagcggaggagctttgggaatacatcgccgactgtttgcagcagtttattgaatcccaccacgagaatgagaaactgtctaaactgccattgggctttaccttctcctatcctgctacacaggaatacattgatcatggtgttctccagcgttggacaaagggtttcgacattgacggagtagagggccaggatgttgtgcccccattggaggcaatcctcaagaaaagaggccttcctatcaaagttgctgcgttgatcaacgacactacgggcaccctgatcgcctcttcttacaccgactcagatatgaaaattggctgcattttcggcactggtgtcaacgccgcctacatggaacattgtggctcggttcccaagcttgcacacaagaatctacccccagacatgcccgtggccatcaactgcgagtacggtgcctttgacaatgagcacgttgttctgcccctcacgaagtatgatatcatcatcgaccgcgactcccctcgcccaggacaacaagctttcgagaagatgactgcaggtctttacttgggagaaatattccgtctagccctcttggatctgttggagacgaggcctggtctgattttccagggccaagacacatcccagctccggaaaccttacttgctggacgcgtccttcctcgcagctattgaggatgatccgtacgagaacttgcaggaaactcaggagctcatggagcgcaagctgaacatcaaggccacccagcaggagctggaaatgatccgtcgcttggcggagttgatcggcactcgtgcagctcgtctgtcggcgtgtggtgtggctgccatctgcaagaagaagaacattgagtcttgccatgtgggcgccgacggctctgtctttacgaaatatccccacttcaaggcccgtggagcacaggctctgcgcgagatcttggactgggcacctaacgagaaggacaaggtggtcatcatggctgctgaagacggttctggtgttggagcggctcttattgctgcattgacattgaagcgggtcaaggcaggcatcagctgcggtatccgagatatggccgatatgcagagtctcatttaa

SEQ ID NO: 149362 - protein, 490 aa, Aspergillus oryzae
MVGIGPKRPPSRKGSMHELPQNLLEQIKQFEDIFTVDGAKLKQIADHFVKELEKGLSVEGGNIPMNVTWVMGFPDGDEQGTFLALDMGGTNLRVCEITLTEEKGAFDITQSKYRMPEELKTGTAEELWEYIADCLQQFIESHHENEKLSKLPLGFTFSYPATQEYIDHGVLQRWTKGFDIDGVEGQDVVPPLEAILKKRGLPIKVAALINDTTGTLIASSYTDSDMKIGCIFGTGVNAAYMEHCGSVPKLAHKNLPPDMPVAINCEYGAFDNEHVVLPLTKYDIIIDRDSPRPGQQAFEKMTAGLYLGEIFRLALLDLLETRPGLIFQGQDTSQLRKPYLLDASFLAAIEDDPYENLQETQELMERKLNIKATQQELEMIRRLAELIGTRAARLSACGVAAICKKKNIESCHVGADGSVFTKYPHFKARGAQALREILDWAPNEKDKVVIMAAEDGSGVGAALIAALTLKRVKAGISCGIRDMADMQSLI

SEQ ID NO: 149363 - DNA, 1503 bp, Saccharomyces cerevisiae
  CDS (1)..(1503)
atgtcatttgaaaatttacataaagtcaatgctgaggcattggaagatgcagtggttgagatctgctcctcattgcaggttgatgcagcaaagttggacgaactaacagcgtacttcattgaatgtatggaaaaggggttgaataacacctctgtaggcgaagaaaagacggtggacaagggtctacccatgatccctacatatgtaaccagtttgcccaatgggacggaacgtggtgttttgctggctgcagatttaggtgggactcacttcagagtgtgttctgtgactttgaatggtgacggaacctttgatatgcagcaattgaagtctaagattccggaagaatatctaaatgacaaggatgtcaccagcgaggagctgtttagctacctgggtcgccgtacaagggccttcgttaggaagcatcatcctgagttgttgaagtccacgggggagaacataaaacctttgaaaatgggatttaccttctcatatcccgttgaccaaacctctttgagttccggtactttaatcagatggaccaaaagcttcaagattgaagacacggtcggcaaggatgtcgtgaggttataccaggagcaattagacattcaggggctctctatgattaatgtggtagctttgaccaacgacacggttggcactttcctatcccactgctacacttcaggctctcgtccatcgagtgctggtgagattagcgagcctgtcattggttgtatctttggtactggtactaacggttgctatatggaggatattgaaaacatcaagaagctaccagatgagctcagaacaagactgctgcatgaaggaaaaacccaaatgtgcatcaacatcgaatggggttctttcgacaatgaattgaaacatttgtctgctacaaagtatgacatcgatattgaccaaaaattttctccaaatccaggttaccatctatttgaaaaaagaatttccggcatgtacttgggtgagctgttaaggaacatcctggtggacttgcatgcaaggggcttaatcttgggacagtatcgtaattacgatcaattacctcaccgtttaaagactcctttccaattgtgcagtgaagttctttccaggattgaaatcgatgattcgacaaacttgcgtgaaactgaattgtcgtttttgcagagtttgaggctaccgaccacttttgaagaacgtaaagcaattcaaaatctggtccgttccattacgagaaggtctgcatatctagcagccgttccgattgccgccatcctaatcaagacaaacgctttgaacaaaagatatcacggtgaggtagaaattggttttgacggttatgtcatcgaatactatcctggattcagatccatgctgagacatgctttggcattaagtccaattggcactgagggtgaacgtaagatacatttgcgtctagccaaagatgggtccggtgttggcgcagctttgtgtgctctggtggcataa

SEQ ID NO: 149364 - protein, 500 aa, Saccharomyces cerevisiae
MSFENLHKVNAEALEDAVVEICSSLQVDAAKLDELTAYFIECMEKGLNNTSVGEEKTVDKGLPMIPTYVTSLPNGTERGVLLAADLGGTHFRVCSVTLNGDGTFDMQQLKSKIPEEYLNDKDVTSEELFSYLGRRTRAFVRKHHPELLKSTGENIKPLKMGFTFSYPVDQTSLSSGTLIRWTKSFKIEDTVGKDVVRLYQEQLDIQGLSMINVVALTNDTVGTFLSHCYTSGSRPSSAGEISEPVIGCIFGTGTNGCYMEDIENIKKLPDELRTRLLHEGKTQMCINIEWGSFDNELKHLSATKYDIDIDQKFSPNPGYHLFEKRISGMYLGELLRNILVDLHARGLILGQYRNYDQLPHRLKTPFQLCSEVLSRIEIDDSTNLRETELSFLQSLRLPTTFEERKAIQNLVRSITRRSAYLAAVPIAAILIKTNALNKRYHGEVEIGFDGYVIEYYPGFRSMLRHALALSPIGTEGERKIHLRLAKDGSGVGAALCALVA

SEQ ID NO: 149365 - DNA, 1491 bp, Arabidopsis thaliana
  CDS (1)..(1491)
atgggtaaagtagctgttggagcgactgttgtttgcacggcggcggtttgtgcggtggctgttttggttgttcgacgacggatgcagagctcagggaagtggggacgtgttttggctatcctcaaggcctttgaagaggattgtgcgactccgatctcgaaactgagacaagtggctgatgctatgaccgttgagatgcatgctggtcttgcatccgacggtggtagcaaactcaagatgcttatcagctacgttgataatcttccttccggggatgaaaagggtctcttttatgcattggacctaggggggacaaacttccgtgtcatgcgtgtgcttcttggcgggaagcaagagcgtgttgttaaacaagaattcgaagaagtttcgattcctcctcatttgatgactggtggttcagatgagttgttcaattttatagctgaagctcttgcgaagtttgtcgctacagaatgcgaagactttcatcttccagaaggtagacagagggaattaggtttcactttctcgtttcctgttaagcagacttctctgtcctctggtagtctcatcaaatggacaaaaggcttttccatcgaagaagcagttggacaagatgttgttggagcacttaataaggctctggaaagagttggtcttgacatgcgaatcgcagcacttgttaatgataccgttggaacactagccggtggtagatactataacccggatgttgttgctgctgttattttaggcactgggacaaacgcagcctatgttgagcgtgcaaccgcgatccctaaatggcatggtctgcttccaaaatcaggagaaatggttataaacatggaatggggaaacttcaggtcatcacatcttccattaaccgagtttgatcacacgctggatttcgagagtctgaatccaggcgaacagattcttgagaaaatcatttccggtatgtacttgggagagattttgcgaagagttcttctaaagatggctgaagatgctgctttctttggcgatacagtcccatctaagctgagaataccattcatcattaggactcctcacatgtcggctatgcacaacgacacttctccagacttgaagattgttgggagcaagattaaggatatattggaggtccctacaacttctctgaaaatgagaaaagttgtgatcagtctctgcaacatcatagcaacccgaggagctcgtctctctgctgctggaatctatggtattctgaagaaactgggaagagatactactaaagacgaggaggtgcagaaatcggttatagccatggatggtggattgtttgagcattacactcagtttagtgagtgtatggagagctcactaaaagagttgcttggagatgaagcttcaggaagcgttgaagtcactcactccaatgatggatcaggcattggagctgcgcttcttgctgcttctcactctctctaccttgaagactcttaa

SEQ ID NO: 149366 - protein, 496 aa, Arabidopsis thaliana
MGKVAVGATVVCTAAVCAVAVLVVRRRMQSSGKWGRVLAILKAFEEDCATPISKLRQVADAMTVEMHAGLASDGGSKLKMLISYVDNLPSGDEKGLFYALDLGGTNFRVMRVLLGGKQERVVKQEFEEVSIPPHLMTGGSDELFNFIAEALAKFVATECEDFHLPEGRQRELGFTFSFPVKQTSLSSGSLIKWTKGFSIEEAVGQDVVGALNKALERVGLDMRIAALVNDTVGTLAGGRYYNPDVVAAVILGTGTNAAYVERATAIPKWHGLLPKSGEMVINMEWGNFRSSHLPLTEFDHTLDFESLNPGEQILEKIISGMYLGEILRRVLLKMAEDAAFFGDTVPSKLRIPFIIRTPHMSAMHNDTSPDLKIVGSKIKDILEVPTTSLKMRKVVISLCNIIATRGARLSAAGIYGILKKLGRDTTKDEEVQKSVIAMDGGLFEHYTQFSECMESSLKELLGDEASGSVEVTHSNDGSGIGAALLAASHSLYLEDS

SEQ ID NO: 149367 - DNA, 1497 bp, Oryza sativa
  CDS (1)..(1497)
atggcggcggcggcggtggcggcagatcagaaggtggtgacgatgacgagcctccgggagggctgcgcttgcgcggcgcctcctgctgcagctgcgccgccgatgccgaagatggcggcggcgcagagggtggtggcggagctgagagaagcgtgcgcgacgccggcggcgaggctggcggaggtggccgcggcgatggccggcgagatggaggccgggctggcggtggagggcggcagcagcgagatgaagatgatcgtgtcgtacgtcgacagcctccccaccggcggcgaggaggggtcgtactacgcgctcgacctcggcggcaccaacttccgcgtcctccgcgtgcggcttgccggcggcggcgtcgccgagcgcgtggcgagggaggtcccgatccctcccggcctcatgtccggcggcggcgccacctcggagtgcctcttcggcttcatcgcctccgcgctagccgagttcgtcggcgaggaggaagaagaaggcggcctcgacggcggcgagagggagcttgggttcaccttctccttccccgtgcaccaaacctccatcgcgtcggggacgctcatccggtggacgaaggcgttcgccgtcgacgacgcgatcggcgaggacgtcgtggcggcgctgcaggcggccatgtcggagcgggggctcgacatgcgcgtgtcggcgctcatcaacgacaccgtcgggacgctcgccgcgggcagctactacgacgaggacgtcgtggccgccgtcatcctcggcaccggcacgaacgccgcctacgtcgaggacgccaccgccatcgccaagctacacccatcgcagctgccagcatcgaacaccatggtgatcaacaccgagtggggcagcttcgcctcgccgtgcctcccattgacggagttcgacgaagcactcgatcaggagagcctcaaccccggcgagcagacctacgagaagctcatctccgggatgtacctcggcgagatcgtcaggagggtcctcctcaagatctcctcccggtgcccctccctcctcggcggcgccggcgagctcgcgacgccgttcgtcctcaggacacccgacgtgtccgcgatgcaccacgacgagacgcccgacctgagcatcgtcggcgagaagctggaacgcacgctgggcatccgcggcacgtcgccggaggcgaggaggatggtcgtcgaggtgtgcgacatcgtcgccacgagggccgcccggctggccgcggcggggatcgtcgggatcctgaagaagatcgggagggtcgacggcggcgaggggcggaggaggaggtcggtggtcgccgtggacggcgggctgttcgagcactacggcaagttccggcggtgcatggagagcgcggtgagggagctgctcggagaggcggcggcggagagggtggtcgtcaagctcgccagcgacggctccgggctcggcgccgccctggttgcagctgctcactcgcagagagcataa

SEQ ID NO: 149368 - protein, 498 aa, Oryza sativa
MAAAAVAADQKVVTMTSLREGCACAAPPAAAAPPMPKMAAAQRVVAELREACATPAARLAEVAAAMAGEMEAGLAVEGGSSEMKMIVSYVDSLPTGGEEGSYYALDLGGTNFRVLRVRLAGGGVAERVAREVPIPPGLMSGGGATSECLFGFIASALAEFVGEEEEEGGLDGGERELGFTFSFPVHQTSIASGTLIRWTKAFAVDDAIGEDVVAALQAAMSERGLDMRVSALINDTVGTLAAGSYYDEDVVAAVILGTGTNAAYVEDATAIAKLHPSQLPASNTMVINTEWGSFASPCLPLTEFDEALDQESLNPGEQTYEKLISGMYLGEIVRRVLLKISSRCPSLLGGAGELATPFVLRTPDVSAMHHDETPDLSIVGEKLERTLGIRGTSPEARRMVVEVCDIVATRAARLAAAGIVGILKKIGRVDGGEGRRRRSVVAVDGGLFEHYGKFRRCMESAVRELLGEAAAERVVVKLASDGSGLGAALVAAAHSQRA

SEQ ID NO: 149369 - DNA, 1455 bp, Schizosaccharomyces pombe
  CDS (1)..(1455)
atgtccttgcacgacgcttaccattggccttctcgtacacctagtcgtaagggttcaaatatcaaattgaacaaaactttacaagatcatttggatgaactggaagaacaattcaccattcccactgaacttttacatcgcgttaccgatcgctttgtttctgagctttacaagggcttaaccacgaacccgggtgatgttccaatggtccccacatggatcattggtactcctgatggcaatgagcatggctcttatttggcattagatttaggtggtactaacttgcgtgtttgtgcagttgaggttcaaggcaacggtaaattcgacattactcaaagcaaataccgtctacctcaagaactcaaagttggcactcgtgaggccctctttgattacattgccgactgtatcaagaaatttgtggaagaggttcacccaggtaaaagccaaaatttggaaattggtttcaccttttcttacccctgtgttcaacgctccattaacgatgcttcattagttgcctggactaagggctttgatattgatggcgttgagggtgaaagtgtaggtcctcttttatcagcagccttgaagcgtgttgggtgtaacaacgttagactcaatgccattttgagtgatactactggtacattggttgcttccaactatgccagcccaggtactgagattggtgtcatctttggaactggatgtaatgcttgttacattgaaaagttctcagaaattcctaagcttcataagtatgacttccctgaagatatgaacatgatcatcaactgtgaatggtgcgattttgacaaccagcatgttgtccttcctcgtaccaaatacgatgttgctattgatgaagagtctcccagacccggtcttcaaacgtacgagaaaatgattgctggatgctatttgggtgatatcttgcgtcgtattcttcttgacctttatgaacagggagctctctttaacggtcaggacgttaccaagattcgtgaccccttggccatggatacctctgtgctcagcgctattgaagttgacccctttgagaaccttgatgaaactcaaaccctatttgaggaaacctatggtctcaagaccaccgaagaagagcgtcaattcattcgtcgtgcatgcgaattgattggaactcgttctgcccgtctttctgcgtgtggtgtatgcgcccttgttcgtaaaatgaataagccatctatgattgtaggtactgatggtagtgtctacaacttataccctcgttttaaggatcgtcttgctcaagcatttaaggatatccttggtgaggaaattggcagcaaagttgttaccatccccgccgaagacggtagtggcgtaggtgctgcattggtcagtgctcttgaagccaaaggcaaggccctcacttctgatattcttgccgagcatcttaagaattaa

SEQ ID NO: 149370 - protein, 484 aa, Schizosaccharomyces pombe
MSLHDAYHWPSRTPSRKGSNIKLNKTLQDHLDELEEQFTIPTELLHRVTDRFVSELYKGLTTNPGDVPMVPTWIIGTPDGNEHGSYLALDLGGTNLRVCAVEVQGNGKFDITQSKYRLPQELKVGTREALFDYIADCIKKFVEEVHPGKSQNLEIGFTFSYPCVQRSINDASLVAWTKGFDIDGVEGESVGPLLSAALKRVGCNNVRLNAILSDTTGTLVASNYASPGTEIGVIFGTGCNACYIEKFSEIPKLHKYDFPEDMNMIINCEWCDFDNQHVVLPRTKYDVAIDEESPRPGLQTYEKMIAGCYLGDILRRILLDLYEQGALFNGQDVTKIRDPLAMDTSVLSAIEVDPFENLDETQTLFEETYGLKTTEEERQFIRRACELIGTRSARLSACGVCALVRKMNKPSMIVGTDGSVYNLYPRFKDRLAQAFKDILGEEIGSKVVTIPAEDGSGVGAALVSALEAKGKALTSDILAEHLKN

SEQ ID NO: 149371 - DNA, 1619 bp, Solanum tuberosum
  CDS (19)..(1515)
taaattccggcaaaaaaaatgaagaaagtgacggtgggagccgccgtggttggtgcagctgcggtgtgtgcagtggcggcgttaatagtgaaccaccggatgcggaaatctagtaaatggggtcgtgctatggctattcttcgtgaatttgaggaaaagtgtaagactcaagatgcaaagcttaagcaagttgctgatgctatgactgttgagatgcacgccggacttgcttctgaaggcggccagagctcaagatgcttatcacctatgtcgataatctcccaactggtgatgaagctgggcgtcttttatgcattggatcttggtggaacaaattttcgagtattgcgagtgcaattgggtggaaaagatggtggtattattcatcaagaatttgctgaggcatcaattcctccaagtttgatggttgggacttcagatgcactttttgattatattgcggctgagcttgctaaatttgttgctgcggaagaggaaaaatttcatcaacctcctggtaagcagagagaactaggttttcaccttctcattcccagtaatgcagacttcaataactctgggactattatgcggtggacaaaaggcttctcaattgatgatgcggttggccaagatgttgttggagaactcacaaaagctatgaaagaaaaggtgctcgatatgcgggtctcagctctggtgaatgatactgttggaacattagctggtggtaaatatacgcaaaaggatgtagctgttgctgttatcttaggtacagggacgaatgcagcttatgtggagcgggtgcaggcaattccaaagtggcatggtcctgtgccaaaatctggtgaaatggttatcaatatggaatggggtaattttaggtcatcccatctgccgttgacagagtatgatcatgcgttggataacgagagtttaaatcctgctgaacagatatttgagaagatgacttctggcatgtacttgggagaaattttacgcagagttctcactagggtggctgaagaagtcctggcgtttttggcgatgaggtccctccaaagcctcaaggattcatttgtgttaaggacacctgatatgtctgctatgcatcatgacacatcccctgatctgaaagtggttggtgaaaagctgaaggatattttagagatatctaatacctccttgaagacaaggaaattagtgttgagcctgtgcaatatcgttgcaacacgtggggcaagacttgacgctgcaggggtattgggcatcttgaaaaagatgggaagagatacgcctaagcagggtggttcagaaaggacggttatagccatggatggcgggttgtatgagcactatacagaatatagaatgtgtttagagaactctttgaaggacttgctcggagaggaattggcaacgagcatcgtttttgtgcactccaatgatggttctggcattggtgctgctcttcttcgtgcctctcattcaatgtaccttgaagatcaagcttaggcgagtgtgatcaaatccataacttgctagaggggactacctttagactctatattttgctctcaagcgttttcggtattttctctcctttattgtaccatcaa

SEQ ID NO: 149372 - protein, 498 aa, Solanum tuberosum
MKKVTVGAAVVGAAAVCAVAALIVNHRMRKSSKWGRAMAILREFEEKCKTQDAKLKQVADAMTVEMHAGLASEGGQSSRCLSPMSIISQLVMKLGVFYALDLGGTNFRVLRVQLGGKDGGIIHQEFAEASIPPSLMVGTSDALFDYIAAELAKFVAAEEEKFHQPPGKQRELGFHLLIPSNADFNNSGTIMRWTKGFSIDDAVGQDVVGELTKAMKEKVLDMRVSALVNDTVGTLAGGKYTQKDVAVAVILGTGTNAAYVERVQAIPKWHGPVPKSGEMVINMEWGNFRSSHLPLTEYDHALDNESLNPAEQIFEKMTSGMYLGEILRRVLTRVAEEVLAFLAMRSLQSLKDSFVLRTPDMSAMHHDTSPDLKVVGEKLKDILEISNTSLKTRKLVLSLCNIVATRGARLDAAGVLGILKKMGRDTPKQGGSERTVIAMDGGLYEHYTEYRMCLENSLKDLLGEELATSIVFVHSNDGSGIGAALLRASHSMYLEDQA

SEQ ID NO: 149373 - DNA, 1971 bp, Spinacia oleracea
  CDS (280)..(1776)
acgagccttaattagaccacctcaaggcaaagctccgattaaaccggtccctccaaaaaaaaaactcatctgaattttccccaatcaaattctcccggatctactccttctctcccttctttctctctctagattgcatcttgtaaagaaagaaagaaaccaaaatttcccaacatgccaaattaatccatcttctttccattgttgtaattagagagagaaaatcaaattgaagagcacccatctgattttttttagtggacgttacatagagagaaaatgaggaaggcagcggtcggagcagcggtggtatgtacagcggcggtgtgtgcggcggcagcggtgttggtaagacagaggatgaagagctcaagcaagtggggtcgtgtaatggcaatactgaaggagttagatgacaattgtgggacccctttgggtaagcttagacaggtggctgatgctatgaccgttgagatgcacgctggtcttgcatctgagggtgcttctaagctcaagatgctcatcagctacgttgacaatctccccactggggacgagcatggactgttctatgcgttagaccttggcggcaccaacttccgagtgcttcgagtaaagttgggtggcaaagaaaaacgtgttgtcgaacaagaatttgacgaagtatcaattccacctgagttgatggttggtacatcagaacaactgtttgattatatcgccgaagccctagccaaatttgttgcaacggaaagtgaaggtcttcatcctgaacccaataaacagagagagctgggatttaccttctctttccctgtcaagcagacatcaatcgcatcagggactcttataagatggaccaagggctttaatatagaagatacagttggtgaagatgtggtggctgaattgaccaaggccatgctaagaaaaggtgtagatatgcgtgtgacagctttggtcaacgatacagttggaaccctagctggaggtaggtactataaagaagatgtaattgctgctgttatattgggtactggaacaaacgcagcttacgttgaacgtgctagtgcaattcacaagtggcatggtcctttgcccaaatcaggggagatggtaattaacatggagtggggtaatttccgttcatcgtatttacctttgactgaatatgacatagcactagatgaagaaagtttgaatcctggtgaacagatatttgagaaaatgatatcaggaatgtacttgggtgagattgtgcgaagagtcttgtataggatggcagacgaggccagcctttttggtgatacagtcccatcaaaattgaaaactccattcatcttaaggacaccagacatgtctgccatgcatcatgacacatcacctgatcttaaagttgttgcgagcaaactgaaggatgtccttgggataccaaactcatcattaaaggtgcgaaagattatagttgacgtatgtgacgtcattgcttcacgtggggcctgcatttctgcagccgggatcttgggtattattaagaaactagggagagacacattgaagcaaggtgagaaccagaagtctgtgattgcattagatggagggttgtttgagcactacgccaaattccgggagtgcatggaggactctttgaaggagctcctaggcgatgaagtcgctgaaactattgtaattgagcactcaaatgatggatcaggcattggtgctgctcttctagcagcgtcgcattcccagtacctcgaggaagatgaatcttgatgacaagatcctacatcctcaattttgtataactttcttcaagctccttagatccttagagatcatggaaattttttcttttttttttcttttttctttttagactttgctgccccagtgaagaataaattatggccaaacgggctctgcttgctgcatgaaaaaatggcatgaagctcgctgttctctcgtgcc

SEQ ID NO: 149374 - protein, 498 aa, Spinacia oleracea
MRKAAVGAAVVCTAAVCAAAAVLVRQRMKSSSKWGRVMAILKELDDNCGTPLGKLRQVADAMTVEMHAGLASEGASKLKMLISYVDNLPTGDEHGLFYALDLGGTNFRVLRVKLGGKEKRVVEQEFDEVSIPPELMVGTSEQLFDYIAEALAKFVATESEGLHPEPNKQRELGFTFSFPVKQTSIASGTLIRWTKGFNIEDTVGEDVVAELTKAMLRKGVDMRVTALVNDTVGTLAGGRYYKEDVIAAVILGTGTNAAYVERASAIHKWHGPLPKSGEMVINMEWGNFRSSYLPLTEYDIALDEESLNPGEQIFEKMISGMYLGEIVRRVLYRMADEASLFGDTVPSKLKTPFILRTPDMSAMHHDTSPDLKVVASKLKDVLGIPNSSLKVRKIIVDVCDVIASRGACISAAGILGIIKKLGRDTLKQGENQKSVIALDGGLFEHYAKFRECMEDSLKELLGDEVAETIVIEHSNDGSGIGAALLAASHSQYLEEDES

SEQ ID NO: 149375 - DNA, 1843 bp, Nicotiana tabacum
  CDS (154)..(1647)
ggccgcataacaaacacccctgtaatttattactgtccttaaaagtacaaaaatccccagtctttttgttcattttgtattttttttttcatttgtttcggtggaccaacttttagccaacctccaattcctctgccgtgacaaaaagaaaggatgaagaaagcgacggtgggagccgccgtaattggcgccgctacggtatgtgcagtggcggcattaatagtgaaccaccgtatgcgcaaatctagcaaatgggcacgtgctatggctattcttcgtgaatttgaggaaaagtgtgggacccctgatgctaagctcaagcaagtcgctgatgctatgaccgtcgagatgcacgctggacttgcctccgaaggtggtagcaagctcaagatgcttatcacttacgtcgataatctccccaccggtgatgaagctggcgtcttttatgcgttggatcttggtggaacaaattttcgagtattgcgagtgcaacttggtggaaaagatggtggtattgttcatcaggaatttgcggaggcatcaattcctccaaatttgatggttgggacttcagaagcactttttgattatattgcggcagaacttgcaaaatttgtcaacgaggaaggggaaaagtttcaacaacctcctggtaagcagagagaactaggtttcaccttctcattcccggtaatgcagacttcaatcaactctgggactattatgaggtggacaaagggcttctccattgatgatgcggttggccaagatgttgttggagaactcgcaaaagctatgaaaagaaaaggagttgatatgcgggtctcagctttggtgaatgatactgttgggacgttggctggtggtaaatatacacacaacgacgtagctgttgctgttatcttaggtacagggaccaatgcagcctatgtggaacgggtgcaggcgattccaaagtggcatggtcctgtgccaaaatctggtgaaatggttatcaacatggaatggggtaattttaggtcatcccatcttcccttgacacagtatgatcatgcgttggatactaatagtttgaatcctggtgatcagatatttgagaagatgacttctggcatgtacttgggagaaattttacgcagagttctactcagggtggccgaagaagctggcatttttggtgatgaggtccctccaaagctcaagagtccatttgtattgaggacacctgatatgtctgcgatgcatcatgacgcatcctctgatctgagagtggttggtgacaagctgaaggatattttagagatatctaatacctccttgaagacaaggagattagtcattgagctgtgcaacatcgttgcgacacgtggggcaaggcttgcagctgcgggtgtattgggcatcttgaaaaagatgggaagggatactcctcggcaaggtggtctagagaagacggttgtagccatggatggcggattgtacgagcactatacagaatacaggatgtgcttagagaacactttgaaggaattgcttggagatgaattggcgacaagcattgttttcgagcactccaatgatggttctggcattggtgcagctcttcttgctgcctctaactcaatgtaccttgaagataagtcctaggagtgatcaaatccctttcttgctagaggaaaccaccttttactctttatattttgctctcgagcattttttttcaatttttcttcggattataccatcaagtatatttaataaattttcccagtacctttttatctctaggaaatttttcctagaaatgcctatacatcatctagcatgccttttttgcggccgc

SEQ ID NO: 149376 - protein, 497 aa, Nicotiana tabacum
MKKATVGAAVIGAATVCAVAALIVNHRMRKSSKWARAMAILREFEEKCGTPDAKLKQVADAMTVEMHAGLASEGGSKLKMLITYVDNLPTGDEAGVFYALDLGGTNFRVLRVQLGGKDGGIVHQEFAEASIPPNLMVGTSEALFDYIAAELAKFVNEEGEKFQQPPGKQRELGFTFSFPVMQTSINSGTIMRWTKGFSIDDAVGQDVVGELAKAMKRKGVDMRVSALVNDTVGTLAGGKYTHNDVAVAVILGTGTNAAYVERVQAIPKWHGPVPKSGEMVINMEWGNFRSSHLPLTQYDHALDTNSLNPGDQIFEKMTSGMYLGEILRRVLLRVAEEAGIFGDEVPPKLKSPFVLRTPDMSAMHHDASSDLRVVGDKLKDILEISNTSLKTRRLVIELCNIVATRGARLAAAGVLGILKKMGRDTPRQGGLEKTVVAMDGGLYEHYTEYRMCLENTLKELLGDELATSIVFEHSNDGSGIGAALLAASNSMYLEDKS

SEQ ID NO: 149377 - DNA, 1509 bp, Arabidopsis thaliana
  CDS (1)..(1509)
atgggtaaagtggcagttgcaacgacggtagtgtgttcggtggcggtatgtgcggcggcggcgttgatagtacggaggagaatgaaaagcgcagggaaatgggcaagagtgatagagatattgaaagcctttgaagaagattgtgcaacgccaattgccaaattgagacaagtggctgatgctatgactgttgagatgcatgctggtcttgcttctgaaggtggcagcaagcttaagatgcttattagctacgttgataatcttccttctggggatgagactggttttttctatgcgttggatctaggcggaacaaacttccgtgttatgcgtgtgcttcttggtgggaagcacgaccgtgttgttaaacgagaattcaaagaagaatctattcctcctcatttgatgaccgggaagtcacatgaattattcgattttatcgttgatgttcttgccaagtttgtcgctacagaaggcgaggactttcatctcccacctggtagacaacgggaactaggttttactttctcatttccggttaagcagctatctttatcctctggcactctcatcaactggacgaagggcttttccattgacgatacagttgataaagatgttgttggagaacttgttaaagctatggaaagagttgggctggacatgcttgtcgcagcgcttgttaatgataccattggaacacttgcgggtggtagatacactaacccggatgtcgttgtcgcagttattttgggcaccggcacaaatgcagcctatgtcgaacgtgcacatgcaattcccaaatggcatggtttgctacccaaatcaggagaaatggtgatcaacatggaatggggaaacttcaggtcatcacatcttccattgacagagtacgaccactctctagatgtcgatagtttgaatcctggtgaacagattcttgagaaaatcatttccggaatgtatctgggagaaatcttgcgtagagttcttctgaagatggctgaagaagctgccttctttggcgatatcgtcccacctaagctgaaaataccattcatcataaggaccccgaacatgtctgctatgcacagtgatacttccccggatttgaaggttgtaggaagcaagttaaaagacatattggaggtccagactagttctctgaagatgaggaaagttgtgatcagcctatgtaacatcattgcaagccgaggagctcgtttatctgctgcggggatctatggaatcctcaagaaaataggaagagacgcaacaaaagatggagaagctcagaaatctgtgatagcgatggacggtgggctattcgagcattacactcagttcagtgagtcgatgaagagttcattgaaagagttgcttggagatgaagtttcagagagtgttgaagtgatactgtcgaatgatggttcaggtgttggagctgcattacttgctgcttctcactctcagtatctcgaacttgaagatgactctgaaacaagttaa

SEQ ID NO: 149378 - protein, 502 aa, Arabidopsis thaliana
MGKVAVATTVVCSVAVCAAAALIVRRRMKSAGKWARVIEILKAFEEDCATPIAKLRQVADAMTVEMHAGLASEGGSKLKMLISYVDNLPSGDETGFFYALDLGGTNFRVMRVLLGGKHDRVVKREFKEESIPPHLMTGKSHELFDFIVDVLAKFVATEGEDFHLPPGRQRELGFTFSFPVKQLSLSSGTLINWTKGFSIDDTVDKDVVGELVKAMERVGLDMLVAALVNDTIGTLAGGRYTNPDVVVAVILGTGTNAAYVERAHAIPKWHGLLPKSGEMVINMEWGNFRSSHLPLTEYDHSLDVDSLNPGEQILEKIISGMYLGEILRRVLLKMAEEAAFFGDIVPPKLKIPFIIRTPNMSAMHSDTSPDLKVVGSKLKDILEVQTSSLKMRKVVISLCNIIASRGARLSAAGIYGILKKIGRDATKDGEAQKSVIAMDGGLFEHYTQFSESMKSSLKELLGDEVSESVEVILSNDGSGVGAALLAASHSQYLELEDDSETS

SEQ ID NO: 149379 - DNA, 1461 bp, Drosophila melanogaster
  CDS (1)..(1461)
atgagaaagtcaactagacttttaactcattctctattcggccctgtatttaaaattttgtttcataacaaaacagtttgtggaggctgtaataggaaaatgccgagcctggtgaacacggaaattgaagccgcggtcaagggcttcctgatcgaccaggagaagatgaccgaggtggtggagcgcatgaccaaggagataaagatgggcctggccaaggacacgcatgcacgagcggtgatcaagtgcttcgtcagccatgtgcaagatctgcccactggcaaggagcggggaaagtatttggccctggatctgggtggctctaatttcagggtgcttctggtgaacctgattagcaactcggacgtggaaaccatgtcgaagggctataattttcctcaaactctgatgtccggatcgggaaaggcgcttttcgacttccttgccgaatgcctgtcggagttttgtcactcccatggcctggagaatgaatcactggctctgggcttcaccttctcgtttccgctccagcagcagggactctccaagggtatccttgtggcctggaccaaaggattcagctgcgaaggcgtggtgggcaagaatgtggtgagtcttctccaggaggcaatcgatcgaaggggcgatctaaagatcaataccgtcgccattctcaacgatacggtgggcactctgatgtcctgcgccttctatcatcccaactgccggattggattgatcgtgggaaccggctccaatgcgtgctatgtggagaaaacagtaaatgccgaatgcttcgaaggataccagaccagtcccaagccatcaatgataatcaactgcgagtggggcgcctttggggacaatggtgttctggagttcgttcgaacttcctacgacaaggcagtcgacaaggtaacacccaatcccggcaagcagacgttcgaaaagtgcatatcgggcatgtatatgggtgaacttgtacgtttggtcatcaccgatatgattgccaagggttttatgttccacggcatcatttccgagaagatccaggagcgatggagcttcaaaaccgcctatatttccgatgttgaaagtgatgcacctggcgagtatcgcaattgcaataaggtccttagcgaattgggcatattgggctgccaggaacccgacaaagaggccctgcgatacatctgcgaggcggtgtcctccaggtctgccaagctatgtgcctgcggcctggtcaccattatcaacaagatgaacatcaacgaggtggccatcggcatagacggtagcgtgtatcgcttccatcccaagtaccacgacatgctccagtaccacatgaagaagctcctcaagccgggcgtcaagtttgagctggttgtttcggaggacggatccggaagaggagcggctctcgtggcggccaccgcagtccaggccaaaagcaagctctaa

SEQ ID NO: 149380 - protein, 486 aa, Drosophila melanogaster
MRKSTRLLTHSLFGPVFKILFHNKTVCGGCNRKMPSLVNTEIEAAVKGFLIDQEKMTEVVERMTKEIKMGLAKDTHARAVIKCFVSHVQDLPTGKERGKYLALDLGGSNFRVLLVNLISNSDVETMSKGYNFPQTLMSGSGKALFDFLAECLSEFCHSHGLENESLALGFTFSFPLQQQGLSKGILVAWTKGFSCEGVVGKNVVSLLQEAIDRRGDLKINTVAILNDTVGTLMSCAFYHPNCRIGLIVGTGSNACYVEKTVNAECFEGYQTSPKPSMIINCEWGAFGDNGVLEFVRTSYDKAVDKVTPNPGKQTFEKCISGMYMGELVRLVITDMIAKGFMFHGIISEKIQERWSFKTAYISDVESDAPGEYRNCNKVLSELGILGCQEPDKEALRYICEAVSSRSAKLCACGLVTIINKMNINEVAIGIDGSVYRFHPKYHDMLQYHMKKLLKPGVKFELVVSEDGSGRGAALVAATAVQAKSKL

SEQ ID NO: 149381 - DNA, 1485 bp, Oryza sativa
  CDS (1)..(1485)
atgaggaaggcggcggcggcggcggtcgcggcagcggcggcggtcggcgtggcgctgctggtgcgccggcagctgcgggaggcgaagcggtggggccgggccgacgcggtgctgcgggagctggaggagcggtgcgcggcgccgccggggcggctgcggcaggtggcggacgcgatggccgtcgagatgcacgccgggctcgcctccgagggcgggagcaaactcaagatgatcatcagctacgtcgacgccctcccttccggggaagagaagggggtgttttatgcgcttgaccttggaggtacaaatttccgtgttttacgggttcaattaggtggcaaggaagggagagttatcaagcaagaacatgacgagatttcaattcctccgcatctgatgactggtggttcaaatgaactatttgattttattgcttcttctttagcaaaatttgttgcttcagagggtgaagactttcatcttgctgaggggaggcagagagaacttggctttacgttctctttcccagtaaagcaaacttcaattgcatctggcactcttattaattggactaagggtttttcgattgatgaaacggttggtgaagatgttgtgactgaattaaccaaggctcttgaacgccaggggcttgatatgaaagtcacagcattgataaatgatactatagggacattggctggtgggagatatgatgataatgatgtcattgctgctgttatactgggaacaggtactaatgcagcatacgtggaacgtgccaatgcaattcctaaatggcatgacctcctgccgaagtcaggagatatggtaataaatatggaatgggggaacttcaggtcatcccatcttcctttgactgaatttgatcaagcattagatgctgaaagtttgaatcctggtgaacaggtttacgaaaagttgatctctggcatgtatttgggagaaattgttcgtagagtcctattaaagatggctgaagaagcttctctttttggtgatgaagtaccaccaaaactcaagattccatttattatcaggactccatacatgtcaatgatgcactgcgacagatcacctgatctcagaacagttggagcgaaactgaaagatatcctgggggtccaaaacacctcccttaaaacaagaaggcttgtggtggatgtctgcgacatcgttgcgaaacgcgccgctcaccttgctgctgcagggatacacgggatcctgaagaagcttgggcgcgacgtccccaacaccgacaagcagaggacggtgatcgccgtcgacggtgggctctacgagcactacaccatcttcgccgagtgcgtggagagcaccctgagggacatgcttggggaggatgtgtcctccaccattgtcatcaagctcgccaaggacgggtcaggcattggcgctgctctccttgctgcggctcattctcaataccgtgaggctgaggagctctag

SEQ ID NO: 149382 - protein, 494 aa, Oryza sativa
MRKAAAAAVAAAAAVGVALLVRRQLREAKRWGRADAVLRELEERCAAPPGRLRQVADAMAVEMHAGLASEGGSKLKMIISYVDALPSGEEKGVFYALDLGGTNFRVLRVQLGGKEGRVIKQEHDEISIPPHLMTGGSNELFDFIASSLAKFVASEGEDFHLAEGRQRELGFTFSFPVKQTSIASGTLINWTKGFSIDETVGEDVVTELTKALERQGLDMKVTALINDTIGTLAGGRYDDNDVIAAVILGTGTNAAYVERANAIPKWHDLLPKSGDMVINMEWGNFRSSHLPLTEFDQALDAESLNPGEQVYEKLISGMYLGEIVRRVLLKMAEEASLFGDEVPPKLKIPFIIRTPYMSMMHCDRSPDLRTVGAKLKDILGVQNTSLKTRRLVVDVCDIVAKRAAHLAAAGIHGILKKLGRDVPNTDKQRTVIAVDGGLYEHYTIFAECVESTLRDMLGEDVSSTIVIKLAKDGSGIGAALLAAAHSQYREAEEL

SEQ ID NO: 149383 - DNA, 1368 bp, Schizosaccharomyces pombe
  CDS (1)..(1368)
atggaggctaattttcaacaagctgttaaaaagttagtcaatgactttgaataccctaccgagtccttgagagaggccgttaaggagtttgacgaattacgtcaaaagggtttacaaaagaatggtgaggtgcttgctatggctcctgcctttatctctacccttcccaccggcgctgaaactggtgacttcttggcccttgactttggtggtaccaacttgcgtgtttgttggatccaacttctcggtgacggcaagtatgagatgaagcacagcaagtccgtcttgccccgtgaatgcgttcgtaacgagtctgttaagcccatcattgactttatgagtgaccatgttgagcttttcatcaaggagcacttcccttccaagtttggctgccctgaggaggaataccttcctatgggtttcaccttttcttatcccgccaaccaagtttccatcaccgagagctacttgcttcgttggaccaagggtcttaacattcctgaggccatcaacaaggactttgcccaatttttgactgaaggtttcaaggctcgtaaccttcctattagaatcgaggctgtcatcaacgataccgtcggtactctcgttacccgtgcttatacttcaaaggagagcgacacctttatgggtatcattttcggaaccggtaccaacggtgcttacgtcgagcaaatgaaccaaattcccaagcttgctggcaagtgtactggtgatcatatgcttatcaacatggaatggggagcaactgatttctcttgccttcactccactcgttatgatttacttcttgatcatgatactcccaatgctggtcgtcaaatctttgagaagcgcgttggtggtatgtatctcggtgagcttttccgccgtgccttattccacttgatcaaggtttacaacttcaacgaaggtattttccctccttccattactgatgcttggtctttggaaacttctgttctttccagaatgatggttgaacgttctgctgagaatgttcgtaacgttcttagtacattcaagttccgtttccgcagcgacgaagaggctttgtacctttgggatgctgctcatgcaattggccgtcgtgctgctcgtatgtctgccgttcccattgcttctttgtatctttctaccggccgcgctggtaagaagagtgatgttggtgttgatggttctttagtcgaacactatcctcactttgttgacatgctccgtgaagccttgcgtgagcttatcggtgataacgaaaaattgatttccattggtattgccaaggatggcagtggtattggtgccgctctttgcgccctccaagctgttaaggaaaagaaaggcttggcctaa

SEQ ID NO: 149384 - protein, 455 aa, Schizosaccharomyces pombe
MEANFQQAVKKLVNDFEYPTESLREAVKEFDELRQKGLQKNGEVLAMAPAFISTLPTGAETGDFLALDFGGTNLRVCWIQLLGDGKYEMKHSKSVLPRECVRNESVKPIIDFMSDHVELFIKEHFPSKFGCPEEEYLPMGFTFSYPANQVSITESYLLRWTKGLNIPEAINKDFAQFLTEGFKARNLPIRIEAVINDTVGTLVTRAYTSKESDTFMGIIFGTGTNGAYVEQMNQIPKLAGKCTGDHMLINMEWGATDFSCLHSTRYDLLLDHDTPNAGRQIFEKRVGGMYLGELFRRALFHLIKVYNFNEGIFPPSITDAWSLETSVLSRMMVERSAENVRNVLSTFKFRFRSDEEALYLWDAAHAIGRRAARMSAVPIASLYLSTGRAGKKSDVGVDGSLVEHYPHFVDMLREALRELIGDNEKLISIGIAKDGSGIGAALCALQAVKEKKGLA

SEQ ID NO: 149385 - DNA, 1874 bp, Solanum tuberosum
  CDS (64)..(1554)
ttcggcacgagatcaatcccaattccccttctctatcattttttccttaatcggatagtaaggatgaagaaggcgacggtgggtgcggtggtcgtaggtacagcggcggcggtagctgtggcggcgctcatcatgcgccaccgcatgggtaaatcgagcaaatgggcacgtgccagggcaattctgaaggaattcgaggagaaatgtgccaccccagatggcaagctgaagcaagtggctgatgccatgacggtggagatgcacgccggactcgcctctgaaggcggcagcaagctcaagatgcttattagctatgtcgataatctccctactggcgatgaaggaggagtcttttatgcattggatcttggtggaacaaattttcgagtattgcgggtgcaattggggggaaaagatggtggcattatccatcaagaatttgcggaggcatcaattcctccaaatttgatggttggaacttcagaagcactttttgactatattgcggcagaacttgcaaaattcgtagctgaagaaggagaagagtttcatccacctcctggtaggcagagagaattaggcttcaccttctcgttcccaataatgcaaacttcaatcaattctggaactcttatcaggtggacgaaaggtttctccattgatgacacggttggcaaagatgttgttgcagaactgacaaaagcaatgcaaaaacgagaaattgatatgagggtctcagcgcttgtgaatgatactgttggaacattggctggtggtagattcaccaataaggatgtatccattgctgtgatattaggtactgggaccaatgcagcatatgtggaacgggctcaggcaattcccaaatggcacggtcctctgcctaaatctggagaaatggtgatcaatatggaatggggtaactttaggtcctcccaccttcccttgacagagtacgatcatgctatggataccaatagtttaaatcctggtgaacagatatttgagaagatatgttctggcatgtacttgggagaaattttacgcagagttctacttagaatggctgaagaagctggcatttttggcgaggaagttcctccaaaactcaagaattcattcatattgaggacacctgaaatgtctgctatgcatcatgacacatcctctgatttgagagtggttggcgacaagttgaaggatatcttagagatctccaattcctccttgaagacaaggagattagttgttgagctgtgtaatattgttgcaacacgtggcgccagacttgcagcagctgggatcttgggcattatcaaaaagatgggaaaggatacacccagggaaagtggtccagaaaagattgtcgtagccatggatggcggattgtatgaacattatacagaatacagtaagtgcttggagaacactttggttgaattgcttggaaaggaaatggccacaagtattgttttcaagcacgcgaatgatggttctggcattggcgcggcactccttgcggcctctaactccgtgtatgttgaagacaagtgagagtgatcaaaatgatatttagctagaggaaactccatttaccttctatattatgttttttctctagccttttctttttggattctctctcctttttggttcttcttacaattatttccagaattttccagtacttgtacttggttttctaggatattattcctgggaatgccaacatatttcttctggaaaagggtgcaaagaaaatatatatgaaacgcagcactgcttattctcccctttggtctttagtttccaactgcaattaaattttgtagggttgaataaaatggtgtacttttcaaaaaaaaaaaaaaaaa

SEQ ID NO: 149386 - protein, 496 aa, Solanum tuberosum
MKKATVGAVVVGTAAAVAVAALIMRHRMGKSSKWARARAILKEFEEKCATPDGKLKQVADAMTVEMHAGLASEGGSKLKMLISYVDNLPTGDEGGVFYALDLGGTNFRVLRVQLGGKDGGIIHQEFAEASIPPNLMVGTSEALFDYIAAELAKFVAEEGEEFHPPPGRQRELGFTFSFPIMQTSINSGTLIRWTKGFSIDDTVGKDVVAELTKAMQKREIDMRVSALVNDTVGTLAGGRFTNKDVSIAVILGTGTNAAYVERAQAIPKWHGPLPKSGEMVINMEWGNFRSSHLPLTEYDHAMDTNSLNPGEQIFEKICSGMYLGEILRRVLLRMAEEAGIFGEEVPPKLKNSFILRTPEMSAMHHDTSSDLRVVGDKLKDILEISNSSLKTRRLVVELCNIVATRGARLAAAGILGIIKKMGKDTPRESGPEKIVVAMDGGLYEHYTEYSKCLENTLVELLGKEMATSIVFKHANDGSGIGAALLAASNSVYVEDK

SEQ ID NO: 149387 - DNA, 2300 bp, Nicotiana tabacum
  CDS (317)..(1816)
gtgaattgctacattattacggcaactatgaatatgaaagtaaggaacagtcggtagttagctaaccataccttccaacgcaacaataacggcgtacaacagtagtatagtaatattcatcgtttaaatccttacatatatttcatcattaatttattcaaatctaactgttcgcttaccatcattacgatataaaaaagaaaatttatatagtgttaaagattcacaactgtataaactctctgtttcagcatcaccatttattgtctcttctttttttctccgtcacacgttccttttgatctcactgttaattatgtcggtcaccgttagctcgccggccggccgatccttccatatttcacgatcaccttacaaaaagatctccaagccacgtgtcattatcgctgccgtccgatctggtgttagtttagcggtagcaccaatattgactaagttgcagaaagactgtgcaactccacttcctgttttgcgccacgtggctgatgccatggccgttgatatgcgggctggacttgccgtcgatggtggcagtgatctgaagatgatccttagttatattgacactttaccaactgggaatgagaaaggtttgttctatgcattggaccttggtggtacaaatttccgagtgttaagagtgcagttaggtggtaaagaagagcgcgtaatcgccactgagtttgagcaagtctctatacctcaagaattgatgtttgcaacctctgaggagttgttcgatttcatagcttctgagctaggaaaattttcacaaagtgaaggcggtaagtttgagatgcaacaaggaaggactagagaaataggattcacattttctttcccagtgaagcagacttcagttaaatctggcatcctaatcaagtggacaaagggttttgcagtctctggaactgcaggaaaagatgtggttgcttgtttaaatgaagccatggaaaggcagggattgggaatgcaagtctcggccctggtcaatgacactgtagcaacacttgctggagcgagatactgggacaatgatgtcatggttgctgtcattcttgggactggaaccaatgcttgctacgtagaacgtgtggatgctattcctaaactgccacaaaggatgtccaactctccagaaacaattgtgaatactgaatggggagcattttcaaatggccttcctttaactgagtttgatagagaaatggatgccgagagcattaaccctggtgagcagatttttgagaaaacaatctctggtatgtaccttggagaaattgtaagacgggtgctggtcaaaatggccaaggttggcggcttatttggcggtggctatgttccagaaaagttagtcactccatttgtgctgaggacaccggatatatgtgcaatgcagcaggatacatccagagatcttgaagctgttgagtctgtcctctatgatatagctggggtaaaatctgatctaagtgcaaggaaaacagtcgtagacatttgcgatactattgcaaatcgaggggggcgtctagctggtgcaggaattgttgggattctccagaaaatggaagaggattcaaaaggcgtaatcttcggtaagagaacagttgtagcaatggatggaggtttatatgagcactatcctcagtacagagaatacctccaagaagctgtcacagaacttcttggatcagaaatttctaaaaatgtagtgatagagcattcaaaagatggatctggaattggagctgcattattagctgctgcaaactcaaagtatgaacatgattattaggaaaatggtaattttcatgtctaaaaatgctggtagagcatttgtaattttgtttttgcaatttagaatgtattaagaaggattgatcattggatttctcattctttaagggctcgtttggtacgagggataagagataattacatccgggattaaatttgagataagtttatcccacgtttggttgggataaaatcgcggtataactaatcccgggattagttattccgggattgtagtgttatttttatccctatgagatggtgggataactaatcctaagataattaattctgggataatctgtttcccaaccaaacgatccttaagaagtggcttgttgtattttatgccatttttgtattaccataatgcagcagtgaagtatttatgtgctaaaagcagatgtatcagtaaatatagaatatcttgtttgcttataaattgttaaataagcatatttctgtggtatttgaggcggccg

SEQ ID NO: 149388 - protein, 499 aa, Nicotiana tabacum
MSVTVSSPAGRSFHISRSPYKKISKPRVIIAAVRSGVSLAVAPILTKLQKDCATPLPVLRHVADAMAVDMRAGLAVDGGSDLKMILSYIDTLPTGNEKGLFYALDLGGTNFRVLRVQLGGKEERVIATEFEQVSIPQELMFATSEELFDFIASELGKFSQSEGGKFEMQQGRTREIGFTFSFPVKQTSVKSGILIKWTKGFAVSGTAGKDVVACLNEAMERQGLGMQVSALVNDTVATLAGARYWDNDVMVAVILGTGTNACYVERVDAIPKLPQRMSNSPETIVNTEWGAFSNGLPLTEFDREMDAESINPGEQIFEKTISGMYLGEIVRRVLVKMAKVGGLFGGGYVPEKLVTPFVLRTPDICAMQQDTSRDLEAVESVLYDIAGVKSDLSARKTVVDICDTIANRGGRLAGAGIVGILQKMEEDSKGVIFGKRTVVAMDGGLYEHYPQYREYLQEAVTELLGSEISKNVVIEHSKDGSGIGAALLAAANSKYEHDY

SEQ ID NO: 149389 - DNA, 1528 bp, Arabidopsis thaliana
  CDS (1)..(1497)
atggggaaagtggcggttgcgtttgcggcggttgctgttgttgcggcttgttctgttgccgcggtgatggttgggaggaggatgaagagtcggaggaaatggaggactgttgttgagattttgaaagagttggaggatgattgtgatactccggttgggaggttgaggcaagtggttgatgctatggccgtggagatgcacgctggtttggcttctgaaggtggctctaagcttaaaatgctcctcactttcgtcgatgatttgcccactgggagggagaaaggtacttattatgcacttcaccttggaggcacttattttaggattttaagggttcttctgggtgatcaaaggtcttatctagatgttcaagatgttgaacgacacccaataccttcacatttgatgaatagcaccagcgaggttcttttcaactttctcgccttttccttggaaaggtttattgaaaaggaggaaaacgggtccgattcacaaggtgttagaagggaacttgcatttacgttctcattccctgtcaagcatacttctatttcttcaggagttctaattaaatggaccaaaggttttgagattagtgaaatggttgggcaagatatagctgaatgtctacaaggagctctgaacagaagaggcctagatatgcatgttgcggctcttgtgaatgatactgttggagccttgtcgcttggatattatcacgatccagatacggttgttgcggttgtatttggaacaggtagtaatgcatgttacttggaaagaaccgatgccataatcaagtgtcagggtctgcttacaacttctggaagcatggtggtaaatatggagtggggaaatttttggtcctctcatttgcctagaacttcgtatgacattgacttggatgcagagagttcaaatgcaaatgatatgggatttgagaagatgatatcaggaatgtatctgggtgacattgttcgtagagtaattctccgcatgtcagaagattctgatatctttggacccatctcgcccgtgttatctgagccttacgttctaagaacaaattcagtctcagccatacatgaagatgacacacctgagttacaagaagtagcaagaatcttgaaagacataggggtatcagatgtaccactgaaggtgagaaaactagtggtgaaaatatgcgatgtggttacacgaagagcagggaggcttgcagcagcaggaatagcaggaatcttgaagaagataggccgagatggaagcgggggaatcacgagcgggagaagcagaagtgaaatccaaatgcagaaaagaacagttgttgcggtagaaggaggtttgtacatgaattacaccatgtttagggaatacatggaagaagctctcgtagagatactaggagaagaagtgagtcaatacgtggtggttaaagccatggaagatggttctagcattggctctgctctcctcgttgcctctttacagtcatgaatcatcatcgtcgtcgttcgtattaaatggt

SEQ ID NO: 149390 - protein, 498 aa, Arabidopsis thaliana
MGKVAVAFAAVAVVAACSVAAVMVGRRMKSRRKWRTVVEILKELEDDCDTPVGRLRQVVDAMAVEMHAGLASEGGSKLKMLLTFVDDLPTGREKGTYYALHLGGTYFRILRVLLGDQRSYLDVQDVERHPIPSHLMNSTSEVLFNFLAFSLERFIEKEENGSDSQGVRRELAFTFSFPVKHTSISSGVLIKWTKGFEISEMVGQDIAECLQGALNRRGLDMHVAALVNDTVGALSLGYYHDPDTVVAVVFGTGSNACYLERTDAIIKCQGLLTTSGSMVVNMEWGNFWSSHLPRTSYDIDLDAESSNANDMGFEKMISGMYLGDIVRRVILRMSEDSDIFGPISPVLSEPYVLRTNSVSAIHEDDTPELQEVARILKDIGVSDVPLKVRKLVVKICDVVTRRAGRLAAAGIAGILKKIGRDGSGGITSGRSRSEIQMQKRTVVAVEGGLYMNYTMFREYMEEALVEILGEEVSQYVVVKAMEDGSSIGSALLVASLQS

SEQ ID NO: 149391 - DNA, 1692 bp, Oryza sativa
  CDS (119)..(1621)
tgggattcgtgggtgggtttgggagggagcggctgcggggcgggcgggggggatggcgtgatcgcccgcgcgctctggaggggaggggggagggagagggggaggggtggaggaggagatggggagggtggggctcggcgtggcggtggggtgcgcggcggtgacctgcgcgatcgccgcggcgctcgtggcgcgcagggcgtcggcgcgggcgcggtggcggcgggcggtggcgctgctgcgggagttcgaggaggggtgtgccacgccgcccgcgaggctgcgccaggtcgtggacgccatggtcgtcgagatgcacgccggcctcgcgtccgatggcggcagcaagctcaagatgctgctcaccttcgtcgacgcgctccccagcgggagtgaagaaggtgtatattattctattgatcttggaggaacaaacttcagagtcttgagggtacaagttggtgcgggatctgtgatcgtcaaccaaaaggttgaacagcaacccatccctgaggaactgaccaaaggcactactgagggtttattcaactttgttgccctggcactaaagaattttcttgaaggagaagatgaccaagatggaaaaatggcacttggttttacattttctttccctgttagacaaatttcagtgtcttcagggtcattaattaggtggacaaaaggattttccatcagagacacggttggcagagatgttgctcagtgcttaaatgaagcgcttgccaattgtgggctaaatgtgcgggtcactgcattggtgaatgatacagtggggacattagctctagggcattactatgatgaagacacagtggctgctgtgataattgggtctggcaccaacgcttgctacattgaacgcactgatgcaattatcaagtgccagggtcttctaacgaactctggaggcatggtagtaaacatggagtgggggaatttctggtcatcacatttgccaaggacgccatatgacatcttgctggatgatgaaacacacaatcgcaatgatcagggctttgagaaaatgatatcaggaatgtatcttggggaaattgcaagattggtatttcatagaatggcccaggaatcagatgtttttggtgatgctgctgatagtctatccaaccctttcattttgagcacaccgtttctggccgcaattcgcgaggacgattcaccagatctgagcgaagtcagaaggatacttcgagaacatctgaagattcccgatgctcctctgaaaactcgacggctggtcgtgaaagtctgcgacattgtgactcgcagagccgcccgtctagccgctgcaggcatcgtggggatactgaagaagctggggagggatgggagcggcgcggcgtcgagcgggagaggtagagggcagccgaggaggacggtggtggcgatcgagggcgggctgtaccagggttacccggtgttcagggagtacctggacgaggccctggtggagatcctgggggaggaggtggcgcggaacgtgacgctgagggtgacggaggatgggtcgggggtcggggctgccctcctcgccgccgtacattcgtcgaatagacagcaacaaggaggtcccatatagtgagagagacaatgaagatacagctagcccctcttgttcaaatgtaaaaaagggacattgtttgatatcta

SEQ ID NO: 149392 - protein, 500 aa, Oryza sativa
MGRVGLGVAVGCAAVTCAIAAALVARRASARARWRRAVALLREFEEGCATPPARLRQVVDAMVVEMHAGLASDGGSKLKMLLTFVDALPSGSEEGVYYSIDLGGTNFRVLRVQVGAGSVIVNQKVEQQPIPEELTKGTTEGLFNFVALALKNFLEGEDDQDGKMALGFTFSFPVRQISVSSGSLIRWTKGFSIRDTVGRDVAQCLNEALANCGLNVRVTALVNDTVGTLALGHYYDEDTVAAVIIGSGTNACYIERTDAIIKCQGLLTNSGGMVVNMEWGNFWSSHLPRTPYDILLDDETHNRNDQGFEKMISGMYLGEIARLVFHRMAQESDVFGDAADSLSNPFILSTPFLAAIREDDSPDLSEVRRILREHLKIPDAPLKTRRLVVKVCDIVTRRAARLAAAGIVGILKKLGRDGSGAASSGRGRGQPRRTVVAIEGGLYQGYPVFREYLDEALVEILGEEVARNVTLRVTEDGSGVGAALLAAVHSSNRQQQGGPI

SEQ ID NO: 149393 - DNA, 2039 bp, Arabidopsis thaliana
  CDS (424)..(1932)
gcgtccttcttctgactcttaccaaaattttatcaatctctccctcgccgcgccttttcgccggaaggacataacttttaccgggatttgttgtctacaagggaacctcgagcgcaaggctgtttaatcggaagaatctggagtcacggagaagcaaaaatgaacaaaaagagagaccctttatgctgagacggtttaattttgtatctgtggttatagaaaggaatcgtttgcgatgaaatggagccttatagggttattctgatcggtggttgaagcgttgtcatttgcatttcgtgtcattctggttatagactctgtttcaattgcttctcgtcgtaaaggcgtttgcttttgtgagtaatttatctcgattcttctgaaagacgtagaaagagagaaggttgtgtatagatattggaaatggggaaggttttggtgatgttgacggcagctgcggctgtggtggcttgttcagtggcgactgtgatggtgagaaggaggatgaaagggaggaggaaatggaggagggtggtgggtttacttaaggatttggaggaagcttgtgagacgcctttaggaaggttgaggcagatggttgatgccatagctgtggagatgcaagctggtttggtttctgaaggagggtcaaagcttaaaatgttgctcacttttgttgatgatcttcccaatgggagcgagacaggaacctattatgcacttcatcttggaggctcctactttaggataataaaggttcatctaggtggtcaaagatcatctcttgaagttcaagatgttgaacgacattccataccaacatctttgatgaatagcactagcgaggttctcttcgactttctcgcatcatccttgcagaggtttattgaaaaagaagggaacgatttcagtttgtcacaacctttaaaaagggaacttgcgtttactttttctttcccagtcaagcagacatccatctcatcaggagttctaattaaatggaccaaaggttttgcaattagtgaaatggctggggaagacattgctgaatgtctacaaggagcgttgaacaagagagggctagatattcgcgttgcagctcttgtgaatgatactgttggggctttatcctttggacattttcatgacccagacacaattgctgctgttgtctttggaacaggtagtaatgcatgttaccttgaacgaactgatgccataatcaagtgtcaaaatccacgcacgacttctggaagcatggtggtcaatatggagtggggaaacttttggtcatctcgtctgccaagaacttcatatgaccttgagttggatgcagagagtatgaattcaaatgacatgggctttgagaagatgataggagggatgtatctgggcgacattgtccgcagagtaattcttcgaatgtcacaagagtccgacatctttggacctatctcatccattttatccacgcctttcgttctgagaacaaattctgtctcagcaatgcatgaagatgacacatccgagttacaagaagtagcacgaatcttgaaagatttaggggtgtcagaggtaccaatgaaggtgaggaaacttgtagtgaagatctgcgatgtagtgacacgcagagcagctaggctagcagcagcaggaattgcaggaatcttgaagaaggtagggagagatgggagcggaggaggaaggagaagcgataagcagataatgagaagaacagtggtggcagttgaaggaggtctgtatttgaactacaggatgttcagagaatatatggacgaagctctgagagatatactgggagaagatgtggctcaacacgtagtggtgaaggccatggaagatggttccagcattggctctgcattgttgctggcttcgtcacaaagtgttcaaacaataccatccgtatgaataatttgtgtacatatttacaatgtatatagccaattgttttagaagcatgtaggtttgtgtaaatattgtaggcactttttagtttcttctactcatgattaagt

SEQ ID NO: 149394 - protein, 502 aa, Arabidopsis thaliana
MGKVLVMLTAAAAVVACSVATVMVRRRMKGRRKWRRVVGLLKDLEEACETPLGRLRQMVDAIAVEMQAGLVSEGGSKLKMLLTFVDDLPNGSETGTYYALHLGGSYFRIIKVHLGGQRSSLEVQDVERHSIPTSLMNSTSEVLFDFLASSLQRFIEKEGNDFSLSQPLKRELAFTFSFPVKQTSISSGVLIKWTKGFAISEMAGEDIAECLQGALNKRGLDIRVAALVNDTVGALSFGHFHDPDTIAAVVFGTGSNACYLERTDAIIKCQNPRTTSGSMVVNMEWGNFWSSRLPRTSYDLELDAESMNSNDMGFEKMIGGMYLGDIVRRVILRMSQESDIFGPISSILSTPFVLRTNSVSAMHEDDTSELQEVARILKDLGVSEVPMKVRKLVVKICDVVTRRAARLAAAGIAGILKKVGRDGSGGGRRSDKQIMRRTVVAVEGGLYLNYRMFREYMDEALRDILGEDVAQHVVVKAMEDGSSIGSALLLASSQSVQTIPSV

SEQ ID NO: 149395 - DNA, 1889 bp, Oryza sativa
  CDS (51)..(1580)
atcactcctccccctaccaacgatcagctcagcttcagcttctcctcggcatgtccgccgccgccgccatcgcgtcgccgatcccggcggcgatcgccgtcgtgcagcagcagaggcgggggaggagccgcggcggcggctccggcgctgccgccgtccgctgctccgcggtggccccgacgtccgcgatcgcgcccatccttgccgacctgaggctgcggtgcgccgccccgctccccgtgctgcggcgcgtggcggacgccatggcctccgggatgcgcgccgggctggccgacgacggcgccggcgagctcaagatgatccccagccacgtctactcactccccactgggaatgaaacaggactgttttatgctctggaccttggaggcaccaactttagagtgctgagggtacaattgggaggaaaagataagcgcattatagataccgagtttgagcaagtctcgatcccaagagaaatcatgcatggtataaccgaggatttgtttgatttcatcgcgagtggcctgtcgagatttgtagcaacggagggtgataagtttcatttgccacaagggagaaagagagagttaggcttcacattctcctttccggtgaatcagacttctattgattctggcattctgatcaagtggacaaaaggttttgctgtctctggaactgctgggaaagatgttgttgcttgtctgaatgctgcaatggagaggcaaggccttgatatgcgtgtctctgccttggtaaatgatactgtgggaaccttagctggagcacgttattgggacgatgacgtaatggtcgcggtgattttgggcactggcaccaatgcatgctacattcaacgaactgaagctattccaaaattgcaacaccttaagcttgaaacaggaaacacgattattaacactgagtggggagctttctcagatggacttccattgactgaatttgacagagaaatggatgatgagagcataaatcctggtgaacagatattcgagaagacgatttccgggatgtatctaggtgaaattgtccgtagggtgctggtcaagatggctgaagtatctgatctctttggtcattccttccccaagaaacttgctgaaccatttgttctaaggacaccacatctatgcgctatgcaacaagacacctctgacaatcttggagaagttgagtccatcttgagtgatgtcatcggcgtgtcccaagcttctctgctggcacggagagtcactgtagaagtctccgactgcatcatcaggagaggaggccggttggccggggcaggaatcgtagggatccttgagaagatggagaatgactccagagggcacattttcggacgaagaacagtggtcgcgatggacggtggtctatatgagaagtaccctcagtacaggaggtacatgaaggaggctgtggctgagctactgggacccgagcgatcgaatcgtatcgccatcgagcacacgaaagacggatcagggatcggcgctgcgctgttggcagctgcaaactcaaagtatgctgctgctcaaatctctacaaggtgatcgcaattgttataattgttgagttactgggccgaattaattctctacaaggtgatctcaattgttatcattgttgagctactgggacctgaacaatccaagcatatcatcatatggtggcctcttatctgaagtatggaggggcttcatatatgctattcttctgtactactagtctactatactatataacgcatttgaggaaaagaaacaccagaaatttatcaacttatgttttgtataattcatcaacttatgtgtttgtatagttacagttcaccagaaattcatcagcttatgtatttgtat

SEQ ID NO: 149396 - protein, 509 aa, Oryza sativa
MSAAAAIASPIPAAIAVVQQQRRGRSRGGGSGAAAVRCSAVAPTSAIAPILADLRLRCAAPLPVLRRVADAMASGMRAGLADDGAGELKMIPSHVYSLPTGNETGLFYALDLGGTNFRVLRVQLGGKDKRIIDTEFEQVSIPREIMHGITEDLFDFIASGLSRFVATEGDKFHLPQGRKRELGFTFSFPVNQTSIDSGILIKWTKGFAVSGTAGKDVVACLNAAMERQGLDMRVSALVNDTVGTLAGARYWDDDVMVAVILGTGTNACYIQRTEAIPKLQHLKLETGNTIINTEWGAFSDGLPLTEFDREMDDESINPGEQIFEKTISGMYLGEIVRRVLVKMAEVSDLFGHSFPKKLAEPFVLRTPHLCAMQQDTSDNLGEVESILSDVIGVSQASLLARRVTVEVSDCIIRRGGRLAGAGIVGILEKMENDSRGHIFGRRTVVAMDGGLYEKYPQYRRYMKEAVAELLGPERSNRIAIEHTKDGSGIGAALLAAANSKYAAAQISTR

SEQ ID NO: 149397 - DNA, 1524 bp, Oryza sativa
  CDS (1)..(1524)
atggggaaggcggcggcggtggggacggcggtggtggtggccgcggcggtcggggtggcggtggtgctggcgcggaggcggaggaggagggacctggagctggtggagggagccgcggcggagaggaagaggaaggtggcggcggtgatcgaggacgtggagcacgcgctgtcgaccccgacggcgctgctgcggggcatctcggacgccatggtcaccgagatggagcgaggcctgcgcggggacagccacgccatggttaagatgctcatcacctacgtcgacaacctccccaccggaaatgaacaggggttgttttatgcattggatcttggaggaaccaacttccgcgtcctgcgagtccaactcggtggcaaggagaaacgtgtcgtccaacaacagtacgaggaagtctcaattccaccacatctgatggttggaacttccatggaactgtttgattttattgcttctgcattgtcaaaatttgttgatactgaaggtgatgatttccacctcccagaagggagacagagagagctgggcttcaccttttccttcccagtgagccagacatcaatatcgtcaggaacgctcatcaagtggacaaagggtttctccatcaatgacgcggttggcgaagatgttgtatctgagttgggcaaggccatggagaggcagggattagatatgaaaattgcagcattggttaatgacactgtcggcacattggctggtgggaggtatgcggataacagtgttgttgctgctataatattgggcactggtacaaatgcagcatatgttgagaatgctaatgcaattcctaaatggaccggtttactgcctaggtccggaaatatggtaatcaacacagaatgggggagctttaaatcagataagcttcctctttcagaattcgataaagcaatggattttgaaagcttgaatcctggagagcagatatatgaaaagttgatttctggcatgtatcttggagagatagtgcgaagaatcttgctgaagcttgctcatgatgcagctttgtttggggatgttgttccatctaagctagagcaaccgtttgtactaaggacaccggatatgtcagccatgcatcatgactcgtcacatgaccttaaaactgttggagctaagctaaaggatatcgtcggggtcccagatacttccctggaagtaagatacattaccagtcacatttgtgacatagttgcagagcgtgctgcacgcttggctgctgctggcatatatggggtcctaaagaagctaggtcgggacaagatgccaaaagacggcagtaagatgcctaggactgtcattgccttggatggtgggctctatgaacattacaagaagttcagcagttgcttagaatcaactctaacagaccttcttggggatgatgtctcgtcttcggtggttaccaagctggccaacgatggttctggcattggagctgctcttctcgcagcctcgcactcccagtatgccgagatcgactag

SEQ ID NO: 149398 - protein, 507 aa, Oryza sativa
MGKAAAVGTAVVVAAAVGVAVVLARRRRRRDLELVEGAAAERKRKVAAVIEDVEHALSTPTALLRGISDAMVTEMERGLRGDSHAMVKMLITYVDNLPTGNEQGLFYALDLGGTNFRVLRVQLGGKEKRVVQQQYEEVSIPPHLMVGTSMELFDFIASALSKFVDTEGDDFHLPEGRQRELGFTFSFPVSQTSISSGTLIKWTKGFSINDAVGEDVVSELGKAMERQGLDMKIAALVNDTVGTLAGGRYADNSVVAAIILGTGTNAAYVENANAIPKWTGLLPRSGNMVINTEWGSFKSDKLPLSEFDKAMDFESLNPGEQIYEKLISGMYLGEIVRRILLKLAHDAALFGDVVPSKLEQPFVLRTPDMSAMHHDSSHDLKTVGAKLKDIVGVPDTSLEVRYITSHICDIVAERAARLAAAGIYGVLKKLGRDKMPKDGSKMPRTVIALDGGLYEHYKKFSSCLESTLTDLLGDDVSSSVVTKLANDGSGIGAALLAASHSQYAEID

SEQ ID NO: 149399 - DNA, 1955 bp, Oryza sativa
  CDS (34)..(1554)
ttggggggagcgtgaagaagcgcgcgcgcggctatggggaaggggacggtagtggggacggcggtggtggtgtgcgctgcagcggccgcggcggttggggtggcggtggtggtgtcgcggaggaggaggagcaagcgggaggcggaggaggagcggcggaggagggccgccgctgtgatcgaggaggtggagcagaggttctcgacgcccacggcgctgctgcgcggcatcgcggacgccatggtggaggagatggagcgcggcctccgcgccgaccctcacgccccgctcaagatgctcatcagctacgtcgacaacctccccaccggggatgagcacggactgttctatgctctcgatcttgggggcaccaatttccgtgttatacgtgttcagcttggaggaagggaaaagcgtgttgttagtcaacagtacgaagaggttgccattccacctcacctgatggttgggacttctatggaactgtttgacttcattgcggctgagttggaaagttttgtcaagaccgagggagaggatttccacttgccagagggcaggcagagagagttaggcttcaccttttctttcccagtgcaccaaacatcaatatcatcaggcactcttattaagtggacaaagggattttccatcaatggcacggtgggggaagatgttgtggctgaattgagcagggctatggaaaggcaagggcttgatatgaaagttacagctcttgttaatgacactgtaggcacattggctggcggaagatatgttgataatgacgttgctgctgctgtaatattaggcactggcacaaacgcagcctacgtggagcatgcaaatgcaattccaaaatggactggattactacctagatcaggaaatatggtgattaacatggaatggggaaacttcaagtcagaaaggcttcctcgttcagattacgataatgccttggactttgaaagtttaaacccaggcgagcagatatatgaaaagatgatttccggcatgtatcttggagagattgtgcgcagaatcttgcttaagcttgctcatgatgcttccttgtttggagatgttgttccaacaaagctggagcagcgctttatactgaggacgccggacatgtcagcgatgcatcatgatacctcacatgatctgaaacacctgggagctaagctgaaggatatcctgggggtcgctgatacttccctggaagcacgatacatcacccttcatgtctgcgacctcgttgcagagagaggtgcacgcttagctgctgctggtatatatggcattctaaagaagctgggcagggacagagtgccaagtgacggtagtcaaaagcagaggactgtcattgctctggatggtggtctctatgagcattacaagaagttcagaacctgcctagaagcaacgcttgcagacctgcttggagaggaggctgcctcatcagttgttgtcaagttggcaaacgatggctctggcatcggagctgcacttcttgcagcatctcactcccagtatgctagcgtcgagtagtaacaggagctcatgggactgagctcccagtgtagcttgttttcctcccattttccccgtttctttccaatgggagttcgtttccctcctgcgattcgcatctccttttgctattctgcagtcacataaacgagtgcctgtgcagcgggatgtagctagtatggcgccaaagagtttgcagttatcacatgaacaagcatttgcaactgcagggaagtgaaaacgggggcttgaatgatgccgttcttttcctgcaaattattttccccctttccctgtaagtttgtattgtgatgcgatgtcgcaaaccaatcacagcggtttcgcgtgtagccttttgtcattcagatttcagaataaagagggggacataatttcacttttcgaaaaaaaaaaaaaaa

SEQ ID NO: 149400 - protein, 506 aa, Oryza sativa
MGKGTVVGTAVVVCAAAAAAVGVAVVVSRRRRSKREAEEERRRRAAAVIEEVEQRFSTPTALLRGIADAMVEEMERGLRADPHAPLKMLISYVDNLPTGDEHGLFYALDLGGTNFRVIRVQLGGREKRVVSQQYEEVAIPPHLMVGTSMELFDFIAAELESFVKTEGEDFHLPEGRQRELGFTFSFPVHQTSISSGTLIKWTKGFSINGTVGEDVVAELSRAMERQGLDMKVTALVNDTVGTLAGGRYVDNDVAAAVILGTGTNAAYVEHANAIPKWTGLLPRSGNMVINMEWGNFKSERLPRSDYDNALDFESLNPGEQIYEKMISGMYLGEIVRRILLKLAHDASLFGDVVPTKLEQRFILRTPDMSAMHHDTSHDLKHLGAKLKDILGVADTSLEARYITLHVCDLVAERGARLAAAGIYGILKKLGRDRVPSDGSQKQRTVIALDGGLYEHYKKFRTCLEATLADLLGEEAASSVVVKLANDGSGIGAALLAASHSQYASVE

SEQ ID NO: 149401 - DNA, 1652 bp, Oryza sativa
  CDS (83)..(1474)
gaccaccaatctcgcatttcttggatcttctcgtcttcctcactcctcgatcgatccatcgattggttgctggtcggagaccatggtggcggcggcggtggcggcggcggagcaggtggtggcggcgctgcgggaggagtgcgcgacgccggcggcgcggctggatggggtggcggcggcgatggccggcgagatggcggcggggttggcggaggagggcggcagcaagatcaagatgatcgtttcctacgtcgacaacctccccaatgggaccgaagagggcttgttctacgcgctggatcttgggggaacaaacttccgagtcctgcgtgtgcagcttgctggaaaggagaaacgggtcgtgaagcgcgagtcgagggaggtctcgatccctccccatctcatgtccggcaactcctcggagctgtttggcttcatcgcttccgcgttagccaagttcgtcgctgatgaaggacataatgccgtgttcaacgacaggcaaagggaactggggttcaccttctctttccctgtgcggcaaacatcgattgcgtctgggactcttatcaagtggaccaaggcgttttctattgatgatgctgtaggtgaagatgtggtggccgaattgcagatggccatggagaagcaaggtctggacatgcgcgtttccgcattgatcaatgacactgttgggacattggcggcaggcagctactacgacgaagatattgtcgtcggtgtgatcttaggcactggctcaaacgccgcatatcttgagaaggcaaatgctatccctaagttggaaggcgagttaccaaaatcaggaaacatggttattaatacagaatggggtaacttctcctcatcctgtcttccaataacagaatatgatgaagcactagataaagagagcttaaaccctggagagcagatcttcgagaaattgatttcaggaatgtatctaggtgaaatcgtaaggagagtgcttcttaaaatatctttgcagtcttcaatttttggcaatctagatcagaccaagctcaaaacccgctttattctgaggactcctgatatttccgtgatgcatcatgatggaacacctgatctcagaattgtggctgaaaaacttgcagataacctgaagatcacagacacatccttagaaacaaggaagatggttgtcgaaatctgtgacatcgtcacccgaagatcagcccggctggctgctgctgggatcgtagggatcctcaggaagatcggcagaggcgtcccaggcgacaagcgaaagtcggtcatcgccatcgatggcggtctatatgaacattacaccgaattccggcagtgcctggagaccacgctgacggagttgctcggagaagaggcgtcgaagtcggtggctgtcaagcttgcaaacgacgggtctggccttggagctgccctgattgcagctgctcattctcagtacctgaattgattccccatagacagagttccaacttttattagtgactcagtgctgttgttatagtttatagaatgtggtgaagttctgtatgtttcgaaggagcctgatggactctacaaacaaaattttcagaaatgaaatcgaagccaaatgtgttggtggtgttgcaaaaaaaaaaaaaaaaaaa

SEQ ID NO: 149402 - protein, 463 aa, Oryza sativa
MVAAAVAAAEQVVAALREECATPAARLDGVAAAMAGEMAAGLAEEGGSKIKMIVSYVDNLPNGTEEGLFYALDLGGTNFRVLRVQLAGKEKRVVKRESREVSIPPHLMSGNSSELFGFIASALAKFVADEGHNAVFNDRQRELGFTFSFPVRQTSIASGTLIKWTKAFSIDDAVGEDVVAELQMAMEKQGLDMRVSALINDTVGTLAAGSYYDEDIVVGVILGTGSNAAYLEKANAIPKLEGELPKSGNMVINTEWGNFSSSCLPITEYDEALDKESLNPGEQIFEKLISGMYLGEIVRRVLLKISLQSSIFGNLDQTKLKTRFILRTPDISVMHHDGTPDLRIVAEKLADNLKITDTSLETRKMVVEICDIVTRRSARLAAAGIVGILRKIGRGVPGDKRKSVIAIDGGLYEHYTEFRQCLETTLTELLGEEASKSVAVKLANDGSGLGAALIAAAHSQYLN

SEQ ID NO: 149403 - DNA, 1622 bp, Oryza sativa
  CDS (90)..(1466)
gtttgtctgaaccgaactccaaaggtctcgcctttcttgctctgaagcttttctttagcttttcgattcgcctgtcggggaccgggatcatggcggcggtggaggcggagaaggtggtggcggagctgcgggagaggtgcgcgacgccggcgtcgctgctgcgggatgtggcggcggcgatggccggcgagatgggcgccggcctggagaaggagggtgggagcagggtcaagatgctgctctcctacgtcgacaagctccccactgggagagaggatggattgttctatggattggacctaggaggaacaaacttccgggtgctcaaggttcatcttggtggcagcaagaagcatgtcgtcaactctgaatccagggaagtcagcatcccaccacacctgatgtcagggacctcctcggaattgtttggtttcattgctggggaattaggcaagtttgttgctgaagaggaggagggtactgacatgccaaacggcaagaagaaagagctaggattcaccttctcttttcctgtgaggcaacgatctgtggcatcgggtacccttgtcaagtggacaaaggcgttttccattgatgatgcagtaggtgaagatgtggtggctgaactacaaacggctatggtgaaacaaggtctggacatgcatgtagctgcattgattaatgatgctgttggaacattggctggagcaagatactacgatgaagatgttgtcgcaggtgtgatatttggtactggcacaaatgctgcatatgttgagaaggcaaatgctataccaaaatgggaaggggagttgcccaattcaggggatatggtcatcaatatggaatggggtaatttctattcatcgcatcttccagttactgaatacgatgaagcattagacaaggaaagcttaaaccctggagagcagatatatgagaagttaacatcaggaatgtatttaggtgaaatcgtaagaagagtgctgcttaaactgtccttgcagtctggaattttcggttctatagataactccaagctcaaaacttgtttccatctgcggactccgcacatttctgcaatgcaccatgatgaaacacctgacctaaagatagtggctgaaaaattgcatcaaatcctagagattacacatacatccttagagataaggaaaatggttgtcgaaatatgcgatatcgtggcaaggagggcagctcggctggctgctgctggtgttgcagggatcctcatgaagcttggaagaaatggcggcatcaacaatcagcgctcggtcatcgccattgatggaggtttgttcgaacactacaccaaattcagggaatgtttggagagcacgttgggtgagttgctgggagaggaggcttccaagtcggtagccgtcaagcacgcgaacgacgggtcagggataggggctgcccttattgcagcctctcaatctcgatgaaaatttgctagataaatagtagtatatgccgtccatttttgctctggagtgaaaaaaattattgaaaaaacctagctttgttgtatgtgctgcttgggcatggtggaactggaagcagtctgtaaccaaaatgaggcttgatatactgtcgccctg

SEQ ID NO: 149404 - protein, 458 aa, Oryza sativa
MAAVEAEKVVAELRERCATPASLLRDVAAAMAGEMGAGLEKEGGSRVKMLLSYVDKLPTGREDGLFYGLDLGGTNFRVLKVHLGGSKKHVVNSESREVSIPPHLMSGTSSELFGFIAGELGKFVAEEEEGTDMPNGKKKELGFTFSFPVRQRSVASGTLVKWTKAFSIDDAVGEDVVAELQTAMVKQGLDMHVAALINDAVGTLAGARYYDEDVVAGVIFGTGTNAAYVEKANAIPKWEGELPNSGDMVINMEWGNFYSSHLPVTEYDEALDKESLNPGEQIYEKLTSGMYLGEIVRRVLLKLSLQSGIFGSIDNSKLKTCFHLRTPHISAMHHDETPDLKIVAEKLHQILEITHTSLEIRKMVVEICDIVARRAARLAAAGVAGILMKLGRNGGINNQRSVIAIDGGLFEHYTKFRECLESTLGELLGEEASKSVAVKHANDGSGIGAALIAASQSR

SEQ ID NO: 149405 - DNA, 1844 bp, Oryza sativa
  CDS (64)..(1572)
gaactcgcgttgacctattgactcgtgtcgccgtctcgccgagcgaacccgacgtcgtcggcgatgaggaaggcggcggcgctggcgtccgcggcgatggccgcagcagcagtagcggtagtctccacggtgttgcaccagaggcaacgtcgggcggcgaagcggtcagagcgcgcggaggccgtgctgctgcgggacctgcaggagcggtgcgccgcgccggtggagctgctgcggcaggtggcggacgcgatggccgcggagatgcgcgcggggctcgccgccgagggcgggagcgacctccagatgctcgtcacctacgttgactccctcccctccgggggtgagaaagggatgttttatgcacttgaccttggaggaacaaatttccgtgttttacgagttcaattaggaggcaaagaacgtcgaattatcaagcaagactcagaagggatatccattccacaacatttaatgtccagcagttcacatgagttgtttgattttgttgctgtggctttagcaaaatttgttgcctctgaaggtgaagactgccatcttcctgagggtacccaaagagaactaggttttacattctcctttccagtgaaacaaaaatcattggcatctggcactcttatcaagtggacgaagagttttgcaattgatgaaatggtcggcaaggatgttgtggctgaattaaacatggctatcagaagtcaaggacttgatatgaaagtcacagcattggttaatgatacagtagggacattagctgctgggagatatgtgaatcatgatactattgctgctgttatactgggaacaggtagtaatgcagcgtacatagatcatgcagatgcaattccaaaatggcatggatccctgcccaagtctggaaatatggtaataaacatggaatggggtaactttaagtcctcacatcttccacttactgaatttgatcaagagttggatgcagaaagtttgaaccctggcaaacaggtttacgagaaatcgatttctggtatgtatatgggggaacttgttcgaagaatcttactaaagatggctcaagaaactcgcatttttggtgataatatacctccaaaacttgagagaccatacatcttaaggacacttgacatgctgatcatgcatcatgatacatcatctgatctcagaacagttgccaacaagttgaaagaagtcttggggatcgaatatacctctttcacgacgaggaaactggttttggatgtttgtgaggccattgcgacacgcggtgcacggcttgctgctgctgggatatatggcattatccaaaagcttggtcagcattctgacagccccagtacgagaaggtccgtgattgctgtggatggaggggtctataaatactacactttcttcagccagtgcatggagagcactctgagtgacatgcttgggcaggagctggccccctctgttatgatcaagcatgtcaatgatggctcaggcgttggggcagctctcctggcagcctcttattctcaataccaccaggctgaatctgcagatagttcataatattctaaaaaaaagaagctgaatctgcagatagctcttaatattctgaaaaaactgtcaaaaaataatattctgaaaaaaaactgtgtattaaggtgataaacaataggttttggagcaattttttttttaagataatggattaaaccggcctctacatccaaacgagattctagagcaatagcagctatacagtttgcctaagggctaaatatcttgtattttgcaaatgtcaattgtacatgaactctatctgcaatatctgttcagtg

SEQ ID NO: 149406 - protein, 502 aa, Oryza sativa
MRKAAALASAAMAAAAVAVVSTVLHQRQRRAAKRSERAEAVLLRDLQERCAAPVELLRQVADAMAAEMRAGLAAEGGSDLQMLVTYVDSLPSGGEKGMFYALDLGGTNFRVLRVQLGGKERRIIKQDSEGISIPQHLMSSSSHELFDFVAVALAKFVASEGEDCHLPEGTQRELGFTFSFPVKQKSLASGTLIKWTKSFAIDEMVGKDVVAELNMAIRSQGLDMKVTALVNDTVGTLAAGRYVNHDTIAAVILGTGSNAAYIDHADAIPKWHGSLPKSGNMVINMEWGNFKSSHLPLTEFDQELDAESLNPGKQVYEKSISGMYMGELVRRILLKMAQETRIFGDNIPPKLERPYILRTLDMLIMHHDTSSDLRTVANKLKEVLGIEYTSFTTRKLVLDVCEAIATRGARLAAAGIYGIIQKLGQHSDSPSTRRSVIAVDGGVYKYYTFFSQCMESTLSDMLGQELAPSVMIKHVNDGSGVGAALLAASYSQYHQAESADSS

SEQ ID NO: 149407 - DNA, 2514 bp, Saccharomyces cerevisiae
  CDS (732)..(2192)
acgccatagaagagcaatttccgtcctctactcatgtgattcgaactatgaaacaaagaaaaggcaagagtaaatagcgtgatacctattacgtattacgtatacatcctattattcttgaaaaaaagtgcggggctccagagctccacattggtgaccccagagtatactgctctttctaatgccttttccatcatgttactacgagttttctgaacctcctcgcacattggtacctagaaatggctatcatgccggacggcaccgggcaataaaccggacggcacaaaaaaatcgaagaaaagagatttctttttctcgcgggcagtttttccggtcgatcgacattcgtacggtactttctctgtttcagggacatcatgttgtaaaagaaaaagacagtttaggtaatcgttcttttctttctgaaaaattttccacgacgacgacgacgaccacgaaacacctttgattgcgagatccacgaaattacctcctgctgaggcgagcttgcaaatatcgtgtccaattccgtgatgtctctttgttgcaccttcgccactgtcttatctacaaaactataaaaaagagtaatcctaccccatatctaaaaaaaattccttaacttttataacttaacttcaaagtttcttaatattttttcgctttttctttgaaaaggttgtaggaatataattctccacacataataagtacgctaattaaataaaatggttcatttaggtccaaaaaaaccacaagccagaaagggttccatggccgatgtgccaaaggaattgatgcaacaaattgagaattttgaaaaaattttcactgttccaactgaaactttacaagccgttaccaagcacttcatttccgaattggaaaagggtttgtccaagaagggtggtaacattccaatgattccaggttgggttatggatttcccaactggtaaggaatccggtgatttcttggccattgatttgggtggtaccaacttgagagttgtcttagtcaagttgggcggtgaccgtacctttgacaccactcaatctaagtacagattaccagatgctatgagaactactcaaaatccagacgaattgtgggaatttattgccgactctttgaaagcttttattgatgagcaattcccacaaggtatctctgagccaattccattgggtttcaccttttctttcccagcttctcaaaacaaaatcaatgaaggtatcttgcaaagatggactaaaggttttgatattccaaacattgaaaaccacgatgttgttccaatgttgcaaaagcaaatcactaagaggaatatcccaattgaagttgttgctttgataaacgacactaccggtactttggttgcttcttactacactgacccagaaactaagatgggtgttatcttcggtactggtgtcaatggtgcttactacgatgtttgttccgatatcgaaaagctacaaggaaaactatctgatgacattccaccatctgctccaatggccatcaactgtgaatacggttccttcgataatgaacatgtcgttttgccaagaactaaatacgatatcaccattgatgaagaatctccaagaccaggccaacaaacctttgaaaaaatgtcttctggttactacttaggtgaaattttgcgtttggccttgatggacatgtacaaacaaggtttcatcttcaagaaccaagacttgtctaagttcgacaagcctttcgtcatggacacttcttacccagccagaatcgaggaagatccattcgagaacctagaagataccgatgacttgttccaaaatgagttcggtatcaacactactgttcaagaacgtaaattgatcagacgtttatctgaattgattggtgctagagctgctagattgtccgtttgtggtattgctgctatctgtcaaaagagaggttacaagaccggtcacatcgctgcagacggttccgtttacaacagatacccaggtttcaaagaaaaggctgccaatgctttgaaggacatttacggctggactcaaacctcactagacgactacccaatcaagattgttcctgctgaagatggttccggtgctggtgccgctgttattgctgctttggcccaaaaaagaattgctgaaggtaagtccgttggtatcatcggtgcttaaacttaatttgtaaattaagtttgaacaacaagaaggtgccctttttctacttatgtgaacatgttttctatgatctttttttttcttacttttacaactgtgatattgtataaactttgttagaaattcacgggatttattcgtgacgataaatatttatatagacaaagaatatgacgatttatgaaatctacatgattttagtttcttttaacaattgctcgtttttttctcttgcttaattttaaatttttttggtagtaaaagatgcttatataaggatttcgtatttattgttcaagtatttaaagactagatgtct

SEQ ID NO: 149408 - protein, 486 aa, Saccharomyces cerevisiae
MVHLGPKKPQARKGSMADVPKELMQQIENFEKIFTVPTETLQAVTKHFISELEKGLSKKGGNIPMIPGWVMDFPTGKESGDFLAIDLGGTNLRVVLVKLGGDRTFDTTQSKYRLPDAMRTTQNPDELWEFIADSLKAFIDEQFPQGISEPIPLGFTFSFPASQNKINEGILQRWTKGFDIPNIENHDVVPMLQKQITKRNIPIEVVALINDTTGTLVASYYTDPETKMGVIFGTGVNGAYYDVCSDIEKLQGKLSDDIPPSAPMAINCEYGSFDNEHVVLPRTKYDITIDEESPRPGQQTFEKMSSGYYLGEILRLALMDMYKQGFIFKNQDLSKFDKPFVMDTSYPARIEEDPFENLEDTDDLFQNEFGINTTVQERKLIRRLSELIGARAARLSVCGIAAICQKRGYKTGHIAADGSVYNRYPGFKEKAANALKDIYGWTQTSLDDYPIKIVPAEDGSGAGAAVIAALAQKRIAEGKSVGIIGA

SEQ ID NO: 149409 - DNA, 1488 bp, Aspergillus niger
  CDS (1)..(1488)
atgtcatctgctctccttgacgaggctgcgcgcattgcccgccagttcgactaccccgctgctgaggtgcagcgtggagtgacggaatacattcgcgagatcgatgaaggtttgtccaaggagcacacgaccctcagtcagatccctacctatgtcacggcagtgcccaatggcacggaaaagggattgtacctggcagtagatctcggcggcaccaacttccgcgtgtgttcgatcgatctacatggagacactaccttctcccttacccagtccaagatcatgattcctcgtgagaccatggcgtccggtacggccaaggatctcttcttgttcttggcccgccaaatcgaatcgttcctgcgcattcaccacaacgaccacttcgaagctcacctgcgacgccgcaatgagaagaatggcaactgtgaagaggacctgttcgacttgggtttcaccttcagtttccccgtgcgtcagctgggcattaacaagggtaccctgattcgctggacgaagggcttcaacattcccgatgcggtgggtaaggatgtctgcgcattgctgcagaacgccatcgatgatctgggactcccagtgcgcgtggctgccttggtcaacgacactgtcggaaccctgatggctcgttcatacacctctcctggagagacgggcacgttcctgggtgctatctttggcacgggcaccaatggcgcctatgttgagaagctggaccggatcactaagctgcagaccattgaacactccgagtacgacaagaccaccggtgagatgattatcaacgccgagtggggcagcttcgacaaccacctgagtgtactgccgaacaccatctacgaccagcagctcgatgccgacagcaacaaccccggcattcaaatgttcgagaagcgtgtctcgggtatgttcctgggtgagatcttgcgccgcgtcatgctggacatgcagcgcaacgagtccctgggcttcctccgggctggcggcgcttccaccgtttctgttccccaggagtcttccctgtaccgtcagtggggtattgacaccagcttgttgagtctggtcgaggccgacaagactgagaatatggagcagatcaaggtcgctttgaaggatcacctcaagatcgaacgccccaccaccgacgactgcaaggccatccagaccgttgttcatgccattggcaagcgtgctgctcgtctgagtgccgtcccgctggctgccatcctcctctctactggcaagctgcagaaggatgacctcgtagacattggtgtggatggcagtctggtcgagttctaccccaacttcgaaggctacatgcgtgatgccctccgcgaagtgcccgaggttggagaagccggcaacaagaagattcgcattggtatctccaaggatggcagcggcgtgggtgctgctctaatcgccctcgttgctagcaaggaggagacccgcagaaagtcgcaatag

SEQ ID NO: 149410 - protein, 495 aa, Aspergillus niger
MSSALLDEAARIARQFDYPAAEVQRGVTEYIREIDEGLSKEHTTLSQIPTYVTAVPNGTEKGLYLAVDLGGTNFRVCSIDLHGDTTFSLTQSKIMIPRETMASGTAKDLFLFLARQIESFLRIHHNDHFEAHLRRRNEKNGNCEEDLFDLGFTFSFPVRQLGINKGTLIRWTKGFNIPDAVGKDVCALLQNAIDDLGLPVRVAALVNDTVGTLMARSYTSPGETGTFLGAIFGTGTNGAYVEKLDRITKLQTIEHSEYDKTTGEMIINAEWGSFDNHLSVLPNTIYDQQLDADSNNPGIQMFEKRVSGMFLGEILRRVMLDMQRNESLGFLRAGGASTVSVPQESSLYRQWGIDTSLLSLVEADKTENMEQIKVALKDHLKIERPTTDDCKAIQTVVHAIGKRAARLSAVPLAAILLSTGKLQKDDLVDIGVDGSLVEFYPNFEGYMRDALREVPEVGEAGNKKIRIGISKDGSGVGAALIALVASKEETRRKSQ

SEQ ID NO: 149411 - DNA, 1503 bp, Saccharomyces cerevisiae
  CDS (1)..(1503)
atgtcattcgacgacttacacaaagccactgagagagcggtcatccaggccgtggaccagatctgcgacgatttcgaggttacccccgagaagctggacgaattaactgcttacttcatcgaacaaatggaaaaaggtctagctccaccaaaggaaggccacacattggcctcggacaaaggtcttcctatgattccggcgttcgtcaccgggtcacccaacgggacggagcgcggtgttttactagccgccgacctgggtggtaccaatttccgtatatgttctgttaacttgcatggagatcatactttctccatggagcaaatgaagtccaagattcccgatgatttgctagacgatgagaacgtcacatctgacgacctgtttgggtttctagcacgtcgtacactggcctttatgaagaagtatcacccggacgagttggccaagggtaaagacgccaagcccatgaaactggggttcactttctcataccctgtagaccagacctctctaaactccgggacattgatccgttggaccaagggtttccgcatcgcggacaccgtcggaaaggatgtcgtgcaattgtaccaggagcaattaagcgctcagggtatgcctatgatcaaggttgttgcattaaccaacgacaccgtcggaacgtacctatcgcattgctacacgtccgataacacggactcaatgacgtccggagaaatctcggagccggtcatcggatgtattttcggtaccggtaccaatgggtgctatatggaggagatcaacaagatcacgaagttgccacaggagttgcgtgacaagttgataaaggagggtaagacacacatgatcatcaatgtcgaatgggggtccttcgataatgagctcaagcacttgcctactactaagtatgacgtcgtaattgaccagaaactgtcaacgaacccgggatttcacttgtttgaaaaacgtgtctcagggatgttcttgggtgaggtgttgcgtaacattttagtggacttgcactcgcaaggcttgcttttgcaacagtacaggtccaaggaacaacttcctcgccacttgactacacctttccagttgtcatccgaagtgctgtcgcatattgaaattgacgactcgacaggtctacgtgaaacagagttgtcattattacagagtctcagactgcccaccactccaacagagcgtgttcaaattcaaaaattggtgcgcgcgatttctaggagatctgcgtatttagccgccgtgccgcttgccgcgatattgatcaagacaaatgctttgaacaagagatatcatggtgaagtcgagatcggttgtgatggttccgttgtggaatactaccccggtttcagatctatgctgagacacgccttagccttgtcacccttgggtgccgagggtgagaggaaggtgcacttgaagattgccaaggatggttccggagtgggtgccgccttgtgtgcgcttgtagcatga

SEQ ID NO: 149412 - protein, 500 aa, Saccharomyces cerevisiae
MSFDDLHKATERAVIQAVDQICDDFEVTPEKLDELTAYFIEQMEKGLAPPKEGHTLASDKGLPMIPAFVTGSPNGTERGVLLAADLGGTNFRICSVNLHGDHTFSMEQMKSKIPDDLLDDENVTSDDLFGFLARRTLAFMKKYHPDELAKGKDAKPMKLGFTFSYPVDQTSLNSGTLIRWTKGFRIADTVGKDVVQLYQEQLSAQGMPMIKVVALTNDTVGTYLSHCYTSDNTDSMTSGEISEPVIGCIFGTGTNGCYMEEINKITKLPQELRDKLIKEGKTHMIINVEWGSFDNELKHLPTTKYDVVIDQKLSTNPGFHLFEKRVSGMFLGEVLRNILVDLHSQGLLLQQYRSKEQLPRHLTTPFQLSSEVLSHIEIDDSTGLRETELSLLQSLRLPTTPTERVQIQKLVRAISRRSAYLAAVPLAAILIKTNALNKRYHGEVEIGCDGSVVEYYPGFRSMLRHALALSPLGAEGERKVHLKIAKDGSGVGAALCALVA

SEQ ID NO: 149413 - DNA, 1648 bp, Arabidopsis thaliana
  CDS (31)..(1512)
gttcttacaaaacagaaccaaacttcgacaatgtcactcatgttttcttcccctgtcgtcaccccagcactcggatctttcaccttctcatctcgaccacgctccaattacatcgtgatgtccgccgtccgatctaactctgcttcgacgtgtcctatactgaccaagtttcagaaagactgcgccactcctacaccgtacctacgcaacgtagccaacgccattgctgatgacatgcgagatggtctagctgttgaaggaggaggagatctcgagatgatcttgacttttgttgacgctttgccttctgggaatgaggaagggttgttctatgcattggatttaggaggtacaaattttcgggtgcgtagcgtgcaattaggaggaaagaaagagcgagtcttagctaccgaatctgaacaaatatctatttctcaaaagcttatgattggtacaagtgaggagcttttcgggttcattgcttcaaagcttgcaaattttgttgcaaaggagaagccaggtcggtttcttttagaagaagggaggaaaagggagttagggtttaccttttcattccctgtgaagcaaacctctattgattcaggcacattaagcaagtggactaaaggctttaaagtgtctggaatggaaggaaaaaatgtggttgcttgtttaaatgaagctatggaagcacatggactcgatatgcgagtttctgctcttgtaaatgatggagtgggaacattagctggagcaaggtattgggatgaggatgtgatggtcggtgtgattcttggcactgggaccaatgcttgttatgtagaacagaaacatgcaattcctaaactccgaagcaaatcttcttctggaacaacgatcataaacactgagtggggagggttctctaagattcttccgcaaaccatttttgacctagagatggatgagacaagcctgaatcctggtgaacatttatatgagaagatgatctcagggatgtaccttggtgaaattgtaaggagggttttgctccatatgtgtgaaactagtgacttgtttggacacttcgctcctgccaaactctccactcctttggcactcaggaccgagcatctatgcaaaatgcaagaggacaatacagatgatcttcgggatgttggatcaatcctatacgactttttagatgtagaggcgaatatgaatgcaaggaggagagtggtggaagtgtgtgacacagtagtgaaacgcggagggcgtctagcaggagctggtatagtggcaattctggagaagattgaaaaagataccaaaagaatgggttcaggtaaaagaaccgttgtggctatggacggtgcactgtatgagaagtacccacaatatcgacagtatatgcaagacgcactagtcgagcttcttggccataagcttgcaagtcacgttgcgatcaaacataccaaagacgtgtctgggctcggtgctgctcttttggcggccactaactccatttactagtacttggacctctacttcatgagtataggaggacttttggtccatttgtttgtgtacatttatataagatatcatatcaatatcaataagattgtaaagaggagcaacgaactagcagaagattatgtcttggacc

SEQ ID NO: 149414 - protein, 493 aa, Arabidopsis thaliana
MSLMFSSPVVTPALGSFTFSSRPRSNYIVMSAVRSNSASTCPILTKFQKDCATPTPYLRNVANAIADDMRDGLAVEGGGDLEMILTFVDALPSGNEEGLFYALDLGGTNFRVRSVQLGGKKERVLATESEQISISQKLMIGTSEELFGFIASKLANFVAKEKPGRFLLEEGRKRELGFTFSFPVKQTSIDSGTLSKWTKGFKVSGMEGKNVVACLNEAMEAHGLDMRVSALVNDGVGTLAGARYWDEDVMVGVILGTGTNACYVEQKHAIPKLRSKSSSGTTIINTEWGGFSKILPQTIFDLEMDETSLNPGEHLYEKMISGMYLGEIVRRVLLHMCETSDLFGHFAPAKLSTPLALRTEHLCKMQEDNTDDLRDVGSILYDFLDVEANMNARRRVVEVCDTVVKRGGRLAGAGIVAILEKIEKDTKRMGSGKRTVVAMDGALYEKYPQYRQYMQDALVELLGHKLASHVAIKHTKDVSGLGAALLAATNSIY

SEQ ID NO: 149415 - DNA, 1870 bp, Debaryomyces occidentalis
  CDS (186)..(1622)
tgagcccgcgcttcgatatgctgacagtgtccgaatttctttgtgacatcacaccatcaacgaagtagaaccaagtagtaatttcgtatataaatatttaaatttaccaaacatttgtctaaagaaaaattttaattcaattatattaaaatttctaattagatttattacacattaagcacaaaatggttcacttaggtccaaaacctccacaacatagaaaaggatccttcttggatgttcctgaatatttgttgaaggaattgacagaactcgaaggattattaacagtttcaggtgaaacattaaggaagattactgatcactttatttcagaattggaaaaaggtttatctaaacaagggggaaatattcctatgattccaggatgggttatggacttcccaacaggaaaagaaatgggtgattacttggctattgatttaggtggtactaatttgagagttgttttagttaagttaggtggtaacagggactttgacactactcaatccaagttcgcattgccagaaaacatgagaactgccaagtctgaagagttatgggaatttattgctgagtgtttacaaaagttcgtggaagaagaatttcgaaatggtgttctgtcaaatttaccattaggtttcaccttttcatacccagcatctcaaggttctatcaatgaagggtatttgcaaagatggaccaaaggtttcgacattgaaggtgttgagggacacgatgttgttccaatgttacaagctgcaattgaaaaacgtaaggttccaattgaagttgttgcgttaatcaatgacaccacaggtactttagttgcttctatgtacaccgatccagaagctaaaatgggtttattttccggtactggttgtaatggtgcttactacgatgttgtcgataacattccaaaattagaaggaaaggttccagatgacattaaaagctcttccccaatggccatcaactgtgaatacggtgctttcgataatgagcatatcattttgcctagaactaaatacgatatccaaatcgatgaagaatcaccaagaccaggacaacaggctttcgaaaagatgatctctggttactacttaggtgaagttttaagattgattttacttgatttaacctctaaacaattaattttcaaagaccaagatttgtctaaattacaagttccattcattttagatacctcaatcccagctagaattgaagaagatccgtttgaaaacttatctgatgtccaagaattatttcaagaaattttaggtattcaaactacttctccagaaagaaaaatcatccgtcgtctagcggaattgatcggtgaaagatcagccagattatcaatttgtggtattgctgctatttgcaagaagagaggctacaaaaccgctcattgtgccgctgatggttcagtctacaacaaatacccaggtttcaaagaaagagctgctaaaggtttgagagatatctttcaatgggaatctgaagaagatccaattgtcattgtgcctgcagaagatggtttaggtgcaggtgccgctatcattgctgcattgactgaaaaaagattaaaggatggattaccgttggtatgaagaaaactaatgattacgattgaaattctaaaaatgctttcgttcaatttctggatgtcaatttactagctggtttattacttcattgtattaacttttttacttctttatatctaatccttgtaagaatgtttcgacgataaagttttataaaattatcgaatgactttaaatataaatgatttctattttgcatattgatagtagagtacagatatagaaattagcttttaccataagacaagctt

SEQ ID NO: 149416 - protein, 478 aa, Debaryomyces occidentalis
MVHLGPKPPQHRKGSFLDVPEYLLKELTELEGLLTVSGETLRKITDHFISELEKGLSKQGGNIPMIPGWVMDFPTGKEMGDYLAIDLGGTNLRVVLVKLGGNRDFDTTQSKFALPENMRTAKSEELWEFIAECLQKFVEEEFRNGVLSNLPLGFTFSYPASQGSINEGYLQRWTKGFDIEGVEGHDVVPMLQAAIEKRKVPIEVVALINDTTGTLVASMYTDPEAKMGLFSGTGCNGAYYDVVDNIPKLEGKVPDDIKSSSPMAINCEYGAFDNEHIILPRTKYDIQIDEESPRPGQQAFEKMISGYYLGEVLRLILLDLTSKQLIFKDQDLSKLQVPFILDTSIPARIEEDPFENLSDVQELFQEILGIQTTSPERKIIRRLAELIGERSARLSICGIAAICKKRGYKTAHCAADGSVYNKYPGFKERAAKGLRDIFQWESEEDPIVIVPAEDGLGAGAAIIAALTEKRLKDGLPLV

SEQ ID NO: 149417 - DNA, 1458 bp, Kluyveromyces lactis
  CDS (1)..(1458)
atggttcgtttaggtccaaagaagcctccagccagaaaggggtccatggcagatgtgccagctaatttgatggaacaaatccacggtttggaaactttgttcaccgtctcttcagaaaaaatgagaagcattgtcaagcatttcatcagtgaattggacaaaggtttgtccaaaaagggtggtaacattcctatgattccaggttgggttgttgagtatccaactggtaaggaaactggtgatttcttagctcttgatttgggtggtaccaacttgagagttgtgttggttaaattgggtggtaatcatgatttcgacaccactcaaaacaagtacagattaccagaccatttgagaactggtacttctgaacaattgtggtcatttattgcaaagtgtttgaaggaattcgtcgatgaatggtacccagatggtgtttctgaaccattgccattgggtttcactttctcataccctgcatctcaaaagaagatcaattccggtgtgttgcaacgttggaccaagggtttcgatattgaaggtgttgaaggtcacgatgttgttccaatgctacaagaacagattgaaaagctgaatatcccaatcaatgtcgttgcattgatcaacgataccactggtaccttggttgcctctttgtacactgatcctcaaactaagatgggtatcattatcggtactggtgtcaacggtgcttactacgatgttgtttctggtattgagaaattggaaggtttgttgccagaagatatcggtccagattctccaatggcaatcaactgtgaatatggttccttcgataacgaacatttggtgttgccaagaaccaaatacgatgttataatcgatgaagaatctccaagaccaggtcaacaagctttcgaaaagatgacttctggttactatctaggtgaaatcatgcgtctagtactattggacttgtacgacagtggtttcatctttaaggaccaagatatctccaagttgaaagaggcttacgtcatggacaccagttatccatctaagatcgaagatgatccattcgaaaacttggaagacactgacgatctgttcaagactaacttgaacatcgaaactaccgttgttgagagaaagttgattagaaaattagccgaattggtcggaacaagagctgcaagattgactgtttgtggtgtttctgctatctgtgacaagagaggctacaagactgctcacattgcagctgatggttctgtcttcaacagatacccaggttacaaggaaaaggccgctcaagccttgaaggatatctacaactgggatgtcgaaaagatggaagaccacccaatccaattggtggctgctgaagatggttccggtgttggtgctgctatcattgcttgtttgactcaaaagagattggctgccggtaagtctgttggtattaaaggcgaatag

SEQ ID NO: 149418 - protein, 485 aa, Kluyveromyces lactis
MVRLGPKKPPARKGSMADVPANLMEQIHGLETLFTVSSEKMRSIVKHFISELDKGLSKKGGNIPMIPGWVVEYPTGKETGDFLALDLGGTNLRVVLVKLGGNHDFDTTQNKYRLPDHLRTGTSEQLWSFIAKCLKEFVDEWYPDGVSEPLPLGFTFSYPASQKKINSGVLQRWTKGFDIEGVEGHDVVPMLQEQIEKLNIPINVVALINDTTGTLVASLYTDPQTKMGIIIGTGVNGAYYDVVSGIEKLEGLLPEDIGPDSPMAINCEYGSFDNEHLVLPRTKYDVIIDEESPRPGQQAFEKMTSGYYLGEIMRLVLLDLYDSGFIFKDQDISKLKEAYVMDTSYPSKIEDDPFENLEDTDDLFKTNLNIETTVVERKLIRKLAELVGTRAARLTVCGVSAICDKRGYKTAHIAADGSVFNRYPGYKEKAAQALKDIYNWDVEKMEDHPIQLVAAEDGSGVGAAIIACLTQKRLAAGKSVGIKGE

SEQ ID NO: 149419 - DNA, 1497 bp, Brassica napus
  CDS (1)..(1497)
atggggaaggttgcggttgcgtttgcggcggctgcggttttagtgtcttgctccgtggcggcggtgatggtggggaggaggattaagagtcgggcgaaatggagggccgtggtggagattttgaaggagttggaggaagcttgtgatactccggtggggaggctgaggcaagtggtggatgccatggcggtggagatgcacgctgggttggcttctgaaggtggctccaagcttaaaatgcttctcactttcgtccatcatttgcccaatgggacggagaaaggaacttattatgcacttcatcttggaggcacttactttaggattttgagggttcatctgggtggtgaaaggtcttatctagatgttcaagacgttgaacgacaccccataccttcacatttgatggatagcaccagcgaggttcttttcaactttctcgccttttccatggaaaggtttatcgaaaaagaaggaaaggaatctaattcacaaggtgtgaaaagggaactggcatttacgttttcgttccctgtcaagcattcttctatatcttccggagttctaatcaaatggaccaaaggttttgagattagtgaaatggttgggaaagatgtagctgaatgtctacaaggagcgatgaacagaagaggcctagatatccatgttgcagctcttgtgaatgatactgtgggagccctgtcacttggatattatcatgatccagatacagttgttgccgttgtatttggaacaggtagtaatgcatgttacttggaacgcactgatgccataatcaagtctcagggtctgcttaccacttctggaagcatggtagtcaatatggagtggggtaatttttggtcctcacacctgccaagaacttcatatgacattgacttggatgcagagagttcaaatccaaatgatatgggatttgaaaagatgatagcaggattgtatctgggtgacattgttagaagagtaatccgtcacatgtcacaagtctccgacatctttggacccacctcgtccatgttatctgagccttatgttctaagaacaaattcagtttcagccatgcatgaagatgacacacccgagttgcaacaagtagcaagaatcttgaaagacttgggggtatcagatgtaccattgaaggtgagaaaactcgtagtgaagatatgcgacgtggtgacacgaagagcagggaggctagcagcagcgggtattgcaggaatcttgaagaaggtaggtcgagatggtagcggaggaatcacgagcgggagaagcagaagcgaaatgcggatgcagaaaagaacagttgtcgcagtagaaggaggattgtacatgaactacaccatgtttagagaatacatggaagaagctttggtggagatattaggagaagaagtgagccaatacgtggtcgttaaagccatggaagatggttctagcattggctctgcccttctcgttgcctctttacagtcataa

SEQ ID NO: 149420 - protein, 498 aa, Brassica napus
MGKVAVAFAAAAVLVSCSVAAVMVGRRIKSRAKWRAVVEILKELEEACDTPVGRLRQVVDAMAVEMHAGLASEGGSKLKMLLTFVHHLPNGTEKGTYYALHLGGTYFRILRVHLGGERSYLDVQDVERHPIPSHLMDSTSEVLFNFLAFSMERFIEKEGKESNSQGVKRELAFTFSFPVKHSSISSGVLIKWTKGFEISEMVGKDVAECLQGAMNRRGLDIHVAALVNDTVGALSLGYYHDPDTVVAVVFGTGSNACYLERTDAIIKSQGLLTTSGSMVVNMEWGNFWSSHLPRTSYDIDLDAESSNPNDMGFEKMIAGLYLGDIVRRVIRHMSQVSDIFGPTSSMLSEPYVLRTNSVSAMHEDDTPELQQVARILKDLGVSDVPLKVRKLVVKICDVVTRRAGRLAAAGIAGILKKVGRDGSGGITSGRSRSEMRMQKRTVVAVEGGLYMNYTMFREYMEEALVEILGEEVSQYVVVKAMEDGSSIGSALLVASLQS

SEQ ID NO: 149421 - DNA, 1503 bp, Brassica napus
  CDS (1)..(1503)
atgggtaaagtggctgtgggtgcgacggtcgtgtgcgctgcggcggtctgcgcggcgtctgtgtacatcgtgcggcggcggatgcaaagctccgggaaatgggcgcgtgtgatagagatcctgagggttctcgaggaggattgcgcgacgcctatcgcgaaactgagacaagtggcggatgcgatgacggttgagatgcacgcgggtctcgcttccgaaggtggaagcaagcttaagatgcttatcagctacgtcgataatcttccctctggggaagaacatggtttcttctatgcgctggacctaggaggaacgaacttccgtgtgatgcgtgtgcttcttggtggcaaagaaggccgtgttgtcaaacaagaagccaaagaagtctctattcctcctcatttgatgaccagcggttcagatgaactgttcaattttatcgctgaggcgcttgcaaatttcgtggctacagaaggagaggactttcatctccctgagggtagacaaagggagctaggtttcactttctcgtttccggttaagcagacttctttgtcttctggcactctcatcaagtggaccaaaggcttttccatcgaagatacagttggacaagatgtggttggtgagcttgttaaagctatggaaagagttgggcttgacatgaacgtcacagcccttgttaatgacacggttggaacacttgctggtggtagatactataaccctgatgtggttgccgctgttatcttaggcactggcacaaacgcagcttatgtcgaacgcgcaaatgccattccaaaatggcacggcttacttcccaaatctggagaaatggtgatcaacatggagtggggaaacttcaggtcatcacatcttcccttgaccgagtacgaccacttgctggatttcgatagtctgaatcctggtgaacagattcttgagaaaatcatttccggtatgtatttgggagagatcttgcgtagagttcttctgaagatggctgaagaggctgctttctttggcgactccatcccacctaagctgaaagtaccattcatcataaggactccaaccatgtctgctatgcacagcgacacttctccggatttgaaggttgttggaagcaagttaaaggacatactggaggtccctactactctgaagatgagaaaagttgtgatcagtctctgtaacatcatagccacccgaggagctcgtctctctgcagctgggatctacggaatcctcaagaaactaggaagagacgcaccgaaagatggagaaacaacgcagaaatctgtgattgccatggacggtggactgttcgagcactacactcagttcagcgagtgtatggagagctcattgaaagagttgcttggagatgaagcatcagagagcgtcgaggtgattcattcgaatgacgggtccggcgttggcgctgcattgctcgctgcctcgcactctcagtacctcgaggacgtctctgaaacaagttaa

SEQ ID NO: 149422 - protein, 500 aa, Brassica napus
MGKVAVGATVVCAAAVCAASVYIVRRRMQSSGKWARVIEILRVLEEDCATPIAKLRQVADAMTVEMHAGLASEGGSKLKMLISYVDNLPSGEEHGFFYALDLGGTNFRVMRVLLGGKEGRVVKQEAKEVSIPPHLMTSGSDELFNFIAEALANFVATEGEDFHLPEGRQRELGFTFSFPVKQTSLSSGTLIKWTKGFSIEDTVGQDVVGELVKAMERVGLDMNVTALVNDTVGTLAGGRYYNPDVVAAVILGTGTNAAYVERANAIPKWHGLLPKSGEMVINMEWGNFRSSHLPLTEYDHLLDFDSLNPGEQILEKIISGMYLGEILRRVLLKMAEEAAFFGDSIPPKLKVPFIIRTPTMSAMHSDTSPDLKVVGSKLKDILEVPTTLKMRKVVISLCNIIATRGARLSAAGIYGILKKLGRDAPKDGETTQKSVIAMDGGLFEHYTQFSECMESSLKELLGDEASESVEVIHSNDGSGVGAALLAASHSQYLEDVSETS

SEQ ID NO: 149423 - DNA, 1497 bp, Brassica napus
  CDS (1)..(1497)
atggggaaggttgcggttgcgtttgcggcggctgcggttttagtgtcttgctccgtggcggcggtgatggtggggaggaggattaagagtcgggcgaaatggagggccgtggtggagattttgaaggagttggaggaagcttgtgatactccggtggggaggctgaggcaagtggtggatgccatggcggtggagatgcacgctgggttggcttctgaaggtggctccaagcttaaaatgcttctcactttcgtccatcatttgcccaatgggacggagaaaggaacttattatgcacttcatcttggaggcacttactttaggattttgagggttcatctgggtggtgaaaggtcttatctagatgttcaagacgttgaacgacaccccataccttcacatttgatggatagcaccagcgaggttcttttcaactttctcgccttttccatggaaaggtttatcgaaaaagaaggaaaggaatctaattcacaaggtgtgaaaagggaactggcatttacgttttcgttccctgtcaagcattcttctatatcttccggagttctaatcaaatggaccaaaggttttgagattagtgaaatggttgggaaagatgtagctgaatgtctacaaggagcgatgaacagaagaggcctagatatccatgttgcagctcttgtgaatgatactgtgggagccctgtcacttggatattatcatgatccagatacagttgttgccgttgtatttggaacaggtagtaatgcatgttacttggaacgaactgatgccataatcaagtctcagggtctgcttaccacttctggaagcatggtagtcaatatggagtggggtaatttttggtcctcacacctgccaagaacttcatatgacattgacttggatgcagagagttcaaatccaaatgatatgggatttgaaaagatgatagcaggattgtatctgggtgacattgttcgaagagtaatccgtcacatgtcacaagtctccgacatctttggacccacctcgtccatgttatctgagccttatgttctaagaacaaattcagtttcagccatgcatgaagatgacacacccgagttgcaacaagtagcaagaatcttgaaagacttgggggtatcagatgtaccattgaaggtgagaaaactcgtagtgaagatatgcgacgtggtgacacgaagagcagggaggctagcagcagcgggtattgcaggaatcttgaagaagataggtcgagatggtagcggaggaatcacgagcgggagaagcagaagcgaaatgcggatgcagaaaagaacagttgttgcagtagaaggaggattgtacatgaactacaccatgtttagagaatacatggaagaagctttggtggagattttaggagaagaagtgagccaatacgtggtcgttaaagccatggaagatggttctagcattggctctgctcttctcgttgcctctttacagtcatga

SEQ ID NO: 149424 - protein, 498 aa, Brassica napus
MGKVAVAFAAAAVLVSCSVAAVMVGRRIKSRAKWRAVVEILKELEEACDTPVGRLRQVVDAMAVEMHAGLASEGGSKLKMLLTFVHHLPNGTEKGTYYALHLGGTYFRILRVHLGGERSYLDVQDVERHPIPSHLMDSTSEVLFNFLAFSMERFIEKEGKESNSQGVKRELAFTFSFPVKHSSISSGVLIKWTKGFEISEMVGKDVAECLQGAMNRRGLDIHVAALVNDTVGALSLGYYHDPDTVVAVVFGTGSNACYLERTDAIIKSQGLLTTSGSMVVNMEWGNFWSSHLPRTSYDIDLDAESSNPNDMGFEKMIAGLYLGDIVRRVIRHMSQVSDIFGPTSSMLSEPYVLRTNSVSAMHEDDTPELQQVARILKDLGVSDVPLKVRKLVVKICDVVTRRAGRLAAAGIAGILKKIGRDGSGGITSGRSRSEMRMQKRTVVAVEGGLYMNYTMFREYMEEALVEILGEEVSQYVVVKAMEDGSSIGSALLVASLQS

SEQ ID NO: 149425 - DNA, 1497 bp, Glycine max
  CDS (1)..(1497)
atggggaaggtcgcggtgggagctgccgttgtctgcgccgccgccgtatgcgctgcggcggcgctggtggtgcgccaccgcatgattagttcccggaagtggagtcgcgccatggcgatactgaaggagtttgaggagaagtgtggcaccccaattgtgaagctaagacaagtggctgatgccatggatgttgagatgcacgcaggtctcgcatctgaaggtggtagcaagctcaatatgttgatcagttttgtcgataatctcccaactggggatgaggaaggcctctattatgcattggatcttggcggcacaaacttccgtgtccttcgtgtacatttaggggggaaagacaaaggtgttatcggccaggagtttgaagaagtttcaattcctccaaatttgatgactggctcttcagaagcattgttcgattttatagcagcagctcttgcaaagtttgttggttcagaacctgaaggttttcatcctccccctggcagacaaagagaactgggttttacattctcattcccagtgaggcaaacatcgattgcatctgggactctaataaagtggactaaaggtttcaatattgaagatgcggttggtgaagatgtggtgggagaactaaccaagtccatggaaaaaattggcctggatatgcgcgttgctgctctagttaatgataccattggaacattagctggaggcagattctacaatcaggatgtcattgctgctgtgattcttggtactgggacaaatgcagcatatgtagaacgagcacatgctattccaaaatggcatgggcttataccaaaatcaggagatatggttataaacatggagtggggtaatttccgatcatcacatcttcctctaacagaatatgatctagctctggatgctcagagcttaaaccctggagaacagatttttgagaaattgatttctggcatgtatttgggggaagttgtaaggagagctttattgaagatggccgaagaagctgacttttttggagatactgttccccccaaattgaaagttcctttcatacttaggacgcctgacatgtcagccatgcaccatgacacaagttctgatctgaaagtggttggaaacaagttaaaggatatattagagatctcaaacacatcccttaaaatgaggaagatcgttgttgaactgtgtgacattgttgctactcgcggagctcggcttgctgctgctggtattttgggcatccttaagaaaataggaagagacacagttaaggttggggagaagcaaaagtcagtgatagcgttggatggggggttgtttgaacactacaccaaatttagagaatgcttggagagtgcactgaaggaattgctgggagatgaggctgctgagaccattgtcattgagcatgctaatgatggctctggcattggtgcagccctcctggcagcttctcactcccaatatttgggagtggaggagtcttaa

SEQ ID NO: 149426 - protein, 498 aa, Glycine max
MGKVAVGAAVVCAAAVCAAAALVVRHRMISSRKWSRAMAILKEFEEKCGTPIVKLRQVADAMDVEMHAGLASEGGSKLNMLISFVDNLPTGDEEGLYYALDLGGTNFRVLRVHLGGKDKGVIGQEFEEVSIPPNLMTGSSEALFDFIAAALAKFVGSEPEGFHPPPGRQRELGFTFSFPVRQTSIASGTLIKWTKGFNIEDAVGEDVVGELTKSMEKIGLDMRVAALVNDTIGTLAGGRFYNQDVIAAVILGTGTNAAYVERAHAIPKWHGLIPKSGDMVINMEWGNFRSSHLPLTEYDLALDAQSLNPGEQIFEKLISGMYLGEVVRRALLKMAEEADFFGDTVPPKLKVPFILRTPDMSAMHHDTSSDLKVVGNKLKDILEISNTSLKMRKIVVELCDIVATRGARLAAAGILGILKKIGRDTVKVGEKQKSVIALDGGLFEHYTKFRECLESALKELLGDEAAETIVIEHANDGSGIGAALLAASHSQYLGVEES

SEQ ID NO: 149427 - DNA, 1503 bp, Glycine max
  CDS (1)..(1503)
atgatgtctgttactgttgctgccgacactacctccgccgccgtaggatcctgtctttcacgatcgcggcggcggtgcttaacggtggctctccgatctaaagtgtcagtcaccccaaccagaatattgacgaaactcaaacacgagtgtgccactcctctgccccttcttcagcaagtggccaataacatgtcttctgacatgcgagctgggcttgctgcagaggctgggcctgggcccgggcttcccatgatacccagctatgttgaaaatcttcccactgggaatgagaaagggttgttttatgccttggatctcggaggaaccaacttccgtgtgctgagggtgcagttgggtggcaaagatgagcgtgtcattgccaccgagtttgatcaagtttccatacctcatcaactcatgtttgctacatctcaggagctgtttgatttcattgcttcggggctagcaaaatttgcgtccaaggaggatggtagatttcatatctcaccgggaaaaaagggagagattggcttcacgttttcatttcctgtgaagcaggcatctattgattctggcatactaatcaagtggaccaagggttttgcagtgtctggaacagcagggagagatgtggtggcttgtctgaacgaggcaatggaaaggcaaggaatagacatgcgagtttctgctctggtgaatgataccgtggcaacgttagctggagcagaatactgggataatgatgtcgtggttgctgtcattttgggtactggaaccaatgcttgctatgttgaacagatcagtgccattcctaagttacagggccatgtctcttcttctgggaaaatgatcattagcactgagtggggtgctttctcaaatggtctccctttaaccaagatcgatagggaaatggatgctgctagcatcaatccgggcgagcagatatttgaaaagacaatctcgggaatgtatctaggcgaaattgttagacgagtgctgctggaaatggctgaagagggtggtctgtttggaaaatctgtcccgcagaaactatctacacctttcatactcgggaccccagatctatgtgccatgcaacaggacagttctggcgatttacatgcagttgggtccctcctctacgataaagcaggggttgaatccaatttaagtgaaagaaaaacagttttagaggtttgtgagacaattgtaaagcgaggtgggagcttagctggtgcaggaatagtggggattctacaaaaaatggaagaggatcagagaggtctcgtctttgggaatgggaagagaagtgttgttgccattgatgggggcttatatgaaaattatcctcaatacagggcttatttgcaagattcagtcacagagctgctaggaacagaaaagtcaaacaatgtggtgatagagcatactaaagatggatctggaataggagctgctctattggctgcttcaaactccatgtacaaccaagacttatag

SEQ ID NO: 149428 - protein, 500 aa, Glycine max
MMSVTVAADTTSAAVGSCLSRSRRRCLTVALRSKVSVTPTRILTKLKHECATPLPLLQQVANNMSSDMRAGLAAEAGPGPGLPMIPSYVENLPTGNEKGLFYALDLGGTNFRVLRVQLGGKDERVIATEFDQVSIPHQLMFATSQELFDFIASGLAKFASKEDGRFHISPGKKGEIGFTFSFPVKQASIDSGILIKWTKGFAVSGTAGRDVVACLNEAMERQGIDMRVSALVNDTVATLAGAEYWDNDVVVAVILGTGTNACYVEQISAIPKLQGHVSSSGKMIISTEWGAFSNGLPLTKIDREMDAASINPGEQIFEKTISGMYLGEIVRRVLLEMAEEGGLFGKSVPQKLSTPFILGTPDLCAMQQDSSGDLHAVGSLLYDKAGVESNLSERKTVLEVCETIVKRGGSLAGAGIVGILQKMEEDQRGLVFGNGKRSVVAIDGGLYENYPQYRAYLQDSVTELLGTEKSNNVVIEHTKDGSGIGAALLAASNSMYNQDL

SEQ ID NO: 149429 - DNA, 1497 bp, Glycine max
  CDS (1)..(1497)
atggggaaggtcgcggtgggagctgcggttgtctgcgccgccgccgcctgcgctacggcggcgctggtggtgcgccaccgcatgatgagctccggaaagtggggtcgcgtggtggctattgtgaaagagtttgaggagcagtgtaggaccccaattgggaagctgagacaggttgctgacgccatggacgttgagatgcacgcgggtcttgcttctgaaggtggcagcaagctcaagatgttgatcacttatgttgataatctcccttctggggatgagaaaggactcttttatgcattagaccttggtggcacaaacttccgaacccttcgcgtgcatttaggtgggaaggagaaaggtgttgtcaaaatagagtctgatgaagtttccattcctcctcatttgatgactggttcttcacaagaattatttgattttatagcatctaaactagcaaaattcgttagttctgagcctgaagagttacaccctccccctggcagacaaagggaattgggttttaccttctcatttccagtgaggcaaacatcaattgcatctgggaatataataaagtggactaaaggtttcaatattgaggatgcggttggagaagatgtggtgggtgaactgaccaagtccttagaaaaaattggtctggatatgcgtgttgcagctctagttaatgacacagttggaacagtggctagagcaagattcagcaatcaggatgtcattgctggagtgattcttggtactgggacaaatgcagcttatgtagagtgtgcacatgcaattccaaaatggcatggtcttctaccaaaatcaggagagatggttattaacatggagtggggtaatttccgttcctcacatcttcctctaacagaatatgatcaagctctagatgcagagagcttaaaccctggagaacagatttttgagaagataatttctggtatgtatttgggtgacattgtaaggagagttttgttgaagatggctgaagaagctgacttctttggagatactgttcctccaaaattgagaattcctttcatacttaggacatatcacatagttgtaatgcatcatgatacatcttcggatctgaaggtggttggaaacaaattgaaggatatattagagatcaatagcacatccctgaaaatgcggaagattgttgtgcaactctgtgatattgttgctactcgaggagcccgcctttcggctgctggtatttttggcatcctcaagaaaataggaagagacacaataaaggccggggagaaacagaaatcagttgtagcactggatggaggattgtttgaaggatacaaaaaattcagaagttccttggagagcacactaaaggagttgttaggagacgaggcagctgagatgattggcattgagcagtctaatgatggctcgggaattggagcagcccttctggcagcttctcactcccagtatttgggagtgccagagtcctga

SEQ ID NO: 149430 - protein, 498 aa, Glycine max
MGKVAVGAAVVCAAAACATAALVVRHRMMSSGKWGRVVAIVKEFEEQCRTPIGKLRQVADAMDVEMHAGLASEGGSKLKMLITYVDNLPSGDEKGLFYALDLGGTNFRTLRVHLGGKEKGVVKIESDEVSIPPHLMTGSSQELFDFIASKLAKFVSSEPEELHPPPGRQRELGFTFSFPVRQTSIASGNIIKWTKGFNIEDAVGEDVVGELTKSLEKIGLDMRVAALVNDTVGTVARARFSNQDVIAGVILGTGTNAAYVECAHAIPKWHGLLPKSGEMVINMEWGNFRSSHLPLTEYDQALDAESLNPGEQIFEKIISGMYLGDIVRRVLLKMAEEADFFGDTVPPKLRIPFILRTYHIVVMHHDTSSDLKVVGNKLKDILEINSTSLKMRKIVVQLCDIVATRGARLSAAGIFGILKKIGRDTIKAGEKQKSVVALDGGLFEGYKKFRSSLESTLKELLGDEAAEMIGIEQSNDGSGIGAALLAASHSQYLGVPES

SEQ ID NO: 149431 - DNA, 1512 bp, Glycine max
  CDS (1)..(1512)
atggggagagtggttgtgggggtggcggtgacggtggcggtggcgacgtgcgcgttggcggcggtggtggtggggcggagagtgaggagccggaggaagtggaagaaagtggcgaacgtggtgagggaactggaggaagggtgcgacactagggttgggaggctgaggcaggtggtggatgctatggccgttgagatgcacgctgggttggcatcagaaggtggttctaagctcaaaatgcttctaacatttgttcataatctccctaatgggactgagaaaggaacatattatgcactacatcttgggggtaccaattttagggttttgcgggttcatttgcatggtcaacaatcttctgttttggaacatgaagtagagcgacaacccattcctcaacatctaatgaccagcacaagcgaggatctctttgatttcattgcttcttcattgaaggaattcattgctaaagaaggagatggttccaatatttcacaggatagaagggagcttggatttacattctcctttcctgtgaaacaaatgtctgtttcttctggcattttaatcaaatggacaaaagggttttccattgtaaatatggtaggaagagatgttgcagcatgtttgcaggaagcattgacaaggaaaggcctagatatgcgggttgctgccttggttaatgacactgttggaacattagcagttggacattatcatgatccagataccgttgcagctattataattggcactggtacaaatgcctgctattgggaacgagttgatgctattatcaagtgtcaaggtcttcttacaacatcaggatacatggttgtaaatatggaatggggaaacttttggtcatctcatttaccaagaacatcttatgatattgatttagactctgaaagccctaatccaaatgatcagggttttgagaaaatgatatcaggaatgtatcttggtgacatcgtgagaagagtcattctaaggatgtcgctagagtcagatatgtttggacctatttcttccaagctttcaatgccctttatgctgaggactcctatgatggctgccatgcacgaggatgattctcctgacttgagagaagtagcaagaatccttaaagacatccttgagattcctgatgttcctttgaagttaagaaaagttgtggtgaaggtgtgtgatgtggtgactcgcagagctgcacgattggcagctgctggtattgttggtatcttgaagaagattggtagggatgggagtggtggcatcacaggtggacgaagaagtgatatgaaaatgaaaagaacagttgtagcaattgaaggaggtttgtattctagctatacattgtttagggagtacttgcatgaagctttgaacgatatattgggggaggatattgccaagcatgtaactcttaaggtcactgaagatggatcaggcgttggagctgcactgcttgctgcctcgcattcatcatatgatgtggatacagtatag

SEQ ID NO: 149432 - protein, 503 aa, Glycine max
MGRVVVGVAVTVAVATCALAAVVVGRRVRSRRKWKKVANVVRELEEGCDTRVGRLRQVVDAMAVEMHAGLASEGGSKLKMLLTFVHNLPNGTEKGTYYALHLGGTNFRVLRVHLHGQQSSVLEHEVERQPIPQHLMTSTSEDLFDFIASSLKEFIAKEGDGSNISQDRRELGFTFSFPVKQMSVSSGILIKWTKGFSIVNMVGRDVAACLQEALTRKGLDMRVAALVNDTVGTLAVGHYHDPDTVAAIIIGTGTNACYWERVDAIIKCQGLLTTSGYMVVNMEWGNFWSSHLPRTSYDIDLDSESPNPNDQGFEKMISGMYLGDIVRRVILRMSLESDMFGPISSKLSMPFMLRTPMMAAMHEDDSPDLREVARILKDILEIPDVPLKLRKVVVKVCDVVTRRAARLAAAGIVGILKKIGRDGSGGITGGRRSDMKMKRTVVAIEGGLYSSYTLFREYLHEALNDILGEDIAKHVTLKVTEDGSGVGAALLAASHSSYDVDTV

SEQ ID NO: 149433 - DNA, 1497 bp, Glycine max
  CDS (1)..(1497)
atggggaaggtggcggtcggagctgcggtcgtttgcgcggcggcggcgtgtgctgcggtggcgctggtggtgcgccaccgcatgaggagctccggaaagtggggtcgcgtggtggctattgtgaaagagtttgaggagcagtgtaggaccccaattgggaagctgagacaggttgctgacgccatggacgttgagatgcacgcgggtcttgcttctgaaggtggcagcaagctcaagatgttgatcacttatgttgataatctcccttctggggatgagaaaggactcttttatgcattagaccttggtggcacaaacttccgaacccttcgcgtgcatttaggtgggaaggagaaaggtgttgtcaaaatagagtctgatgaagtttccattcctcctcatttgatgactggttcttcacaagaattatttgattttgtagcagctaaacttgcaaaattcgttagttctgagcctgaagaatttcaccttccccctggcagacaaagggaactgggttttaccttctcctttccagtgaggcaaacatcaattgcatctgggaatctaataaagtggactaagagtttcaatattgaggatatggttggagaagatgtggtgagtgaactaaccaagtccttcgataaaattggtctggatatgcgtgttgcagctctagttaatgacacagtcggaacagtagctagagcaagattcagcaatcaggatgttgttgctggagtgattgttggtactggaacaaatgcagcttatgtagagagtgcacatgcaattccaaaatggcatggtcttcgaccaaaatcaagagagacggttataaacatggagtggggtgatttccattcctcccatcttcctctaacagaatatgatcaagccttagatgcagagagcttaaaccctggagaacagatttttgagaagataatttctggtatgtatttgggtgacattgtaaggagagttttgttgaagatggctgaagaagctgacttctttggagatactgttcctccaaaattgagaattcctttcatacttaggacatatcacatagttgtaatgcatcatgatacatcttcggatctgaaggtggttggaaacaaattgaaggatatattagagatcaatagcacatccctgaaaatgcggaagattgttgtgcaactctgtgatattgttgctactcgaggagcccgcctttcggctgctggtatttttggcatcctcaagaaaataggaagagacacaataaaggccggggagaaacagaaatcagttgtagcactggatggaggattgtttgaaggatacaaaaaattcagaagttccttggagagcacactaaaggagttgttaggagacgaggcagctgagatgattggcattgagcagtctaatgatggctcgggaattggagcagcccttctggcagcttctcactcccagtatttgggagtgccagagtcctga

SEQ ID NO: 149434 - protein, 498 aa, Glycine max
MGKVAVGAAVVCAAAACAAVALVVRHRMRSSGKWGRVVAIVKEFEEQCRTPIGKLRQVADAMDVEMHAGLASEGGSKLKMLITYVDNLPSGDEKGLFYALDLGGTNFRTLRVHLGGKEKGVVKIESDEVSIPPHLMTGSSQELFDFVAAKLAKFVSSEPEEFHLPPGRQRELGFTFSFPVRQTSIASGNLIKWTKSFNIEDMVGEDVVSELTKSFDKIGLDMRVAALVNDTVGTVARARFSNQDVVAGVIVGTGTNAAYVESAHAIPKWHGLRPKSRETVINMEWGDFHSSHLPLTEYDQALDAESLNPGEQIFEKIISGMYLGDIVRRVLLKMAEEADFFGDTVPPKLRIPFILRTYHIVVMHHDTSSDLKVVGNKLKDILEINSTSLKMRKIVVQLCDIVATRGARLSAAGIFGILKKIGRDTIKAGEKQKSVVALDGGLFEGYKKFRSSLESTLKELLGDEAAEMIGIEQSNDGSGIGAALLAASHSQYLGVPES

SEQ ID NO: 149435 - DNA, 1500 bp, Brassica napus
  CDS (1)..(1500)
atgggtaaagtggctgtcggtgcgacggttgtttgcgctgcggcggtttgcgcggcgacggtgtatgtggtgaggcggcggatgaaaagctgcgggaaatgggggcgcgtgatagagatcctgaaggtgttcgaggaggattgcgcgacgccgatagggaagctgagacaagtggcggatgcgatgacggttgagatgcacgcgggtctcgcatcggaaggtggaagcaagcttaagatgctcatcagccgggtcgacaatctcccttctggggatgaacaaggtttcttttacgcgctggacctaggaggaacaaacttccgtgtcatgcgtgtgcttctcggtggcaaacaagaccgtgttgtcaaacaagaattcgaagaagtctctatccctcctcctttgatgaccggtgcttcagatgaattgttcaattttatcgccgaagcgcttgcaaagtttgtagctacggaaggagaggactttcatctcccagcgggtagacaaagggagttaggtttcactttctcgtttcctgttaagcagacgtctttgtgctctggcactctcatcaactggactaaaggcttctccatcgaagatgcacttggacaagatgttgtgggagagcttattaaagctatggaaagagttgggctcgacatgaatgtcacagcgcttgttaatgatacggttggaacacttgctggtggtagatactataactctgatgttgtagccgctgttattctaggcactggcactaatgcagcttatgtcgaacgcgcaagtgccattccaaaatggcagggcttacttcccaaatctggagaaatggtgatcaacatggagtggggaaacttcaggtcatcacatcttcccttgaccgagtacgaccacttgctggatttcgatagtttgaatcctggtgaacagattcttgagaaaatcatttccggtatgtatttgggagagatcttgcgtagagttcttctgaagatggctgaagaggctgctttctttggcgactccatcccacctaagctgaaagtaccattcatcataaggactccgaccatgtctgctatgcacagcgacacttctccggatttgaaggttgttggaagcaagttaaaggacatactggaggtccctactactctgaagatgagaaaagttgtgatcagtctctgtaacatcatagccacccgaggagctcgtctctctgcagctgggatctacggaatcctcaagaaactaggaagagacgcacctaaagatggagaaacaacgcagaaatctgtgattgccatggacggtggactgttcgagcactacactcagttcagtgagtgtatggagagctcattgaaagagttgcttggagatgaagcatcagagagcgtcgaggtgattcattcgaatgacgggtccggcgttggcgctgcattgctcgctgcctcgcactctcagtacctcgaggactctgaaacaagttaa

SEQ ID NO: 149436 - protein, 499 aa, Brassica napus
MGKVAVGATVVCAAAVCAATVYVVRRRMKSCGKWGRVIEILKVFEEDCATPIGKLRQVADAMTVEMHAGLASEGGSKLKMLISRVDNLPSGDEQGFFYALDLGGTNFRVMRVLLGGKQDRVVKQEFEEVSIPPPLMTGASDELFNFIAEALAKFVATEGEDFHLPAGRQRELGFTFSFPVKQTSLCSGTLINWTKGFSIEDALGQDVVGELIKAMERVGLDMNVTALVNDTVGTLAGGRYYNSDVVAAVILGTGTNAAYVERASAIPKWQGLLPKSGEMVINMEWGNFRSSHLPLTEYDHLLDFDSLNPGEQILEKIISGMYLGEILRRVLLKMAEEAAFFGDSIPPKLKVPFIIRTPTMSAMHSDTSPDLKVVGSKLKDILEVPTTLKMRKVVISLCNIIATRGARLSAAGIYGILKKLGRDAPKDGETTQKSVIAMDGGLFEHYTQFSECMESSLKELLGDEASESVEVIHSNDGSGVGAALLAASHSQYLEDSETS

SEQ ID NO: 149437 - DNA, 1503 bp, Glycine max
  CDS (1)..(1503)
atgatgtctgttactgttgctgccgacactacctccgccgccgtaggatcctgtctttcacgatcgcggcggcggtgcttaacggtggctctccgatctaaagtgtcagtcaccccaaccagaatattgacgaaactcaaacacgagtgtgccactcctctgccccttcttcagcaagtggccaataacatgtcttctgacatgcgagctgggcttgctgcagaggctgggcctgggcccgggcttcccatgatacccagctatgttgaaaatcttcccactgggaatgagaaagggttgttttatgccttggatctcggaggaaccaacttccgtgtgctgagggtgcagttgggtggcaaagatgagcgtgtcattgccaccgagtttgatcaagtttccatacctcatcaactcatgtttgctacatctcaggagctgtttgatttcattgcttcggggctagcaaaatttgcgtccaaggaggatggtagatttcatatctcaccgggaaaaaagggagagattggcttcacgttttcatttcctgtgaagcaggcatctattgattctggcatactaatcaagtggaccaagggttttgcagtgtctggaacagcagggagagatgtggtggcttgtctgaacgaggcaatggaaaggcaaggaatagacatgcgagtttctgctctggtgaatgataccgtggcaacgttagctggagcagaatactgggataatgatgtcgtggttgctgtcattttgggtactggaaccaatgcttgctatgttgaacagatcagtgccattcctaagttacagggccatgtctcttcttctgggaaaatgatcattagcactgagtggggtgctttctcaaatggtctccctttaaccaagttcgatagggaaatggatgctgctagcatcaatccgggcgagcagatctttgaaaagacaatctcgggaatgtatctaggcgaaattgttagacgagtgctgctggaaatggctgaagagggtggtctgtttggaaaatctgtcccgcagacactatctacacctttcatactcgggaccccagatctatgtgccatgcagcaggacagttctggcgatttacatgcagttgggtccctcctctatgataaagcaggggttgaatccaatttaagtgaaagaaaaacagttttagaggtttgtgagacaattgtaaagcgaggtgggagcttagctggtgcaggaatagtggggattctacaaaaaatggaagaggatcagagaggtctcgtctttgggaatgggaagagaagtgttgttgccattgatgggggcttatatgaaaattatcctcaatacagggcttatttgcaagattcagtcacagagctgctaggaacagaaaagtcaaacaatgtggtgatagagcatactaaagatggatctggaataggagctgctctattggctgcttcaaactccatgtacaaccaagatttatag

SEQ ID NO: 149438 - protein, 500 aa, Glycine max
MMSVTVAADTTSAAVGSCLSRSRRRCLTVALRSKVSVTPTRILTKLKHECATPLPLLQQVANNMSSDMRAGLAAEAGPGPGLPMIPSYVENLPTGNEKGLFYALDLGGTNFRVLRVQLGGKDERVIATEFDQVSIPHQLMFATSQELFDFIASGLAKFASKEDGRFHISPGKKGEIGFTFSFPVKQASIDSGILIKWTKGFAVSGTAGRDVVACLNEAMERQGIDMRVSALVNDTVATLAGAEYWDNDVVVAVILGTGTNACYVEQISAIPKLQGHVSSSGKMIISTEWGAFSNGLPLTKFDREMDAASINPGEQIFEKTISGMYLGEIVRRVLLEMAEEGGLFGKSVPQTLSTPFILGTPDLCAMQQDSSGDLHAVGSLLYDKAGVESNLSERKTVLEVCETIVKRGGSLAGAGIVGILQKMEEDQRGLVFGNGKRSVVAIDGGLYENYPQYRAYLQDSVTELLGTEKSNNVVIEHTKDGSGIGAALLAASNSMYNQDL

SEQ ID NO: 149439 - DNA, 1380 bp, Zea mays
  CDS (1)..(1380)
atggtggcggcggcggacctggaggcggcggagcgggtggtggcggagctccgcgaggcgtgcgcggcgcggctcgacgaggtggcggcggcgatggaggcggagatgcgcgccggactgcgcgaggacggcggcagcaagatcaagatgatcgtctccttcgtcgacaacctccccacggggaacgaagagggcgtcttctacgccttggaccttggcggaacgaacttccgcgtgctgcgcgtgcagctcgccgggaaggacaggcgtgtggccaagcgagagtccaaggaggtgtccatccctcctcacctcatgtcaggcaacgcatcggagctgtttggcttcatcgcctccgcgctagccaagtacgtcgccgcggcgggcgaaggggacggcaggcagagagagctcgggttcaccttctctttccccgtgcgccagacgtcgatcgcgtcaggcacgctcatcaagtggaccaaggcgttttcggtcgacgacgctgttggtgaggatgtcgtcgccgagctgcagacggccatggagaagcaaggcgtcgacatgcgtgtggcggcactgatcaacgatacggtcgggacgctggctgcgggccggtacaacgatgaggacgtcgtcgtcggtgtgatactaggcactggctccaacgccgcgtacgtcgaagaggccagtgccatacccaagctcaagctggagggcggcgaattgcccaagtcagggaacatggtgataaacacagaatggggtaacttctactcgccctgcctccccatcacggagtatgaccaggccttggatgaggagagcttaaacccaggggagcagatcttcgagaagctggtttcgggcatgtatctcggcgagattgtgaggcgggtgctgcttaaaatcgcgtcgcagtcttccatcttgggcgatgtcagccacacgaacctcaaaactcgcttcagtcttaggactccggacatctccgcgatgcaccatgacggcacgcctgacctgagagtcgtggcggagaagctggccgacaacctcagggtcagggacacgtccttggacacgaggaagatggtggtcgagatctgcgacatcgtcaccgggaggtctgcccggctggccgcggcggggatcgtcgggatcctcaggaagatcggtcgagcggcgccaggcgacgagcgccggtcggtcgtcgccatcgacggcggcctgttcgagcactacgccgagttcaggaagcgcctggaggccacgctggtggagctgctcggggaggaggcgtctaggctggtggaggtcaagctcaccaaggacgggtctggcctcggagccgccctcattgcagctgcccactcgcagtactga

SEQ ID NO: 149440 - protein, 459 aa, Zea mays
MVAAADLEAAERVVAELREACAARLDEVAAAMEAEMRAGLREDGGSKIKMIVSFVDNLPTGNEEGVFYALDLGGTNFRVLRVQLAGKDRRVAKRESKEVSIPPHLMSGNASELFGFIASALAKYVAAAGEGDGRQRELGFTFSFPVRQTSIASGTLIKWTKAFSVDDAVGEDVVAELQTAMEKQGVDMRVAALINDTVGTLAAGRYNDEDVVVGVILGTGSNAAYVEEASAIPKLKLEGGELPKSGNMVINTEWGNFYSPCLPITEYDQALDEESLNPGEQIFEKLVSGMYLGEIVRRVLLKIASQSSILGDVSHTNLKTRFSLRTPDISAMHHDGTPDLRVVAEKLADNLRVRDTSLDTRKMVVEICDIVTGRSARLAAAGIVGILRKIGRAAPGDERRSVVAIDGGLFEHYAEFRKRLEATLVELLGEEASRLVEVKLTKDGSGLGAALIAAAHSQY

SEQ ID NO: 149441 - DNA, 1530 bp, Zea mays
  CDS (1)..(1530)
atggtgaaggccgtggtggtgggcgcggcggtcgtggcgtgtgcggcggtcggggtggcggtggtgctggagcgccgccggcggaagcgagacgccgacctcctggggtccgcggaggcggagaggaggaggcgcgcggccgccgtcatcgaggaggtcgagagcagcctcgccacgcccacggcgctgctgcggagcatcgcggacgccatggtcgccgagatggagcgcggcctgcgcggggacatccacgcgcagctcaagatgctcattagctacgtcgacagcctccccaccggagatgaacatgggctgttttatgcactggatcttggagggaccaacttccgtgtgctgcgagtccagctaggaggaaaggagaaacgtgttgtcaaacaacagtatgaggaggtttccattccaccacatttgatggtcgggacttccatggaactatttgatttcattgctgctgcattggctaaatttgtcggtactgaaggtgaagatttccaactcccagagggtaggcagagagaacttggtttcactttttccttcccggtgaaccaaacatcaatatcatcaggaacactcatcaagtggacaaagggcttttccatcaatggcacggttggtgaagatgttgtttctgagttgagcagggccatggagaggcagggactagatatgaaagctacggcattagtcaatgatacagtgggcacattggctggtgggagatatatggataccgatgtagttgcagctgtaatattgggcactggtacaaatgcagcatatgtggagcatgcaaatgcaattcctaaatggactgggttactgcctaaatctggaaacatggtaattaatacagagtgggggagcttcaaatccaacaaacttcctctttcagaatatgacaaagccatggactttgaaagtttgaaccctggagagcagatatacgagaaaatgatttctggtatgtatctcggagagattgttcgaagaattttactgaagttggcacatgaagcttctctatttggggatgttgttccacctaagctggagctgccatttatattgaggacgccagatatgtcagccatgcatcatgactcctcacatgacctcaaaactcttggagctaaactgaaggacatagtcggggtcgcggacacttccctggaagtaaggtacatcactcgtcacatctgtgaccttgtcgcagagcgtgcagcacgcctggccgccgcaggcgtgtacagcatcctgaagaagataggccgggacaaagtaccaagcggtggcggtaaaatgccgaggaccgtagttgccttggacggtgggctctacgaacactacaagaagttcagcagttgcgtagaagcgactctcacagacttgctcggcgaggaggcttcttcctccgtggtcgccaagctggccaacgacggctctggcattggagctgcgcttctcgcagcctcacactcccagtatcagtatggcgcgagtgactag

SEQ ID NO: 149442 - protein, 509 aa, Zea mays
MVKAVVVGAAVVACAAVGVAVVLERRRRKRDADLLGSAEAERRRRAAAVIEEVESSLATPTALLRSIADAMVAEMERGLRGDIHAQLKMLISYVDSLPTGDEHGLFYALDLGGTNFRVLRVQLGGKEKRVVKQQYEEVSIPPHLMVGTSMELFDFIAAALAKFVGTEGEDFQLPEGRQRELGFTFSFPVNQTSISSGTLIKWTKGFSINGTVGEDVVSELSRAMERQGLDMKATALVNDTVGTLAGGRYMDTDVVAAVILGTGTNAAYVEHANAIPKWTGLLPKSGNMVINTEWGSFKSNKLPLSEYDKAMDFESLNPGEQIYEKMISGMYLGEIVRRILLKLAHEASLFGDVVPPKLELPFILRTPDMSAMHHDSSHDLKTLGAKLKDIVGVADTSLEVRYITRHICDLVAERAARLAAAGVYSILKKIGRDKVPSGGGKMPRTVVALDGGLYEHYKKFSSCVEATLTDLLGEEASSSVVAKLANDGSGIGAALLAASHSQYQYGASD

SEQ ID NO: 149443 - DNA, 1515 bp, Zea mays
  CDS (1)..(1515)
atgcggaagccggcggcactggtggtttctacggcggttttcgcagccgcagccgtagtcgccgtgatggcacgccagaggttgcgggaagcgaggcgatgggcacgcgcaggcgccgtgctgcgggacctgcaggagcggtgcgcggcgccggtggagcggctgcggcaggtggcagacgcgatggtcgcggagatgcgcgcggggctggcctccaacgactccgagggagatagcgggagcagcgtcctcctcaagatgctcgtaacctacgttgactccctaccgtccggggacgagaaagggctattttatgctcttgaccttggcggaacaaactttcgtgttttacgaattcagtttgggggcaaggaacaacgaatagtcaagcaagaatctaaaacggtatccattcctcaacatttaatgtccaggggatcaaatgagctgtttgattttattgctgctgctttagcgaagttcattgcctctgagggtgagggcttttatcttcctgagggcatgcaaagacaacttggttttacattctcctttccagtgaagcaaaattcagttgcatctggcactcttatcaaatggacaaagggttttgcaattgatgaaatggtaggaaaggacgtagtggcagaattaaacaaggctatcaaacgccaaggagttgatatggaagtcacagtactggtcaatgatacagtagggacattggctgctgggagatatgtggataatgatactgttgctgcagttatactgggtactggcactaatgcagcgtacatagaacatatggactcaattcctaaatggtgtggcccacctcctgagtctggaaacatggtgataaacatggaatgggggaactttaggtccacccaccttccactgactgaatttgatgtagccttggatgcagaaagtttgaaccctgatgaacagatttatgagaagttgatctctggcatgtatatgggggaaattgtccgaagggtcttgctaaaaatggctcaggatgcttctcttttctcagataatgtacctctggaacttgaggtcccatatatccttagaacatatcacgtgctgatgatgcatcaagacagatcgcctgatctcagaacggttggcaacaacctgaaagaagtcttcaggatagaagacacctgtttcaaaacaaggaaattggtagtggatgtctgcgaggttgttgccagtcgcgctgcacgacttgctgctgctgggatacacggcatcctcaaaaagcttgggcgagacgttgccagcccagacaaacaaaagacggtgattgctgtggatggcggagtttacaagcattatactttcttcgcccagtgcatggagagcactcttagagacttgcttggggagggagtggcgtcctctttagtgataaaacttgccgaagatggctcaggcactggagcggcgctcttgtcagcctcctattctcaacgtctccaggccgtggatgattaa

SEQ ID NO: 149444 - protein, 504 aa, Zea mays
MRKPAALVVSTAVFAAAAVVAVMARQRLREARRWARAGAVLRDLQERCAAPVERLRQVADAMVAEMRAGLASNDSEGDSGSSVLLKMLVTYVDSLPSGDEKGLFYALDLGGTNFRVLRIQFGGKEQRIVKQESKTVSIPQHLMSRGSNELFDFIAAALAKFIASEGEGFYLPEGMQRQLGFTFSFPVKQNSVASGTLIKWTKGFAIDEMVGKDVVAELNKAIKRQGVDMEVTVLVNDTVGTLAAGRYVDNDTVAAVILGTGTNAAYIEHMDSIPKWCGPPPESGNMVINMEWGNFRSTHLPLTEFDVALDAESLNPDEQIYEKLISGMYMGEIVRRVLLKMAQDASLFSDNVPLELEVPYILRTYHVLMMHQDRSPDLRTVGNNLKEVFRIEDTCFKTRKLVVDVCEVVASRAARLAAAGIHGILKKLGRDVASPDKQKTVIAVDGGVYKHYTFFAQCMESTLRDLLGEGVASSLVIKLAEDGSGTGAALLSASYSQRLQAVDD

SEQ ID NO: 149445 - DNA, 1380 bp, Zea mays
  CDS (1)..(1380)
atggtggcggcggcggacctggaggcggcggagcgggtggtggcggagctccgcgaggcgtgcgcggcgcggctcgacgaggtggcggcggcgatggaggcggagatgcgcgccggactgcgcgaggagggcggcagcaagatcaagatgatcgtctccttcgtcgacaacctccccacggggaacgaagagggcgtcttctacgccttggaccttggcggaacgaacttccgcgtgctgcgcgtgcagctcgccgggaaagacaggcgtgtggccaagcgagactccaaggaggtgtccatccctcctcacctcatgtcaggcaacgcgtcggagctgtttggcttcatcgcctcggcgctagccaagtacgtcgccgcggcgggcgaaggggacggcaggcagagagagctcgggttcaccttctctttccccgtgcgccagacgtcgatcgcgtcaggcacgctcatcaagtggaccaaggcgttttcggtcgacgacgctgttggtgaggatgtcgtcgccgagctgcagacggccatggagaagcaaggcgtcgacatgcgtgtggcggcactgatcaacgatacggtcgggacgctggctgcgggccggtacaacgatgaggacgtcgtcgtcggtgtgatactaggcactggctccaacgccgcgtacgtcgaagaggccagtgccatacccaagctcaagctggagggcggcgaattgcccaagtcagggaacatggtgataaacacagaatggggtaacttctactcgccctgcctccccatcacggagtatgaccaggccttggatgaggagagcttaaacccaggggagcagatcttcgagaagctggtttcgggcatgtatctcggcgagattgtgaggcgggtgctgcttaaaatcgcgtcgcagtcttccatcttgggcgatgtcagccacacgaacctcaaaactcgcttcagtcttaggactccggacatctccgcgatgcaccatgacggcacgcctgacctgagagtcgtggcggagaagctggccgacaacctcagggtcagggacacgtccttggacacgaggaagatggtggtcgagatctgcgacatcgtcaccgggaggtctgcccggctggccgcggcggggatcgtcgggattctcaggaagatcggtcgagcggcgccaggcgacgagcgccggtcggtcgtcgccatcgacggcggcctgttcgagcactacgccgagttcaggaagcgcctggaggccacgctggtggagctgctcggggaggaggcgtctaggctggtggaggtcaagctcaccaaggacgggtctggcctcggagccgccctcattgcagctgcccactcgcagtactga

SEQ ID NO: 149446 - protein, 459 aa, Zea mays
MVAAADLEAAERVVAELREACAARLDEVAAAMEAEMRAGLREEGGSKIKMIVSFVDNLPTGNEEGVFYALDLGGTNFRVLRVQLAGKDRRVAKRDSKEVSIPPHLMSGNASELFGFIASALAKYVAAAGEGDGRQRELGFTFSFPVRQTSIASGTLIKWTKAFSVDDAVGEDVVAELQTAMEKQGVDMRVAALINDTVGTLAAGRYNDEDVVVGVILGTGSNAAYVEEASAIPKLKLEGGELPKSGNMVINTEWGNFYSPCLPITEYDQALDEESLNPGEQIFEKLVSGMYLGEIVRRVLLKIASQSSILGDVSHTNLKTRFSLRTPDISAMHHDGTPDLRVVAEKLADNLRVRDTSLDTRKMVVEICDIVTGRSARLAAAGIVGILRKIGRAAPGDERRSVVAIDGGLFEHYAEFRKRLEATLVELLGEEASRLVEVKLTKDGSGLGAALIAAAHSQY

SEQ ID NO: 149447 - DNA, 25 bp, Artificial sequence
  primer
atggttcatttaggtccaaagaaac

SEQ ID NO: 149448 - DNA, 24 bp, Artificial sequence
  primer
ttaagcgccaatgataccaagaga

SEQ ID NO: 149449 - protein, 561 aa, Artificial sequence
  consensus sequence
  Variant (3)..(15): Xaa in position 3 to 15 is any amino acid
  Variant (16)..(23): Xaa in position 16 to 23 is any or no amino acid
  Variant (25)..(27): Xaa in position 25 to 27 is any amino acid
  Variant (29)..(29): Xaa in position 29 is any amino acid
  Variant (31)..(31): Xaa in position 31 is any amino acid
  Variant (33)..(33): Xaa in position 33 is any amino acid
  Variant (35)..(37): Xaa in position 35 to 37 is any amino acid
  Variant (38)..(38): Xaa in position 38 is any or no amino acid
  Variant (40)..(40): Xaa in position 40 is any amino acid
  Variant (47)..(47): Xaa in position 47 is any amino acid
  Variant (50)..(53): Xaa in position 50 to 53 is any amino acid
  Variant (55)..(68): Xaa in position 55 to 68 is any amino acid
  Variant (69)..(71): Xaa in position 69 to 71 is any or no amino acid
  Variant (73)..(83): Xaa in position 73 to 83 is any amino acid
  Variant (84)..(99): Xaa in position 84 to 99 is any or no amino acid
  Variant (101)..(103): Xaa in position 101 to 103 is any amino acid
  Variant (105)..(109): Xaa in position 105 to 109 is any amino acid
  Variant (111)..(122): Xaa in position 111 to 122 is any amino acid
  Variant (123)..(161): Xaa in position 123 to 161 is any or no amino acid
  Variant (168)..(168): Xaa in position 168 is any amino acid
  Variant (170)..(171): Xaa in position 170 to 171 is any amino acid
  Variant (173)..(177): Xaa in position 173 to 177 is any amino acid
  Variant (179)..(179): Xaa in position 179 is any amino acid
  Variant (181)..(182): Xaa in position 181 to 182 is any amino acid
  Variant (188)..(193): Xaa in position 188 to 193 is any amino acid
  Variant (195)..(195): Xaa in position 195 is any amino acid
  Variant (198)..(200): Xaa in position 198 to 200 is any amino acid
  Variant (202)..(215): Xaa in position 202 to 215 is any amino acid
  Variant (216)..(216): Xaa in position 216 is any or no amino acid
  Variant (218)..(219): Xaa in position 218 to 219 is any amino acid
  Variant (223)..(223): Xaa in position 223 is any amino acid
  Variant (227)..(240): Xaa in position 227 to 240 is any amino acid
  Variant (241)..(251): Xaa in position 241 to 251 is any or no amino acid
  Variant (253)..(253): Xaa in position 253 is any amino acid
  Variant (257)..(257): Xaa in position 257 is any amino acid
  Variant (259)..(260): Xaa in position 259 to 260 is any amino acid
  Variant (262)..(262): Xaa in position 262 is any amino acid
  Variant (264)..(265): Xaa in position 264 to 265 is any amino acid
  Variant (266)..(267): Xaa in position 266 to 267 is any or no amino acid
  Variant (269)..(281): Xaa in position 269 to 281 is any amino acid
  Variant (282)..(294): Xaa in position 282 to 294 is any or no amino acid
  Variant (297)..(297): Xaa in position 297 is any amino acid
  Variant (301)..(301): Xaa in position 301 is any amino acid
  Variant (303)..(305): Xaa in position 303 to 305 is any amino acid
  Variant (306)..(309): Xaa in position 306 to 309 is any or no amino acid
  Variant (312)..(312): Xaa in position 312 is any amino acid
  Variant (314)..(315): Xaa in position 314 to 315 is any amino acid
  Variant (317)..(319): Xaa in position 317 to 319 is any amino acid
  Variant (321)..(322): Xaa in position 321 to 322 is any amino acid
  Variant (324)..(325): Xaa in position 324 to 325 is any amino acid
  Variant (326)..(326): Xaa in position 326 is any or no amino acid
  Variant (329)..(329): Xaa in position 329 is any amino acid
  Variant (331)..(332): Xaa in position 331 to 332 is any amino acid
  Variant (335)..(336): Xaa in position 335 to 336 is any amino acid
  Variant (339)..(339): Xaa in position 339 is any amino acid
  Variant (344)..(345): Xaa in position 344 to 345 is any amino acid
  Variant (347)..(348): Xaa in position 347 to 348 is any amino acid
  Variant (350)..(382): Xaa in position 350 to 382 is any amino acid
  Variant (383)..(399): Xaa in position 383 to 399 is any or no amino acid
  Variant (401)..(435): Xaa in position 401 to 435 is any amino acid
  Variant (436)..(461): Xaa in position 436 to 461 is any or no amino acid
  Variant (463)..(463): Xaa in position 463 is any amino acid
  Variant (465)..(465): Xaa in position 465 is any amino acid
  Variant (467)..(469): Xaa in position 467 to 469 is any amino acid
  Variant (471)..(473): Xaa in position 471 to 473 is any amino acid
  Variant (475)..(476): Xaa in position 475 to 476 is any amino acid
  Variant (478)..(487): Xaa in position 478 to 487 is any amino acid
  Variant (488)..(506): Xaa in position 488 to 506 is any or no amino acid
  Variant (509)..(539): Xaa in position 509 to 539 is any amino acid
  Variant (540)..(549): Xaa in position 540 to 549 is any or no amino acid
  Variant (554)..(554): Xaa in position 554 is any amino acid
  Variant (559)..(559): Xaa in position 559 is any amino acid
GLXXXXXXXXXXXXXXXXXXXXXVXXXPXGXEXGXXXXAXDLGGTNXRVXXXXLXXXXXXXXXXXXXXXXXPXXXXXXXXXXXXXXXXXXXXXXXXXXXFXXXAXXXXXFXXXXXXXXXXXXXXXXXXXXXXXXXXXXXXXXXXXXXXXXXXXXXXXXXXXLGFTFSXPXXQXXXXXGXLXXWTKGFXXXXXXGXDVXXXLXXXXXXXXXXXXXXXAXXNDTXGTLXXXXXXXXXXXXXXXXXXXXXXXXXIXGTGXNXXYXEXXXXIXXXXXXXXXXXXXXXXXXXXXXXXXXINXEWGXFXXXXXXXLPXTXXDXXXDXXSXXXPGXQXXEKXXSGXYLGEXXRXXLXXXXXXXXXXXXXXXXXXXXXXXXXXXXXXXXXXXXXXXXXXXXXXXXXXDXXXXXXXXXXXXXXXXXXXXXXXXXXXXXXXXXXXXXXXXXXXXXXXXXXXXXXXXXXXXXRXAXLXXXGXXXIXXKXXXXXXXXXXXXXXXXXXXXXXXXXXXXXDGXXXXXXXXXXXXXXXXXXXXXXXXXXXXXXXXXXXXXXXXXDGSGXGAALXAA

SEQ ID NO: 149450 - protein, 44 aa, Artificial sequence
  protein pattern
  Variant (7)..(7): Xaa in position 7 is Phe or Tyr
  Variant (9)..(10): Xaa in position 9 to 10 is any amino acid
  Variant (12)..(13): Xaa in position 12 to 13 is any amino acid
  Variant (14)..(14): Xaa in position 14 is Ala, Ile, Leu or Val
  Variant (15)..(16): Xaa in position 15 to 16 is any amino acid
  Variant (18)..(22): Xaa in position 18 to 22 is any or no amino acid
  Variant (25)..(25): Xaa in position 25 is Ala, Gly, Ser or Thr
  Variant (26)..(26): Xaa in position 26 is Phe or Trp
  Variant (27)..(29): Xaa in position 27 to 29 is any amino acid
  Variant (30)..(30): Xaa in position 30 is Asp, Glu, Gly or Asn
  Variant (31)..(32): Xaa in position 31 to 32 is any amino acid
  Variant (33)..(33): Xaa in position 33 is Asp, Glu, Gly or Asn
  Variant (34)..(34): Xaa in position 34 is any amino acid
  Variant (35)..(35): Xaa in position 35 is Asp or Asn
  Variant (36)..(36): Xaa in position 36 is Ala, Ile or Val
  Variant (37)..(43): Xaa in position 37 to 43 is any amino acid
  Variant (44)..(44): Xaa in position 44 is Phe, Ile, Leu, Met or Val
LGFTFSXPXXQXXXXXGXXXXXTKXXXXXXXXXXXXXXXXXXXX

SEQ ID NO: 149451 - protein, 27 aa, Artificial sequence
  protein pattern
  Variant (2)..(3): Xaa in position 2 to 3 is any or no amino acid
  Variant (5)..(8): Xaa in position 5 to 8 is any amino acid
  Variant (11)..(12): Xaa in position 11 to 12 is any amino acid
  Variant (13)..(13): Xaa in position 13 is Ala, Gly or Ser
  Variant (15)..(15): Xaa in position 15 is any amino acid
  Variant (16)..(16): Xaa in position 16 is Phe or Tyr
  Variant (17)..(17): Xaa in position 17 is Leu, Met or Val
  Variant (19)..(19): Xaa in position 19 is Asp or Glu
  Variant (20)..(20): Xaa in position 20 is Ile, Leu, Met or Val
  Variant (21)..(21): Xaa in position 21 is any amino acid
  Variant (23)..(23): Xaa in position 23 is any amino acid
  Variant (24)..(24): Xaa in position 24 is Ala, Ile or Val
  Variant (25)..(25): Xaa in position 25 is Ile, Leu, Met or Val
  Variant (26)..(26): Xaa in position 26 is any amino acid
  Variant (27)..(27): Xaa in position 27 is Asp, Glu, His, Lys or Arg
PXXGXXXXEKXXXGXXXGXXXRXXXXX

SEQ ID NO: 149452 - protein, 16 aa, Artificial sequence
  protein pattern
  Variant (2)..(2): Xaa in position 2 is Ala, Ile, Leu or Val
  Variant (4)..(4): Xaa in position 4 is Leu or Met
  Variant (9)..(9): Xaa in position 9 is Phe or Leu
  Variant (12)..(13): Xaa in position 12 to 13 is any amino acid
  Variant (14)..(14): Xaa in position 14 is Ala, Ile, Leu or Val
  Variant (15)..(15): Xaa in position 15 is any amino acid
AXDXGGTNXRVXXXXL

SEQ ID NO: 149453 - protein, 10 aa, Artificial sequence
  protein pattern
  Variant (2)..(2): Xaa in position 2 is Ile or Leu
  Variant (3)..(3): Xaa in position 3 is Ile, Leu or Val
  Variant (7)..(7): Xaa in position 7 is Ser, Thr or Val
  Variant (8)..(8): Xaa in position 8 is Ala or Gly
  Variant (9)..(9): Xaa in position 9 is Ala or Thr
  Variant (10)..(10): Xaa in position 10 is Leu, Met or Val
AXXNDTXXXX

SEQ ID NO: 149454 - DNA, 1098 bp, Saccharomyces cerevisiae
  CDS (1)..(1098)
atgccacctctacccgtgctcaacagacctcaaattcatacgtctgttactgaaataagtcatgcaattgatcgtacaatcaaggaagagctctttcccgttgcctacactactgaagaagagcaatatttcaaaactaaccctaaacctgcctatatcgatgaattgattaaggacgctaaagagtttattgatttgcagtattccctgaaaaggaacaaaatagttcttatcacctctggtggtactactgttccattggaaaacaatacagtacgttttatcgataatttttctgcaggtactcgtggtgcatcgagtgctgaacagttcttagcgaacggatatagtgttattttcttacatagggaattctcattaactccgtataataggtccttctcccatagcattaatactttattcttggactacattgattctgaaggtaaaatcaaacctgaatttgctgagaatgttttgaagaacaaaaagctttatgacaagtatatggagaaagaggagaaactacttttactaccattcaccacggtcaaccaatacttatggtcactgaaaagtatagccaagctattgaataatagtggttgcttgttttatttagctgctgctgtcagtgatttttttgttccatattcaagactacctcagcacaagattcaatcaggagacaacggtaagatgggagcaaataatgacactgaaggtacaactaggactacgcctgatggtaaactgattgtgaatcttgaccctgtccctaagtttttgagaagattagtggaatcatgggccactcaagcgatgatcgtttcgttcaaattagaaactgatgaatccatgctgctttacaaatgtacacaagccctggatagatacaaccatcaactggttatcggaaaccttttacagacaagaaacaaacaggtcattttcgtatcccctgaaaacagaaagggagattgggtacgtttggatgaaaaacaccatatcattgaagagatgataatcccagaagtcatcgcacgccatgacaaatgggtggcgcattcgaaaactaagctagctacgaaataa

SEQ ID NO: 149455 - protein, 365 aa, Saccharomyces cerevisiae
MPPLPVLNRPQIHTSVTEISHAIDRTIKEELFPVAYTTEEEQYFKTNPKPAYIDELIKDAKEFIDLQYSLKRNKIVLITSGGTTVPLENNTVRFIDNFSAGTRGASSAEQFLANGYSVIFLHREFSLTPYNRSFSHSINTLFLDYIDSEGKIKPEFAENVLKNKKLYDKYMEKEEKLLLLPFTTVNQYLWSLKSIAKLLNNSGCLFYLAAAVSDFFVPYSRLPQHKIQSGDNGKMGANNDTEGTTRTTPDGKLIVNLDPVPKFLRRLVESWATQAMIVSFKLETDESMLLYKCTQALDRYNHQLVIGNLLQTRNKQVIFVSPENRKGDWVRLDEKHHIIEEMIIPEVIARHDKWVAHSKTKLATK

SEQ ID NO: 149456 - DNA, 972 bp, Oryza sativa Japonica Group
  CDS (1)..(972)
atggccgcggatcccaccaccggcggcggcgaggcggagtccttcttccgcgccgcgccgccgctccgcgaccaggaccgcgtcgccggggacctcgccgacttcgtcgcccgccactccggcaacggaggaggggggaggctcgccggggtggtctgcgtcacctccggcggcacgacggtgcccctggagcagcggtgcgtgcgctacatcgacaacttcagctccggccagcgaggggccgcgtccaccgagtactttctcaaagctggctacgcggtcatcttcatctaccgccgtgggagcaagcaaccttactgtaggtttcttccagaggattcctttcttgatttattcgagcttggtgaagaatcagatatccaagtcccagaatctcatgccgcggttgtcaagacagcaataagaaattatcggaaggcgattgatgaaggcctattgctgaaacttcctttcaccactatctttgagtaccttcagttactgcaaatggtaggtacggcgatgaattgcttgggacgccaaggaatgttttaccttgctgcggcagtttctgacttttatgttccatgggaaagcatggctaaacataaaatcgagtcagcaagtggtcctttgaacatgcaactcaatcaagttccgaagatgcttttcattctgagaaaacaatgggctccttcagcattttgtgtatccttcaagcttgagacggacccagatatccttctgcagaaggcagaggcagctctgagaaagtatggtatgaatgtcgtggtcgccaacgagctagcgaactacaaagatgtagttgtgatggtcacaagcaatgggaggacaaccgtgcgaaggcccagcaaggaggacgacgtcgaagaacagttaatcgatctcttggtagagatgcactccgaacacatcatgcagctcaatcaagacgtgcacaagctgacataa

SEQ ID NO: 149457 - protein, 323 aa, Oryza sativa Japonica Group
MAADPTTGGGEAESFFRAAPPLRDQDRVAGDLADFVARHSGNGGGGRLAGVVCVTSGGTTVPLEQRCVRYIDNFSSGQRGAASTEYFLKAGYAVIFIYRRGSKQPYCRFLPEDSFLDLFELGEESDIQVPESHAAVVKTAIRNYRKAIDEGLLLKLPFTTIFEYLQLLQMVGTAMNCLGRQGMFYLAAAVSDFYVPWESMAKHKIESASGPLNMQLNQVPKMLFILRKQWAPSAFCVSFKLETDPDILLQKAEAALRKYGMNVVVANELANYKDVVVMVTSNGRTTVRRPSKEDDVEEQLIDLLVEMHSEHIMQLNQDVHKLT

SEQ ID NO: 149458 - DNA, 813 bp, Arabidopsis thaliana
  CDS (1)..(813)
atggaggagattctagagaatcttaatgagttcatcaaactgaattcatcgtcacaagggggaaggaggattgtatgtgtgacttcagggggaacaacggttccattggagcaacgatgtgttaggtatatcgataatttcagctccggaaacagaggtgctgcttctactgagaatttcgtcaaggctggatatgctgtgatatttctgtataggaggggaacttgccaaccgtattgtcgatctcttcccgatgatccattccttgaatgttttgagttttctgataagactaacattcaaggcagcttactaaaactcccattctcaaccatatatgagtatcttcagatgttgcggttgattgcagaggcattgaaagatgttggtccatgttcaatgttttatcttgctgctgctgtatctgacttctatgtgccatggaagagcatgacagagcacaaaatagaatcaggatctggtcctttagacataagactagctcaagtccctaaaatgctatcagtcttgagatcaaattgggctccaaaggccttctgcatatcattcaagcttgagacagactcaaagattctgatggagaaggctacaaaggctctaagaaaatacaaagtgcacgcagttgtagccaatgagctatcaacccgtaaggaagaagttgtggttgtttcaagcagcggtaatgttgtggttagacgcgaatgcgataagcctgaatcttttgttgaagataatctcattcgtctcatcgtagatcgacattcaacatacatcaaagaatctcacaactga

SEQ ID NO: 149459 - protein, 270 aa, Arabidopsis thaliana
MEEILENLNEFIKLNSSSQGGRRIVCVTSGGTTVPLEQRCVRYIDNFSSGNRGAASTENFVKAGYAVIFLYRRGTCQPYCRSLPDDPFLECFEFSDKTNIQGSLLKLPFSTIYEYLQMLRLIAEALKDVGPCSMFYLAAAVSDFYVPWKSMTEHKIESGSGPLDIRLAQVPKMLSVLRSNWAPKAFCISFKLETDSKILMEKATKALRKYKVHAVVANELSTRKEEVVVVSSSGNVVVRRECDKPESFVEDNLIRLIVDRHSTYIKESHN

SEQ ID NO: 149460 - DNA, 954 bp, Arabidopsis thaliana
  CDS (1)..(954)
atgagttcgatctctggattggtggaagatgaaatcagttcgtttttcgaatcgtctccacctctgaagaacaaggaagagatcgtagccaatcttaatcagttcattgagctgaattcttcgtgtcaaggagggatgaggaggattgtatgtgtgacttcaggtggaactacagttccattggagcaacgatgtgtaagatacattgataatttcagctctggaaatagaggtgctgcttctactgagaatttcgtcaaggctggatatgctgtgatatttctctataggaggggaacttgtcaaccgtattgccggtatcttcctgatgatccattccttgaatgttttgagtttccagatgccaaaaacattcaagttcatgggtcacattcaggagctgtgaagatggctgttatggaccagcaagctgcagttgcagaaggtcgcttgcttaaactcccattctcaaccatatatgaatatctccagatgttgcggttgattgctacgatattgaaagatgtcggtccatgttcgatgttttatcttgctgctgctgtatctgacttctatgtgccatggttaagcatgacagagcacaaaatagaatcaggatctggtcctttggacataagactagctcaagtccctaaaatgctttcaatcttgagatcaaattgggctccaaaggctttctgcatatcattcaagcttgagacagactcaaagattttgctagagaaagctacaaaggctttacaaaaatacaaagtgcacgcagttgtagcaaatgaactattaacgcgtaaggaggaagttgtggttgtttcaagtagcggtaatgttgtggtgagacgtgatagcaataagccggaatctatcgtagaagataatctcattcgtctcctcgtagatcgacattcaacatacatcaaagaatctctcacttga

SEQ ID NO: 149461 - protein, 317 aa, Arabidopsis thaliana
MSSISGLVEDEISSFFESSPPLKNKEEIVANLNQFIELNSSCQGGMRRIVCVTSGGTTVPLEQRCVRYIDNFSSGNRGAASTENFVKAGYAVIFLYRRGTCQPYCRYLPDDPFLECFEFPDAKNIQVHGSHSGAVKMAVMDQQAAVAEGRLLKLPFSTIYEYLQMLRLIATILKDVGPCSMFYLAAAVSDFYVPWLSMTEHKIESGSGPLDIRLAQVPKMLSILRSNWAPKAFCISFKLETDSKILLEKATKALQKYKVHAVVANELLTRKEEVVVVSSSGNVVVRRDSNKPESIVEDNLIRLLVDRHSTYIKESLT

SEQ ID NO: 149462 - DNA, 951 bp, Schizosaccharomyces pombe 972h-
  CDS (1)..(951)
atgccagaaatggataaatctaacgatttctttgaggagaatccttgtcctaactcactcggtgatgtctcaagtctgattgaagattttataaaccttcaatcaaactcccaaaacattgcatttgttactagtggcggcacacttgtgcctcttgagcaaaatacggtgcgttttatcgataactttagtgcaggaaatcgtggtgcagcatctgctgaatacttttgcaagtctggatattcggtcatttttctgtatagaaattatagtttaatgccatttactcgacgatatgaaggtccctggacaaatttgtttgaaagaagtaatggcagtcaggagaagccttggattgtcaaacaagagtttcaatcgacagtattcaatgcactcaacgaattagatacatatacgaaacatcatcgactgataatgattccttatactacactcacagaatatttgtggtacctgaaagctatagctgaacgtttacagataatcgcttcaagagcattgttttatttagcagctgctgttagtgatttccatattccaccgaaggaattgagcgagcacaaaattcaaagtggttctggaagtaacaaattagaagtcaaaatgcatccggttccaaaatttctgcgtttcttggttgacacatgggctcctgaagcttctattatttcctttaaattagaaaccgaccctagtattctgattgataaagcaagagtagctttacaacgttataaccaccagctggtgatcgccaaccttctttcaacaaggaaacgatctgtcgcgtttgtaacctcaaaaacggttgaatggcttcatttgagcgacgatgacattgtaaaaaaggtagaaatcgagcaatacattgtttcgagggcaatttcgttgcacaaggaacgaattcaagagttcgcaaaggcaccttaa

SEQ ID NO: 149463 - protein, 316 aa, Schizosaccharomyces pombe 972h-
MPEMDKSNDFFEENPCPNSLGDVSSLIEDFINLQSNSQNIAFVTSGGTLVPLEQNTVRFIDNFSAGNRGAASAEYFCKSGYSVIFLYRNYSLMPFTRRYEGPWTNLFERSNGSQEKPWIVKQEFQSTVFNALNELDTYTKHHRLIMIPYTTLTEYLWYLKAIAERLQIIASRALFYLAAAVSDFHIPPKELSEHKIQSGSGSNKLEVKMHPVPKFLRFLVDTWAPEASIISFKLETDPSILIDKARVALQRYNHQLVIANLLSTRKRSVAFVTSKTVEWLHLSDDDIVKKVEIEQYIVSRAISLHKERIQEFAKAP

SEQ ID NO: 149464 - DNA, 942 bp, Drosophila melanogaster
  CDS (1)..(942)
atgacgcactgggaggacttctacaacacgcacctgccgcccgcggacttcgaggacaatcgctccctgctcaaggagttctgcgaacggcacaacaagctccagaatcgcatcgtcctcgtcacgtccggtggcaccacagttcccctggagcacaatacggtgcggtttgtggacaattttagtgctggaacgcgtggctccgcctcggcggaatacttcctcgaccacgactatgccgtgattttcatgcatcgccacaagtcgctggagcccttcacgcgccacttcaccggccagcagttcttcgacatgctggacattgcggacaacagccagagttcgacgatagccatcaaaccggattcggtggacgtgtttgctccggtgctggccaaatacaagatagcccgcgaaacgcagatgatcctgtacgtgaacttcaccagcgtggtggactacatgtggctgctccgcgccgcctgcgagtgcctggccgccttcgaggagcgagccgtgctctacctagccgcagccgtatccgatttctacatacccgaggacatgatgcccacccacaaaatgcaatcaggagatggagcgccgacgatttcgctgcagctggtgccaaaaatgctggcccccctcgccagtttgtgggtcccgcacgcctttgtggtgtcctttaaactggaaacggacgagagcctattgattgtgaaggcacgtgacagtctcaacaaatacaagcacaagctggtcattgccaatgtgctgcagacacgcaagcatcgcgtggtgttcgtcacgcccacagattcctacgagctgcatttgactcgcgaacagacgctgcaaggactcgagatcgaggagcccatcgtggccgatgtggtgcaaaagcacggcgagttcatcagtaacgctcaacagcgccaatga

SEQ ID NO: 149465 - protein, 313 aa, Drosophila melanogaster
MTHWEDFYNTHLPPADFEDNRSLLKEFCERHNKLQNRIVLVTSGGTTVPLEHNTVRFVDNFSAGTRGSASAEYFLDHDYAVIFMHRHKSLEPFTRHFTGQQFFDMLDIADNSQSSTIAIKPDSVDVFAPVLAKYKIARETQMILYVNFTSVVDYMWLLRAACECLAAFEERAVLYLAAAVSDFYIPEDMMPTHKMQSGDGAPTISLQLVPKMLAPLASLWVPHAFVVSFKLETDESLLIVKARDSLNKYKHKLVIANVLQTRKHRVVFVTPTDSYELHLTREQTLQGLEIEEPIVADVVQKHGEFISNAQQRQ

SEQ ID NO: 149466 - DNA, 1030 bp, Anopheles gambiae str. PEST
  CDS (80)..(1030)
cgtcgtgcagcccaacgtaaggatacgggacgcttttaatttgcacacggaattgtgttaaagccacctgcatatcagcatgacgtcgcattgggaggatttttatgctaagcatctaccaccgaactgtttcgaggacaaccgatcgctgctgaaggaattttgcgaccgccactacaaactcaagagtcacatcgtgctcgttacgtcaggtggtacgacggttccactggagcacaacacggtgcgctttgtggataacttcagcgctggcaatcgtggttctgcctcggccgagtactttctcgagcatggctatgccgttatatttatgcatcggaccaaatcactggagccgttttcgcgccacttcaccggccagcagctgctcgatatgctggagctacacgaggaaggcatgagcaccacaattaccgtaaaaccggactccgtggatgtgctggctccggtgctggacaagtacaaaaatgcccaggaaactcaccggatgctatacatcacctttaccagcgtggtcgactacatgtggctgttgcgggcggcctgcgaatcgttggcaccgttcgagcggaatgcggtgctgtttttggctgcggcagtttccgacttttacgtaccgcaggatgagatgccaacgcacaagatccagtctgggcatggggcgcccacgatatcgctacagctcgtgccaaaaatgttggccccactcgtgagcctctgggtgccgcacgcgtacgtcgtgtcgtttaagctggaaacggacgaggcgctgctgattgccaagtcgcgcgaaagtttgaacaagtacaagcacaagctagtgatcgccaatatactgcagacgcgcaagaaccgcgttgtgttcgtgacgcccagcagcaactatgagatcgtgctgaccaaggatcaggcgctgtccgggctcgaaatagaagaaccgatcgtggccgatgtggttcggcggcatcaggactacattcgggagtcggagcaacaaacgcaccaatga

SEQ ID NO: 149467 - protein, 316 aa, Anopheles gambiae str. PEST
MTSHWEDFYAKHLPPNCFEDNRSLLKEFCDRHYKLKSHIVLVTSGGTTVPLEHNTVRFVDNFSAGNRGSASAEYFLEHGYAVIFMHRTKSLEPFSRHFTGQQLLDMLELHEEGMSTTITVKPDSVDVLAPVLDKYKNAQETHRMLYITFTSVVDYMWLLRAACESLAPFERNAVLFLAAAVSDFYVPQDEMPTHKIQSGHGAPTISLQLVPKMLAPLVSLWVPHAYVVSFKLETDEALLIAKSRESLNKYKHKLVIANILQTRKNRVVFVTPSSNYEIVLTKDQALSGLEIEEPIVADVVRRHQDYIRESEQQTHQ

SEQ ID NO: 149468 - DNA, 1320 bp, Magnaporthe grisea 70-15
  CDS (1)..(1320)
atgtccaacgtaccacaaccgcctaaaccggctggtgcagaaccctccgcagcggccgaggaggaccactacttcagcagcaacccgccgccgcggggtctgtcggagcatgtggcgctagcctcggctttcatcgagcagcacgccgccgccaaccgccgagtggtgctggtgacttctggcgggacgacagtgcccctggagcgccagacggtgcgcttcattgacaatttcagcgccgggacccgcggtgccacctcggccgagtacttcctcgaggccggctacgcagtaatcttcctgcaccgtcagttctcactgctgccctactcgcgccactacagccacacaccgaccgactgcttcctcgacttcctgcacgaggagaacggcgccgtcgtggcggagccgggccgcgctgagaagatgctcggcgtcctgcgcaagtaccgcgccgccaagcagggcaacatgctgctcatgctgccctttgtcaccatcaccgactacctgtacgagctcagggccgtcgcgcagctgatgcgcccgctcggacccaggggtctgctgtacctcgccgcggccgtgtcggacttcttcgtcccgccggagcgcatggccgagcacaagatccagtccaccacggccgtggagaggatgaagcacagcagtagcagcacggagcgaaagccgcaggcgcaggcggcgcctccgttgggcgccctccccatcgttcccatccctccgggcgagcagcccctccagcagcccaccaccctcagcgccgaggagctcaacacggccgtcgccaaggagcaggccgccgccgacgacgagacgtttgacaactttgactcgtcacccgccgtgccgcgctccaagcgcctgattgtagacctggatccggtacccaagttcctcaagaacctggtcgacggctgggcgccgcagggcatgatcgtctcgttcaagctcgagacggacccggccatcctagtacacaaggcccgctactcgctcgaccgctaccagcatcacctcgtcatcggcaacctcctctccacccgcaagtgggaggtcgtctttgtcgcccccggcgccgccgatcgctggatccgcgtgcccaccggcaggaggaggggctccgtcagcggcagagaggacatggtcggcgccgccgaggccaagatgcgagtggccgaaatgcccctggatccagctagtctgcccgagggtgaacccgagatggagatagagagtttgatcatccctgctgttgatgagttgcataccaggcacattaagagcattgctccatag

SEQ ID NO: 149469 - protein, 439 aa, Magnaporthe grisea 70-15
MSNVPQPPKPAGAEPSAAAEEDHYFSSNPPPRGLSEHVALASAFIEQHAAANRRVVLVTSGGTTVPLERQTVRFIDNFSAGTRGATSAEYFLEAGYAVIFLHRQFSLLPYSRHYSHTPTDCFLDFLHEENGAVVAEPGRAEKMLGVLRKYRAAKQGNMLLMLPFVTITDYLYELRAVAQLMRPLGPRGLLYLAAAVSDFFVPPERMAEHKIQSTTAVERMKHSSSSTERKPQAQAAPPLGALPIVPIPPGEQPLQQPTTLSAEELNTAVAKEQAAADDETFDNFDSSPAVPRSKRLIVDLDPVPKFLKNLVDGWAPQGMIVSFKLETDPAILVHKARYSLDRYQHHLVIGNLLSTRKWEVVFVAPGAADRWIRVPTGRRRGSVSGREDMVGAAEAKMRVAEMPLDPASLPEGEPEMEIESLIIPAVDELHTRHIKSIAP

SEQ ID NO: 149470 - DNA, 1098 bp, Gibberella zeae PH-1
  CDS (1)..(1098)
atggctacacccgcaaacaccaccgcagaggccctcgcctcagaggaagcctatttctctcaaaaccctcccccgcgcaacctggcagcccacacagcccttgcagatggcttcatttcctcccacgccgctgcaggccgccgcgtcgtcctagtcacatcgggtggcacaactgttcccctggagaagcagacagtccgctacattgacaacttcagtgctggtacccgtggcgctacgagcgcagagtactttctcgaagctggctacgccgtcatcttcttgcatcgccagttcagtctgctgccgtactcgagacactactcgcacgctacagactgctttctggactttttgaccgaggatgctgatgataggattgctgtgaggggcgaggtgcaggataagatgagagaggtgctgagaaagtatcgtaaggcgagggataataacatgcttctcactctgccctttgtcactattgtcgactacctccacgagctgcgtgaaatcgcccggctcatgcgtcccctcggcccatctggcctcctgtacctcgccgctgccgtgtcagacttttttgttcctcccgaccgcatggccgagcacaagatccagtctaccaacgctgttgagcagaagcgcacagaagaagaggagacttttgacaactttgactcatctccttctgtcccgcgctcaaagcgtctcattgttgatctcgaccccgttcccaagttcctcaagaaccttgtcgacggctgggcgccagagggcatgattgtgtctttcaaactcgagacagatcctgcgctgctcgttcgcaaggctcgctacagtcttgatcgctaccagcaccatctcgtcatcggaaacctgctctcaacgcgaaagtgggaggttgtctttgtgagtcctagaagggatgatcgctgggtgcgcgtgcctcgagagggcggttggggagaggctgaagagaggccactcgttgcagaggaactgccagcccaagatcctgaccttgagatcgaatctcttattatccctgccgtccaggagctacatggtgagcacatcaaggggcagagtaagaagtaa

SEQ ID NO: 149471 - protein, 365 aa, Gibberella zeae PH-1
MATPANTTAEALASEEAYFSQNPPPRNLAAHTALADGFISSHAAAGRRVVLVTSGGTTVPLEKQTVRYIDNFSAGTRGATSAEYFLEAGYAVIFLHRQFSLLPYSRHYSHATDCFLDFLTEDADDRIAVRGEVQDKMREVLRKYRKARDNNMLLTLPFVTIVDYLHELREIARLMRPLGPSGLLYLAAAVSDFFVPPDRMAEHKIQSTNAVEQKRTEEEETFDNFDSSPSVPRSKRLIVDLDPVPKFLKNLVDGWAPEGMIVSFKLETDPALLVRKARYSLDRYQHHLVIGNLLSTRKWEVVFVSPRRDDRWVRVPREGGWGEAEERPLVAEELPAQDPDLEIESLIIPAVQELHGEHIKGQSKK

SEQ ID NO: 149472 - DNA, 945 bp, Apis mellifera
  CDS (1)..(945)
atgaattcaacttgggaagatttttatgctatccatccaccacctcaagattttgatcagagtgaaaaattattaaaagcatttgtacaacgacaattgaaaaaaaataatatggttgtattaataacaagtggtgggacaacaatacctctagaacacaatacagtaagattcgtagataattttagtgcaggaacaagaggatctgtatctgcagaatactttctagaaaatggatattgtgtaatttttgtgtatagagctaattccttggaaccattttcaagacattataaaggacagaaaattttagatatgatagaaatcaataaacaaaatgaaaaatgtatagttacagttttaccgcaatatacagaaaatttggtaaaaatatttcataaatacaaagaaactttaaatcaagataaattattacaaatcactttcactactctttccgaatatctttggcttcttcgatctgcttgtcaagcattagctccacttaaaaatagagcaattttatatttagcagctgcagtttcagatttttatattccatctaatgaattggcagttcataaaattccttctactggaccaccaacaatatctcttcaattagtaccaaaaatcttagctcctcttgtaagtttatgggttccagaagcttttgtggtatctttcaaattagaaactgatgacaatcttctaatttcaaaagcaagagaggcactaaataaatataaacacaacttagttatagccaatgtattgcacactcgaaaacaaaaagtaataattgttagtcaagaggatatctatgttatttctcttactaatgaacaattaaataaaggtgaagaaattgagcaatcgattgttaataatctcattgaaaaacatcaaatttttatacaatctactcaacaatgcgaatgttga

SEQ ID NO: 149473 - protein, 314 aa, Apis mellifera
MNSTWEDFYAIHPPPQDFDQSEKLLKAFVQRQLKKNNMVVLITSGGTTIPLEHNTVRFVDNFSAGTRGSVSAEYFLENGYCVIFVYRANSLEPFSRHYKGQKILDMIEINKQNEKCIVTVLPQYTENLVKIFHKYKETLNQDKLLQITFTTLSEYLWLLRSACQALAPLKNRAILYLAAAVSDFYIPSNELAVHKIPSTGPPTISLQLVPKILAPLVSLWVPEAFVVSFKLETDDNLLISKAREALNKYKHNLVIANVLHTRKQKVIIVSQEDIYVISLTNEQLNKGEEIEQSIVNNLIEKHQIFIQSTQQCEC

SEQ ID NO: 149474 - DNA, 1077 bp, Candida glabrata CBS 138
  CDS (1)..(1077)
atggtcccaccatatagcaacgggaggccgaacattcatacctctatcactgaggtcgagcatgccatcgaccggagtatcagtgagaatgtgttcccagtggcacagacttctgaagaggctagtttcttccacaataatcctaggccagcgtatatggatgagctaatacaggatacccgtgagtttatcgagtaccagcacgagcaaggccgggacaagatagtgttagtgacttctggtggtaccacagtgcccttggagaacaacacagtgaggttcattgacaacttctctgctggtacgcgtggtgctgcaagtgctgagcagttcctcaagaacggttacagcgtcatattcttgcatagagagttctcgttgacaccttacaacaggaagtttacgcataacttgaagaactcgttcctggacttcattgacaaagatggggttgtgaagcccgagttcaaggagcaagtgctcgagaataagaggctttacgacttatacgtctctgaggagaagaagctgctcctactaccctttaccactgttaatcaatatctgtggtcgttgaaaagcgtagcaaagctgctggactctcgtggtagtctgttctacctggcagcagcagtgagcgacttcttcgttccacactcacgtatgcctcagcacaagatccagtcccgagactacaagcttgacggagatagcagcagtgatgataccactacgacaacagcagacgggaaactaatagtcaacttagaccctgttcctaaattcctaagaagattagttgaatcttgggcatcgcaagccatgatagtgtctttcaagctagagaccgatgaacgcatactgatccacaaggcaattactgcactagatagatacaaccaccaactggtgataggtaacttactacagacaagaaacaaagaggtagtgtttgtgtcttcgacaaaccgtgatggtgattggattagattggataactccgtgaagacaatagaagagctgatagtaccagaagtaatcaagcgtcacgatgcttgggtagccaaaaacacataa

SEQ ID NO: 149475 - protein, 358 aa, Candida glabrata CBS 138
MVPPYSNGRPNIHTSITEVEHAIDRSISENVFPVAQTSEEASFFHNNPRPAYMDELIQDTREFIEYQHEQGRDKIVLVTSGGTTVPLENNTVRFIDNFSAGTRGAASAEQFLKNGYSVIFLHREFSLTPYNRKFTHNLKNSFLDFIDKDGVVKPEFKEQVLENKRLYDLYVSEEKKLLLLPFTTVNQYLWSLKSVAKLLDSRGSLFYLAAAVSDFFVPHSRMPQHKIQSRDYKLDGDSSSDDTTTTTADGKLIVNLDPVPKFLRRLVESWASQAMIVSFKLETDERILIHKAITALDRYNHQLVIGNLLQTRNKEVVFVSSTNRDGDWIRLDNSVKTIEELIVPEVIKRHDAWVAKNT

SEQ ID NO: 149476 - DNA, 1056 bp, Kluyveromyces lactis NRRL Y-1140
  CDS (1)..(1056)
atgactggaagaaggattcatacatcgattacagaggtttcaaaggccattgaccgtaccgtcgatgaaactgctttgccaattgctcatctgagcgatgaggacaactatttcagaacaaatcccagacctgtgtacatggacgatttgttaacggaggctacacagttcatagagtatcagaagtctcaaggtcgcgagaaaattgttctggtgacgtctggtggtactacggttcccttagaaaacaatacagttcgcttcatcgataatttttcggcaggaactcgtggtgcatctagtgcagagcagttcttattcaatgggtactctgtgatattcctccatagggagttttctttgactccattcaacaggcctttcattcataatacagaaacttgtttcttggattattttgatgaggatgggagtatttcaccaaagtataaggacttgatacttcaaaataaacgtgactatgaccagttcatatacaaggaaaagaagttgttgatgttgccgtttacaacggtgaaccagtacttgtggtctttgaagacaattgccgctttgatgaataacagcggatgtttgttctaccttgcggctgccgtgtcggactttttcgttccatattcaaggttaccacaacacaagattcaatcgcaagaagctaaccaatcactgaatgacggaaaccaaagctctacaacagttggcgggaaattaatagtaaatcttgatcctgtgcccaaatttttaaggagattggttgaatcttgggccactcaagcaatgataatctcttttaaactagaaacggataacaaccttttaattcataaagctcatcaggctttggaccgttataaccaccagttagtgataggtaatctattgcaaacaagaaacaaagaagtggttttcgtttcggaacaaaaccgcgatggtgactggataagaatcactgatgatcataaaaacattgaaaagctgatcgtacaagaaatcgtcaagagacatgatgcatggaggaaaactgggaaacaatga

SEQ ID NO: 149477 - protein, 351 aa, Kluyveromyces lactis NRRL Y-1140
MTGRRIHTSITEVSKAIDRTVDETALPIAHLSDEDNYFRTNPRPVYMDDLLTEATQFIEYQKSQGREKIVLVTSGGTTVPLENNTVRFIDNFSAGTRGASSAEQFLFNGYSVIFLHREFSLTPFNRPFIHNTETCFLDYFDEDGSISPKYKDLILQNKRDYDQFIYKEKKLLMLPFTTVNQYLWSLKTIAALMNNSGCLFYLAAAVSDFFVPYSRLPQHKIQSQEANQSLNDGNQSSTTVGGKLIVNLDPVPKFLRRLVESWATQAMIISFKLETDNNLLIHKAHQALDRYNHQLVIGNLLQTRNKEVVFVSEQNRDGDWIRITDDHKNIEKLIVQEIVKRHDAWRKTGKQ

SEQ ID NO: 149478 - DNA, 1041 bp, Debaryomyces hansenii CBS767
  CDS (1)..(1041)
atgacaccaaaatcaccacagcagaagaaataccatacgtccaatccaattgctgaaactgcaattgacagaactattccagatttgccaattgcacagttatctgacgaagataaatatttcagaactcaccaagctcccccatatttactggagatcgagcaacaggtgacagcttttattgaatttcatgctgctaacactggaaaacgtatcgcattggtaacatctggtggtacaactgttccattagagaataatactgttagatttattgataattttagtgccggtacgagaggagcaacgtcggcagagtacttcttagagaatgggtatgctgttatatttttacatagagagttttctcttttgccatactcaagacattacagtcatactactaattgtttcttagattatatgacagaagttaataataaggtcgaaattaaccccgattttgcagatgagatgttggttgtcttaagaaagtataaagaagcaaaagaatcacagtcgttattattaataccatttacgaatgttaatcaatatttatatacattgaaattgatggctattttattacaaaaaattgaagacaaagctttgttttacttagcagctgccgtctcagatttcttcttaccacagtcgagaatgcctcagcataaaatacaatcccaagctgcaggtaaattgataattgacttagaacaagttccaaagttcttgagaagattagttgacaactgggcaccatctgcaatgattgtttcattcaaattagaaacggatcatctgatcttaatcgaaaaatccaaaggtgcattagaaagataccaacatcaattggtgattggtaacttattacaaaccagaaagaaggaagttgtatttgttcattcagatggatcagaactttggatcaaattaacagataaacaaaaagaagaccacatggatattgaaggattaattattcctgcagtaattaaagaacattccgaatgggttgtaaaacatcattctaaataa

SEQ ID NO: 149479 - protein, 346 aa, Debaryomyces hansenii CBS767
MTPKSPQQKKYHTSNPIAETAIDRTIPDLPIAQLSDEDKYFRTHQAPPYLLEIEQQVTAFIEFHAANTGKRIALVTSGGTTVPLENNTVRFIDNFSAGTRGATSAEYFLENGYAVIFLHREFSLLPYSRHYSHTTNCFLDYMTEVNNKVEINPDFADEMLVVLRKYKEAKESQSLLLIPFTNVNQYLYTLKLMAILLQKIEDKALFYLAAAVSDFFLPQSRMPQHKIQSQAAGKLIIDLEQVPKFLRRLVDNWAPSAMIVSFKLETDHLILIEKSKGALERYQHQLVIGNLLQTRKKEVVFVHSDGSELWIKLTDKQKEDHMDIEGLIIPAVIKEHSEWVVKHHSK

SEQ ID NO: 149480 - DNA, 1002 bp, Yarrowia lipolytica CLIB122
  CDS (1)..(1002)
atgtacacaaccaacgccatcaaccccgaaaaggccattgacagatctgtggcagaccagcctccggccgaggaggatctgtactttgagcagaaccctgctcctgagtatctgcctgagtttgagcgaaagctgtctgagtttctgaccaataacggcaccagaaaggtcgctgtagtcaccagtggaggtaccactgtccctctagagaacaacactgttcggttcattgacaacttttccgctggaactcgaggtgccacatcagcagagtacttcctcgagaatggctatgccgtggttttcctccaccgtcagttctctttgcttccttactctcgacattacacccactccacaaactgttttctggactacatggtggagtccgagaccgagcctgggtctgtcaaggttgacgaaaagtaccaggtccagatgctggatgtgctgcgaaagtacaagcaggcccagaaggacaacactctgctactgctgcccttcaccactgttacccagtacctgttttcgctccgatgcatcgctctgacaatgtccaagctgcatgtggacacccggtgtgtgttctatttggctgccgcggtgtctgatttcttcatgcccacctctagactgccccagcacaagatccagtcttctggaggtgaacttgtggtcaacctggacccagttcccaagttcctaaagcgactggtcgaggcttgggcgccacgtgtcatgattgtgtcattcaagctggagacggacgagtccattctcgagtccaaggccaagacggcgctggagcgatacaaccaccagctggtgattggtaacctgctgcagacccgaaagaaggaggtcatttttgtgactctggaggagacggagaagtactcgctgacggatgaggaggagaaggagggtaaggagattgaggagatcattgtccctgaagtgattaagcgacatgatgtgtggcaggagaaggtgtgcaactag

SEQ ID NO: 149481 - protein, 333 aa, Yarrowia lipolytica CLIB122
MYTTNAINPEKAIDRSVADQPPAEEDLYFEQNPAPEYLPEFERKLSEFLTNNGTRKVAVVTSGGTTVPLENNTVRFIDNFSAGTRGATSAEYFLENGYAVVFLHRQFSLLPYSRHYTHSTNCFLDYMVESETEPGSVKVDEKYQVQMLDVLRKYKQAQKDNTLLLLPFTTVTQYLFSLRCIALTMSKLHVDTRCVFYLAAAVSDFFMPTSRLPQHKIQSSGGELVVNLDPVPKFLKRLVEAWAPRVMIVSFKLETDESILESKAKTALERYNHQLVIGNLLQTRKKEVIFVTLEETEKYSLTDEEEKEGKEIEEIIVPEVIKRHDVWQEKVCN

SEQ ID NO: 149482 - DNA, 1137 bp, Aspergillus nidulans FGSC A4
  CDS (1)..(1137)
atgtcgcccgcagacagcgagtccgcctacttcaacaactaccctccacccaaagccctttccaaacatgaatcgctcgccagatcgtttatagagtaccatgtcgaatccagtcggcgcgtagtactcgtcacctccggaggaacaacggttcctctcgaaaaccaaactgttcgcttcatcgacaacttctctgcaggaacgcgaggagcgacatccgctgaatacttcttggagcagggccactcgacgaattgcttcctggatttcatggacgaggcgtttccgagtgatgttagccgttcagatcatggtcctatcgtggtgcggaaggagtaccaggatgagatgcgcgacgtgcttcgaaagtacagatacgcgaaacagaacaatcttcttctgctgcttccattcacaacggtctccgagtaccttttcgaactgcgcatgctcgccaagtgcatgaacccgctcggtcctaatgcgctgttctacctcgccgcagcggttagtgactttttcatcccgcgcgaccgaatggcagagcataagatccaatcctccgaaataccaaaggagttccaaggtaacgatgaagctgtgggtgccgatgacctttacacgggcgggttcgaacagaagcaggagtcgagcaaaaagttggtcattaacctagacccggttcccaaattcctccatcaactcgtagatggctggtcaccggagggtagcatgatcgtgtcgttcaagctcgaaaccgatcccaatctcctcgtctataaggctcagacggcgctccagcggtacgcccaccacctagttattggaaatttgctttctaccagaaaatgggaggttgtcttcgtcacaccgaacccaccttatgagcgctggattcgagttcccaagtcgcgccggagtaagagcatctccggcgtcgaagaccaggtgggcaaggctgaggcagcgaagcggtcatcaggagaccagaccttggcggccccagtgggtgaagagccgtctaaggaagaaaaggacggagaaggcacgtcccgtgagggcacggagattgaaagcttgatcataccagagctagtcaaactgcattcggagatgatcgagaagttcaagcgatag

SEQ ID NO: 149483 - protein, 378 aa, Aspergillus nidulans FGSC A4
MSPADSESAYFNNYPPPKALSKHESLARSFIEYHVESSRRVVLVTSGGTTVPLENQTVRFIDNFSAGTRGATSAEYFLEQGHSTNCFLDFMDEAFPSDVSRSDHGPIVVRKEYQDEMRDVLRKYRYAKQNNLLLLLPFTTVSEYLFELRMLAKCMNPLGPNALFYLAAAVSDFFIPRDRMAEHKIQSSEIPKEFQGNDEAVGADDLYTGGFEQKQESSKKLVINLDPVPKFLHQLVDGWSPEGSMIVSFKLETDPNLLVYKAQTALQRYAHHLVIGNLLSTRKWEVVFVTPNPPYERWIRVPKSRRSKSISGVEDQVGKAEAAKRSSGDQTLAAPVGEEPSKEEKDGEGTSREGTEIESLIIPELVKLHSEMIEKFKR

SEQ ID NO: 149484 - DNA, 1110 bp, Ustilago maydis 521
  CDS (1)..(1110)
atgtcggatgctacggcgacatcaccaaaatggtcaagcgatcgatttttccagacgcaagcgccaccggcgaatctctcggaagcatcctcggccgcatccgagttcgtccagcgacacatcaaagaagggcgtcgagtagtgctggtcacctcgggaggaacaacggtgccgctggagaagaacgtggtacgctttcttgacaacttttcggcgggaactagaggtgccacgtcggccgagtacttcctttccgccggctatgctgtgatcttcatgagccgacagcattcgcttgcaccgtacacgagacactatagtcataccacgaaccctttcctggatttgcttgcggatcctgcgacgcacgttcacactgattcgcccgcgtcggcctcgggaggagacaacatcaccgtactcaagcagcatgtggcgcatcttcgaccgatcctttcggcgtatcaccacgcgcgtacttcgggcctcctgcatacagtgccattcgtgacggtcaacgactacctttggctcttacgagaaatgtctcgtgtaatgcagccgttgggtcgcaatggaatgtactaccttgctgcagcggtgagtgactttttcatcccttctaccaacgtgccggaacacaagatccagtcgggaaaaggctcgttggtgatcgagatggatcaagtcccgaaagtgctgaaacccatggtggagcaatgggttcccgaaggctacctagtcagcttcaagctcgagacggatccgaagctgctgatccccaaagctgtcggtgcactgcagagatacgggcatcaacttgtcattgggaacgacttgaatcgacgcaagttcgaggtggtgtttgtagaacggaaaccggagaccccggtatcatctacatcgaccaggccgacacatagcttgaatgtcgacggccaacaatattcggcgacgtggatgcggctcgaagatgcgagcgctgtggcagataccgaaggaggcggaaagggcggagagaaggagctcgaagaagacattgttcacgagctctgtagcaggcaccaacagtggatttccaattcgcccggtgctgctgccaggatttga

SEQ ID NO: 149485 - protein, 369 aa, Ustilago maydis 521
MSDATATSPKWSSDRFFQTQAPPANLSEASSAASEFVQRHIKEGRRVVLVTSGGTTVPLEKNVVRFLDNFSAGTRGATSAEYFLSAGYAVIFMSRQHSLAPYTRHYSHTTNPFLDLLADPATHVHTDSPASASGGDNITVLKQHVAHLRPILSAYHHARTSGLLHTVPFVTVNDYLWLLREMSRVMQPLGRNGMYYLAAAVSDFFIPSTNVPEHKIQSGKGSLVIEMDQVPKVLKPMVEQWVPEGYLVSFKLETDPKLLIPKAVGALQRYGHQLVIGNDLNRRKFEVVFVERKPETPVSSTSTRPTHSLNVDGQQYSATWMRLEDASAVADTEGGGKGGEKELEEDIVHELCSRHQQWISNSPGAAARI

SEQ ID NO: 149486 - DNA, 1104 bp, Cryptococcus neoformans var. neoformans B-3501A
  CDS (1)..(1104)
atggcatccactccgacctccttctccacagagtcctacttccatactcagaagtccccccccaacatccacgacacgaccgcaaaagtcctccagttcgtagacaaatggagagctgtagacggcaaaaaggtcgtcctcgtcactagcggaggaacgacggtcccactcgagtctaataccgtgcgctttctggacaacttctccgctgggactcgaggcgcaacctcggcagaatatttcttgtcccagggctatgctgtaatctttatgcacaggctccactccctccgccccttttctcgacactattctcattccctcaatccattcctagatctcttgtcgatcgtcccctcttcctctggagactcttccatcgtcgtatccccagaccatacaaaggagctcttgcccattttagaagcataccacgaggctcaagcatcagggacgcttctcagtatcgaatttcaaaccgtcaacgagtacctgtggcttctcaaaggcgtcactggcgccatggtcccgctcggacgaagagctctattctatctcgcagccgcagtgtccgactttttcttgcctgaagacaaaatggctgaacacaaactacagtccggaaaggggacattggctctcgagatggaccaagtgccaaaggttttgaaacccctcgtccaagagtggatgcctgaaggctatattgtcagcttcaagcttgagaccgatccggccttgctgatacccaaatcaagggcggctctcgcgagatacggtcatcagctggtcattggaaacgaacttcaccgccgcaaatacgaagtcgtttttgtagaacgtacaaaatcgccatctcacctccgattgcaagccaccaatgagaacaattttgcgaccgagacacccccattggaaaaatctgaaacgcaaaatgaagagtttatagaaagatggcttaggcttgacgatattcagccaggagcagctgagccgggcaaggcggtcgggggcaagggcaaggatggtgaagtcgagatagaagagctaatagtgaaagagctcgtaaacagacatcaacaatggattgaagccaaagcttga

SEQ ID NO: 149487 - protein, 367 aa, Cryptococcus neoformans var. neoformans B-3501A
MASTPTSFSTESYFHTQKSPPNIHDTTAKVLQFVDKWRAVDGKKVVLVTSGGTTVPLESNTVRFLDNFSAGTRGATSAEYFLSQGYAVIFMHRLHSLRPFSRHYSHSLNPFLDLLSIVPSSSGDSSIVVSPDHTKELLPILEAYHEAQASGTLLSIEFQTVNEYLWLLKGVTGAMVPLGRRALFYLAAAVSDFFLPEDKMAEHKLQSGKGTLALEMDQVPKVLKPLVQEWMPEGYIVSFKLETDPALLIPKSRAALARYGHQLVIGNELHRRKYEVVFVERTKSPSHLRLQATNENNFATETPPLEKSETQNEEFIERWLRLDDIQPGAAEPGKAVGGKGKDGEVEIEELIVKELVNRHQQWIEAKA

SEQ ID NO: 149488 - DNA, 1638 bp, Tribolium castaneum
  CDS (1)..(936)
atgtctcattgggaggagttttacgccacgcatttgcccccaactgactttgaggataaccgaatcctcctcaaagagttctgcgagcgtcacaaaaaagcaggcgaacgtattgttctcataacgtcagggggcacaactgtgccccttgagcacaacaccgttcgtttcgtcgataatttcagtgctggaactcggggggctgcctcagccgagtatttcctcgagcatggttacgttgtcattttcatgcaccgtttaaagtcactggagcccttcacgagacactttagcgggcaaaaattcatggacatgttagagttgcacgatcagggccccaatacgagtatcacagtgaaacccgacagtgtggacgtgttagcccccgttttggcgagttataagcatgcccaagaagggggcagagtcctatacgtgacgtttacaaccgtctcggattatttctggcttttgagggctgcctgtgaatgcttggccattttcgagaccaaagcacttttattcctagcagctgcagtatccgatttttacgttccttcaaacgaaatgccgacgcataaaatccagtcaggggcgggcgcccccacgattcaattgcaactagttccgaaattgttggccccacttgttaatttatgggtgccccatgcgtttgtcgtttcgttcaaattggagactgacgaaagtattttgatcgtaaaagcgagagattcactcaataaatacaaacataaacttgtcatcggaaatatgcttcaaactcggcgccaaaaagtcgtttttgtcacaaaagacaccagttttgaggtgtctctaacacgcgaacaaatgctcaacggtatggaaattgaagactcgattgttacgaacgtcatcaccaatcacaccgaattccttaaaacgcatcagtattaaaaaaatggggactttcgttaagcgaaatcagggtaaataaccttaaaacaatccttgtatttttaggggcagagggactgaaaatcatgaccattcatttacatatctttgaacgaacgaagtgttatattatttataattaggagggcaaaaagtcatgttatgttaacacaaaagtgtggttatattatttaaaagttctgatttttacgtttcatcgttaatgggctgccggggcacctaaacacccttcttgtaaaattttattgtttaaaagtgtaatattaatgcatgttatgttatgacaaaagtgaggttatgtcatttaattaagattttttcacgtttggtcaataatgggggctgccggggcacaaaaatgtatcgaagtaaagcgtgtgcgattgctttctgtgcaattttatcgttttaagtgtgataatgcaaaagtgaggttatgttatcttttgtagaaatggggcccctgatttgttagtagtggccaaaaaacgtaaatgttggtgtaataagtgtaaaaatgtgccagtaacgctatcattgtacagataaatgttgatatacctatttttatttttatacattcatctactttggagtttatgttattagggggggggggcacagtttatgattgtcacaattttgtaaaaaagtggctaaataaatgtttttattaaatgg

SEQ ID NO: 149489 - protein, 311 aa, Tribolium castaneum
MSHWEEFYATHLPPTDFEDNRILLKEFCERHKKAGERIVLITSGGTTVPLEHNTVRFVDNFSAGTRGAASAEYFLEHGYVVIFMHRLKSLEPFTRHFSGQKFMDMLELHDQGPNTSITVKPDSVDVLAPVLASYKHAQEGGRVLYVTFTTVSDYFWLLRAACECLAIFETKALLFLAAAVSDFYVPSNEMPTHKIQSGAGAPTIQLQLVPKLLAPLVNLWVPHAFVVSFKLETDESILIVKARDSLNKYKHKLVIGNMLQTRRQKVVFVTKDTSFEVSLTREQMLNGMEIEDSIVTNVITNHTEFLKTHQY

SEQ ID NO: 149490 - DNA, 918 bp, Oryza sativa subsp
  CDS (1)..(918)
atggtcgccgccgaggagaacccggagtccttcttcgcggcggcgccgccgctgcgggacgccgacgccgtggccgcgaggctgggggaattcatcgcccgcaactcctccgcagcgggcgcgggcggcggcggcaggcggatcgtgtgcgtgacgtcgggcgggacgacggtgcctctggagcagcgctgcgtgcggtattttttgaaggctggctatgcagttatcttcctccatcgacgaggaagctgccagccttattgtaggttcctccccgatgattcattcctcaaattctttgatgtcgatgcagaatcgaaggttcaagtggcggagtgccacgcgccagtggtcaagaaagcaattggagattattgcaaggcaattgaaggcggctatctgttgaaactcccattcactacaatatttgaataccttcagctattgaagatggttgctacatctataagttcggctgggccactcggaatgttctatcttgctgcggctgtgtctgatttctatgtcccttgggatagcatggccaaacataagattcagtcaggtggaggccctctggatatgaggctcagtcaagttccgaaaatgctttcagtgttgcgaaaccaatgggcccccttggcgttctgtatatcatttaagttggagacggattcggacatccttattcagaaagcagatatggctctgaacaagtacaagatgaacatcgttgtggccaatttgcttgcaacgtacaaagaggaagtcattattgtaacagacaaagaaaggagtactatccgaaagatgaacaaggatgaggatctggaaatgcagataatcaaaatcctatcacacaatcactcgaagtacatatgcggaagcacaaacgggtgcgtccagagcccatattga

SEQ ID NO: 149491 - protein, 305 aa, Oryza sativa subsp
MVAAEENPESFFAAAPPLRDADAVAARLGEFIARNSSAAGAGGGGRRIVCVTSGGTTVPLEQRCVRYFLKAGYAVIFLHRRGSCQPYCRFLPDDSFLKFFDVDAESKVQVAECHAPVVKKAIGDYCKAIEGGYLLKLPFTTIFEYLQLLKMVATSISSAGPLGMFYLAAAVSDFYVPWDSMAKHKIQSGGGPLDMRLSQVPKMLSVLRNQWAPLAFCISFKLETDSDILIQKADMALNKYKMNIVVANLLATYKEEVIIVTDKERSTIRKMNKDEDLEMQIIKILSHNHSKYICGSTNGCVQSPY

SEQ ID NO: 149492 - DNA, 918 bp, Oryza sativa subsp
  CDS (1)..(918)
atggtcgccgccgaggagaacccggagtccttcttcgcggcggcgccgccgctgcgggacgccgacgccgtggccgcgaggctgggggaattcatcgcccgcaactcctccgcagcgggcgcgggcggcggcggcaggcggatcgtgtgcgtgacgtcgggcgggacgacggtgccgctggagcagcgctgcgtgcggtattttttgaaggctggctatgcagttatcttcctccatcgacgaggaagctgccagccttattgtaggttcctccccgatgattcattcctcaaattctttgatgtcgatgcagaatcgaaggttcaagtggcggagtgccacgcgccagtggtcaagaaagcaattggagattattgcaaggcaattgaaggcggctatctgttgaaactcccattcactacaatatttgaataccttcagctattgaagatggttgctacatctataagttcggctgggccactcggaatgttctatcttgctgcggctgtgtctgatttctatgtcccttgggatagcatggccaaacataagattcagtcaggtggaggccctctggatatgaggctcagtcaagttccgaaaatgctttcagtgttgcgaaaccaatgggcccccttggcgttctgtatatcatttaagttggagacggattcggacatccttattcagaaagcagatatggctctgaacaagtacaagatgaacatcgttgtggccaatttgcttgcaacgtacaaagaggaagtcattattgtaacagacaaagaaaggagtactatccgaaagatgaacaaggatgaggatctggaaatgcagataatcaaaatcctatcacagaatcactcgaagtacatatgcggaagcacaaacgggtgcgtccagagcccatattga

SEQ ID NO: 149493 - protein, 305 aa, Oryza sativa subsp
MVAAEENPESFFAAAPPLRDADAVAARLGEFIARNSSAAGAGGGGRRIVCVTSGGTTVPLEQRCVRYFLKAGYAVIFLHRRGSCQPYCRFLPDDSFLKFFDVDAESKVQVAECHAPVVKKAIGDYCKAIEGGYLLKLPFTTIFEYLQLLKMVATSISSAGPLGMFYLAAAVSDFYVPWDSMAKHKIQSGGGPLDMRLSQVPKMLSVLRNQWAPLAFCISFKLETDSDILIQKADMALNKYKMNIVVANLLATYKEEVIIVTDKERSTIRKMNKDEDLEMQIIKILSQNHSKYICGSTNGCVQSPY

SEQ ID NO: 149494 - DNA, 1065 bp, Ostreococcus tauri
  CDS (1)..(1065)
atgtccagagacgccgtcgacgcctcgccgtcgacctcggacgcattcttcgccgccgacgacgcgtacgtaccgcggacggcgctagaaaaagcgtcgcgcggtcagaatttcctactcgagcgatggaacgcgcgcgagaaacgaaacaccgacgacgacgcgtcgtccgcgctcgcgaagacgatcgtggtcgtgacctccggagggaccaccgcgccgttggagcggacgcaggtgcgatgcgtcgataacttttcgtcgggaacgcgaggcgcgcggttggtcgaggagctcgtcgcgcgggccgacgtggagacggtgatgctgcgacgcgagggctcgtgcgcgccgcacgagaggatcgtcattgagagtgcgacgatgtcgggagagagcgcgcgcgtcggtcgaccgtcgcacgcgttagatgcgctggagttggtggagggcggagacgagttgagagccaaggcggcgcatcgggacgcgacggttcgagcgctccgaggggtcgaggccgagcgcgataggctcacggttttgacgtttaagacgctctacgagtatctcgcgttgctcaaggcgacgtgcgagacggtggaagcggaagcgtgtagacgcggcgggcgcgcggtggtggttctcgccgccgcggtgagcgatttttacgttccttggcgcgatctccccgagcacaagatccagagctcggcgcataccgaggtcggtttggagttaacgctgaaacctgtgccaaagatgctcggagagatcaagcgcgtgtggtgtccctcggctttcgtcgcgagcttcaagctcgagacggatgtctccatcctcgccgacaaggcgcgtcaatctctatcgcgctacggcctcgacgccgtcgtggccaacgaactcacgacccgatacgaccacgtcaccatctacaccgccgacggcgcgtccaaaaccctgcgtcgatccgacgatccagccgtcgccggcgtcgagcacggcgcgtcgtcgctcgacggccaaatcgtccacgagctcctccgtcacgtccaaagcgcgtga

SEQ ID NO: 149495 - protein, 354 aa, Ostreococcus tauri
MSRDAVDASPSTSDAFFAADDAYVPRTALEKASRGQNFLLERWNAREKRNTDDDASSALAKTIVVVTSGGTTAPLERTQVRCVDNFSSGTRGARLVEELVARADVETVMLRREGSCAPHERIVIESATMSGESARVGRPSHALDALELVEGGDELRAKAAHRDATVRALRGVEAERDRLTVLTFKTLYEYLALLKATCETVEAEACRRGGRAVVVLAAAVSDFYVPWRDLPEHKIQSSAHTEVGLELTLKPVPKMLGEIKRVWCPSAFVASFKLETDVSILADKARQSLSRYGLDAVVANELTTRYDHVTIYTADGASKTLRRSDDPAVAGVEHGASSLDGQIVHELLRHVQSA

SEQ ID NO: 149496 - DNA, 1140 bp, Phaeosphaeria nodorum
  CDS (1)..(1140)
atggccgaccgcagcgcagagcaggccgaaaatgattatttcgcaaacgagcctgtgcccaaggacctgaaggcgaataccacgctcgcccgcgagtttgtcggccgccatgccgagagcggccggcgcgtcgtgctcgtcacgtcgggcggcaccacggtgcccctcgagacacagacggtgcgctacatcgacaacttctcggctggaactcgcggggccacgagtgccgagtacttcctcgccaatggctacgccgtcatcttcctgcaccgccagttctcgctcctgcccttctcgcgccactactcgcacaacacgcgctccttcctcgactacatgcgcgagaaggacggccaggtcgtcgtcgacgagcagcaccaggccgagatgctgcgcgtcctgcgccagtaccacgacgtcaagcgcgacaacaagctgctgattctgtcctatgtcactattaccgagtacttgtggaacctgcgcgaggtcgccaaactgatgcgccctctgggccccaaggccatcttctacctggccgccgctgtgtccgacttctttgtgcctcaggaccgcatggtcgagcacaagatacagtccaacgaggagttcctaggcactggcggtggcggcagcgcaaagccgccagccgcccgcaccgagggaaagagcctgatcatcgaccttgagcctgtgcccaagtttctcaagcagcttgtcgatggctgggcgccagaggccatgattgtgagtttcaaactcgagactgacccttcgctgctggtcaagaaggcccagtacgccctgaacaagtactcgcaccacctcgtcatcggcaatctgctacacacgcgcaaatgggaggttgtttttgtgtctgagttggacggtgaaaagtggatacgagtgccacgaaaccgcagaacgaagagcttctctggcgtgcagtccctggtcgggtctgcggacccacaagcaaaccatgacttcgaggctgatgagtctctgagtacggacggaagcggagtgcctcagggtgaaccagctctagagattgagtccgttattgtccctgagattgaggtgatgcataccaagctcatagagcaggctctgctgagagctggtaaaatgtag

SEQ ID NO: 149497 - protein, 379 aa, Phaeosphaeria nodorum
MADRSAEQAENDYFANEPVPKDLKANTTLAREFVGRHAESGRRVVLVTSGGTTVPLETQTVRYIDNFSAGTRGATSAEYFLANGYAVIFLHRQFSLLPFSRHYSHNTRSFLDYMREKDGQVVVDEQHQAEMLRVLRQYHDVKRDNKLLILSYVTITEYLWNLREVAKLMRPLGPKAIFYLAAAVSDFFVPQDRMVEHKIQSNEEFLGTGGGGSAKPPAARTEGKSLIIDLEPVPKFLKQLVDGWAPEAMIVSFKLETDPSLLVKKAQYALNKYSHHLVIGNLLHTRKWEVVFVSELDGEKWIRVPRNRRTKSFSGVQSLVGSADPQANHDFEADESLSTDGSGVPQGEPALEIESVIVPEIEVMHTKLIEQALLRAGKM

SEQ ID NO: 149498 - DNA, 1355 bp, Aedes aegypti
  CDS (1)..(900)
atgggaggtttgttagttggggatagcttaaacattaaccaagatgatggatgggcgtttgtaaagtccggtggcactacggtcccgctagaacacaacaccgttcgcttcgtggataacttcagtgccggcaaccgcggttcggcctccgccgagtatttcctagaccagggctatgccgtcatctttatgtatcgcaccaaatcgctggaaccgttttcgcgacatttcaccggccaacagctgctggacatgctggaactgcacgaagagggcatgagcaccaccataactgtgaaacccgactctgtggacgtcctggcgcccatcctggacaaatacaaaaacgcccaggaaacaaaccggatgctgtacatcacctttaccagcgtggtcgactacatgtggctgctgcgggcagcctgcgaatgcctcgccgctttcgaacggaacgccctgctctatctagccgcggccgtgtccgacttttacgtcccccaggacgagatgccaacgcacaagatccaatcgggtcacggtgctcccaccatttcgctgcagttggtcccgaaaatgttggcccccctggtgagcctttgggtcccgttggcctacgtggtctccttcaagctggaaacggacgaaaacctgctgattgccaaatcgcgcgaaagcctcaacaagtacaagcacaaactggtaatcgccaacatccttcagactcgcaagaaccgcgtggtgttcgtcacgcagaataaaacctacgacgttctgctgtcgaaggagcaggctcacaagggtcaggagatcgaggagcagatcgtggccgatgtggtcgaccggcaccaggagttcatccgggagggcgaaatgcaacagctgcagcaacagcagcaatgaccccttcgctccccgagggctcttacaggtggtggtggtggaccgcagccgcaatcccaccagccgcagggcgactgccgggttacgatgccgcacttttgcaagatactgaacccagggagaaagtactgaaggcgaggcgcggccgggtatgtgttagttttgtttgtttcgtcgtttggggggtttcgttggaaccaattgttgattggacagattgtttcgtttctcgtgtaggggcgggagggattcgacggggcggtgaaattgtagttaacgtcgtatgtgttattactcgtctgatatatcttatcgtggaacaatggttaggcgtatacaagcataaaactgaattgtgtttggtggtgtttgtgtgctacgtatacatagttgacttgtagtttagagaaacacgctgtaatattataataaaaaggaataaaagtggaacaaag

SEQ ID NO: 149499 - protein, 299 aa, Aedes aegypti
MGGLLVGDSLNINQDDGWAFVKSGGTTVPLEHNTVRFVDNFSAGNRGSASAEYFLDQGYAVIFMYRTKSLEPFSRHFTGQQLLDMLELHEEGMSTTITVKPDSVDVLAPILDKYKNAQETNRMLYITFTSVVDYMWLLRAACECLAAFERNALLYLAAAVSDFYVPQDEMPTHKIQSGHGAPTISLQLVPKMLAPLVSLWVPLAYVVSFKLETDENLLIAKSRESLNKYKHKLVIANILQTRKNRVVFVTQNKTYDVLLSKEQAHKGQEIEEQIVADVVDRHQEFIREGEMQQLQQQQQ

SEQ ID NO: 149500 - DNA, 1221 bp, Aspergillus oryzae
  CDS (1)..(1221)
atggcttctgctcccacacacgaaatgacccctgccgaagcagagtcagtctacttcaacaattatcctccgccaaaggctcttccaaaacacgaggccctcgctcgagctttcatcaactaccatgtcgaggacaacagacgtctcgttctcgtcacgtcgggaggtacaacggtccctctggagaaccagaccgttcgcttcatcgacaacttctccgccggaacaagaggtgccacgagtgccgagtacttcctcgaagcgggatacgccgtgattttcctgcatcgtcaattcagtttactgccatattctcgccattacagtcattcgaccaattgcttcttagacttcatggacgaagcgcccccagccagtaatgccgaatctgatcacggacgtatcgtcgtccacagtgaataccaggaccagatgcgagatgtgttgaggaaatatcggcatgcgaagaaacataaccgtttgctcctgctcccgttcaccaccgtatctgaatatctgttcgaattgcgatcgctggccacattgatgaaacccctgggccccaatgccctcttctacctcgccgcggcggttagcgacttctttatcccgagtgatcggatgtcagagcataagatccagtcctctgagttgcctcaaaacctgaacaacgaagaagccattgacccctcggacatttacacgggcggaatccctcaggagacaaagccgcccacccacagcaagaagctgatcattgacctggaccctgtgccgaaatttttgcatcagctggtggatgggtgggcacccgatggaagtatggtagtctcattcaagctcgagaccgatcccaatttgcttgtgtacaaagcacggacggcactccaacggtacgcgcaccatctggtaattggcaacctgctgtcgacgcggaagtgggaggtggtgtttgtcacccctgaatccccttatgagcgctggattcgggttccaaagtctaagcgcagtaagagtatttctggagcagaagagcaggtgggactggccgaggcaaagacagcggggggctcagcggccccgaagaacggggaaaccggtggggactatcaacaggggcaagacagtagccatgagggcatggagattgaggcgttgatcatccctgagctggtcaagctgcactcgaacatgatcgcgaagcatggtgcccaggcttag

SEQ ID NO: 149501 - protein, 406 aa, Aspergillus oryzae
MASAPTHEMTPAEAESVYFNNYPPPKALPKHEALARAFINYHVEDNRRLVLVTSGGTTVPLENQTVRFIDNFSAGTRGATSAEYFLEAGYAVIFLHRQFSLLPYSRHYSHSTNCFLDFMDEAPPASNAESDHGRIVVHSEYQDQMRDVLRKYRHAKKHNRLLLLPFTTVSEYLFELRSLATLMKPLGPNALFYLAAAVSDFFIPSDRMSEHKIQSSELPQNLNNEEAIDPSDIYTGGIPQETKPPTHSKKLIIDLDPVPKFLHQLVDGWAPDGSMVVSFKLETDPNLLVYKARTALQRYAHHLVIGNLLSTRKWEVVFVTPESPYERWIRVPKSKRSKSISGAEEQVGLAEAKTAGGSAAPKNGETGGDYQQGQDSSHEGMEIEALIIPELVKLHSNMIAKHGAQA

SEQ ID NO: 149502 - DNA, 1368 bp, Arabidopsis thaliana
  CDS (1)..(1368)
atgagaggagtcactgagactgataagctagcaaacggaatcttccatcttgtttgcttagcggatctcgagtttgattatatcaacccttacgactctgcgtcgagaataaactcagtggttttaccggagttcattgttcaaggagttctatgcgtattctacctcctaacaggacactggttcatgacactcttatgtctcccctatctctactacaatttccatctttactcgaagcgacaacacttagtagatgtcaccgagatcttcaatttgctaaactgggagaagaagaaacggctgattgaaatgagttcgatctctggattggtggaagatgaaatcagttcgtttttcgaatcgtctccacctctgaagaacaaggaagagatcgtagccaatcttaatcagttcattgagctgaattcttcgtgtcaaggagggatgaggaggattgtatgtgtgacttcaggtggaactacagttccattggagcaacgatgtgtaagatacattgataatttcagctctggaaatagaggtgctgcttctactgagaatttcgtcaaggctggatatgctgtgatatttctctataggagatttagtgaaatgatgcttctttatatcggttctattatgtcatctttaggggaacttgtcaaccgtattgccggtatcttcctgatgatccattccttgaatgttttgagtttccagatgccaaaaacattcaaggtttttcattacaatctctttctcagttcatatcaaacttatgtggttcatgggtcacattcaggagctgtgaagatggctgttatggaccagcaagctgcagttgcagaaggtcgcttgcttaaactcccattctcaaccatatatgaatatctccagatgttgcggttgattgctacgatattgaaagatgtcggtccatgttcgatgttttatcttgctgctgctgtatctgacttctatgtgccatggttaagcatggcaagaacagagcacaaaatagaatcaggatctggtcctttggacataagactagctcaagtccctaaaatgctttcaatcttgagatcaaattgggctccaaaggctttctgcatatcattcaagcttgagacagactcaaagattttgctagagaaagctacaaaggctttacaaaaatacaaagtgcacgcagttgtagcaaatgaactattaacgcgtaaggaggaagttgtggttgtttcaagtagcggtaatgttgtggtgagacgtgatagcaataagccggaatctatcgtagaagataatctcattcgtctcctcgtagatcgacattcaacatacatcaaagaatctctcacttga

SEQ ID NO: 149503 - protein, 455 aa, Arabidopsis thaliana
MRGVTETDKLANGIFHLVCLADLEFDYINPYDSASRINSVVLPEFIVQGVLCVFYLLTGHWFMTLLCLPYLYYNFHLYSKRQHLVDVTEIFNLLNWEKKKRLIEMSSISGLVEDEISSFFESSPPLKNKEEIVANLNQFIELNSSCQGGMRRIVCVTSGGTTVPLEQRCVRYIDNFSSGNRGAASTENFVKAGYAVIFLYRRFSEMMLLYIGSIMSSLGELVNRIAGIFLMIHSLNVLSFQMPKTFKVFHYNLFLSSYQTYVVHGSHSGAVKMAVMDQQAAVAEGRLLKLPFSTIYEYLQMLRLIATILKDVGPCSMFYLAAAVSDFYVPWLSMARTEHKIESGSGPLDIRLAQVPKMLSILRSNWAPKAFCISFKLETDSKILLEKATKALQKYKVHAVVANELLTRKEEVVVVSSSGNVVVRRDSNKPESIVEDNLIRLLVDRHSTYIKESLT

SEQ ID NO: 149504 - DNA, 966 bp, Oryza sativa
  CDS (1)..(966)
atggtcgccgccgaggagaacccggagtccttcttcgcggcggcgccgccgctgcgggacgccgacgccgtggccgcgaggctgggggaattcatcgcccgcaactcctccgcagcgggcgcgggcggcggcggcaggcggatcgtgtgcgtgacgtcgggcgggacgacggtgccgctggagcagcgctgcgtgcggtacatcgacaacttcagctccggccaccgcggcgccgcctccaccgagtattttttgaaggctggctatgcagttatcttcctccatcgacgaggaagctgccagccttattgtaggttcctccccgatgattcattcctcaaattctttgatgtcgatgcagaatcgaaggttcaagtggcggagtgccacgcgccagtggtcaagaaagcaattggagattattgcaaggcaattgaaggcggctatctgttgaaactcccattcactacaatatttgaataccttcagctattgaagatggttgctacatctataagttcggctgggccactcggaatgttctatcttgctgcggctgtgtctgatttctatgtcccttgggatagcatggccaaacataagattcagtcaggtggaggccctctggatatgaggctcagtcaagttccgaaaatgctttcagtgttgcgaaaccaatgggcccccttggcgttctgtatatcatttaagttggagacggattcggacatccttattcagaaagcagatatggctctgaacaagtacaagatgaacatcgttgtggccaatttgcttgcaacgtacaaagaggaagtcattattgtaacagacaaagaaaggagtactatccgaaagatgaacaaggatgaggatctggaaatgcagataatcaaaatcctatcacagaatcactcgaagtacatatgcggaagcacaaacgggtgcgtccagagcccatattga

SEQ ID NO: 149505 - protein, 321 aa, Oryza sativa
MVAAEENPESFFAAAPPLRDADAVAARLGEFIARNSSAAGAGGGGRRIVCVTSGGTTVPLEQRCVRYIDNFSSGHRGAASTEYFLKAGYAVIFLHRRGSCQPYCRFLPDDSFLKFFDVDAESKVQVAECHAPVVKKAIGDYCKAIEGGYLLKLPFTTIFEYLQLLKMVATSISSAGPLGMFYLAAAVSDFYVPWDSMAKHKIQSGGGPLDMRLSQVPKMLSVLRNQWAPLAFCISFKLETDSDILIQKADMALNKYKMNIVVANLLATYKEEVIIVTDKERSTIRKMNKDEDLEMQIIKILSQNHSKYICGSTNGCVQSPY

SEQ ID NO: 149506 - DNA, 972 bp, Oryza sativa
  CDS (1)..(972)
atggccgcggatcccaccaccggcggcggcgaggcggagtccttcttccgcgccgcgccgccgctccgcgaccaggaccgcgtcgccggggacctcgccgacttcgtcgcccgccactccgggagcggaggaggggggaggctcgccggggtggtctgcgtcacctccggcggcacgacggtgcccctggagcagcggtgcgtgcgctacatcgacaacttcagctccggccagcgaggggccgcgtccaccgagtactttctcaaagctggctacgcggtcatcttcatctaccgccgtgggagcaagcaaccttactgtaggtttcttccagaggattcctttcttgatttattcgagcttggtgaagaatcagatatccaagtcccagaatctcatgccgcggttgtcaagacagcaataagaaattatcggaaggcgattgatgaaggcctattgctgaaacttcctttcaccactatctttgagtaccttcagttactgcaaatggtaggtacggcgatgaattgcttgggacgccaaggaatgttttaccttgctgcggcagtttctgacttttatgttccatgggaaagcatggctaaacataaaatcgagtcagcaagtggtcctttgaacatgcaactcaatcaagttccgaagatgcttttcattctgagaaaacaatgggctccttcagcattttgtgtatccttcaagcttgagacggacccagatatccttctgcagaaggcagaggcagctctgagaaagtatggtatgaatgtcgtggtcgccaacgagctagcgaactacaaagatgtagttgtgatggtcacaagcaatgggaggacaaccgtgcgaaggcccagcaaggaggacgacgtcgaagaacagttaatcgatctcttggtagagatgcactccgaacacatcatgcagctcaatcaagacgtgcacaagctgacataa

SEQ ID NO: 149507 - protein, 323 aa, Oryza sativa
MAADPTTGGGEAESFFRAAPPLRDQDRVAGDLADFVARHSGSGGGGRLAGVVCVTSGGTTVPLEQRCVRYIDNFSSGQRGAASTEYFLKAGYAVIFIYRRGSKQPYCRFLPEDSFLDLFELGEESDIQVPESHAAVVKTAIRNYRKAIDEGLLLKLPFTTIFEYLQLLQMVGTAMNCLGRQGMFYLAAAVSDFYVPWESMAKHKIESASGPLNMQLNQVPKMLFILRKQWAPSAFCVSFKLETDPDILLQKAEAALRKYGMNVVVANELANYKDVVVMVTSNGRTTVRRPSKEDDVEEQLIDLLVEMHSEHIMQLNQDVHKLT

SEQ ID NO: 149508 - DNA, 1020 bp, Brassica napus
  CDS (1)..(1020)
atgagttgcatctctgggttgggggaagatgaagttagttcctttttcgagtcgtctccacctctcaagaacatggaagagattgtccagaagctcaatgccttcatccagctcaattcctcagcaggagggaggaggaggaggatcgtatgcgtaacctcagggggaactacggttcctttggagcagcgatgcgtaagatatattgataacttcagctctggcaatagaggtgctgcttctactgagaacttcgtcaaggctggatatgctgtcatttttctctttaggaggggaacttgccagccatattcccggtctcttcccgatgatccattccttgaatgcttccagtttccagataacaccaacattcaagttaatgcatcacatgtggaagctgtgaaaatggctgttatggaccagcaagctgcagtagctgaagctcgcttactaaagctcccattcacaaccatctatgagtatcttcagatgttgcagttgattgcaacggcactgaaagacgtcggtccatgttcaatgttttatcttgctgcggctgtatctgacttttatgtgccctggaagaacatgacagaacacaaaatagaatcaggatctggtcctctggacataagactagctcaagtccctaaaatgctttcaatcttgagaacaaattgggctccacaggctttctgcatatcattcaagcttgagacagactcaaagattctgatagagaaggctacaaaggctctaggaaagtacaaagtgcatgctgttgtagctaatgagctgtcaacacgtaaggaagaagttgtggttgtttcaagcagcggtaatgttgtggttaggcgtgatagcgataagcctgaagctattgtagaagataatcttattcgcctcattgtagatcggcactcaacatacatcaaagaatctcacacttggtttctcaaatgcttccaagtcaaaaacatgtatgaatctttcatccactcaacagaaacaatttaa

SEQ ID NO: 149509 - protein, 339 aa, Brassica napus
MSCISGLGEDEVSSFFESSPPLKNMEEIVQKLNAFIQLNSSAGGRRRRIVCVTSGGTTVPLEQRCVRYIDNFSSGNRGAASTENFVKAGYAVIFLFRRGTCQPYSRSLPDDPFLECFQFPDNTNIQVNASHVEAVKMAVMDQQAAVAEARLLKLPFTTIYEYLQMLQLIATALKDVGPCSMFYLAAAVSDFYVPWKNMTEHKIESGSGPLDIRLAQVPKMLSILRTNWAPQAFCISFKLETDSKILIEKATKALGKYKVHAVVANELSTRKEEVVVVSSSGNVVVRRDSDKPEAIVEDNLIRLIVDRHSTYIKESHTWFLKCFQVKNMYESFIHSTETI

SEQ ID NO: 149510 - DNA, 1005 bp, Brassica napus
  CDS (1)..(1005)
atgagttcaatgggggaagatgaagttagctcctttttcgaatcgtctccgcctctcaagaagatggaagatatactacagaagcttaacggcttcatcgagcacaattcttcaggagggaggaggaggatcgtatgcgtgacgtcaggcggaactacggttccactggagcagcgatgcgtaagaaatatcgataacttcagctctggaaacagaggtgctgcttctactgagaacttcgtcaaggctggatatgctgtagtgtttctgtataggagtggaacttgccagccatattgccggtctcttcctgatgatccattccttgactgttttcaatttctagataacaccaacattcaagttcattcatcacatgtagaagctgtgaaaatggctgttatggaccagcaagctgcagtagctgaagctcgcttactgaagctcccattcacaaccatctatgagtatcttcagatgttgcggttgattgcaacggcattgaaagacgtcggtccatgttcaatgttttatcttgctgctgctgtatctgacttttatgtgccctggaataacatgacagaacacaaaatagaatcaggatctggtcctctggacataagacttgctcaagtccctaaaatgctttcaatcttgagaacaaattgggctccacaggctttctgcatatcattcaagcttgagacagactcaaagattctgatagagaaggctacaaaggctctaggaaagtacaaagtgcatgctgttgtagctaatgagctgtcaacacgtaaggaagaagttgtggttgtttcaagcagcggtaatgttgtggttaggcgtgatagcgataagcctgaagctattgtagaagataatcttattcgcctcattgtagatcggcactcaacatacatcaaagaatctcacacttggtttctcaaatgcttccaagtcaaaaacatgtatgaatctttcatccactcaacagaaacaatttaa

SEQ ID NO: 149511 - protein, 334 aa, Brassica napus
MSSMGEDEVSSFFESSPPLKKMEDILQKLNGFIEHNSSGGRRRIVCVTSGGTTVPLEQRCVRNIDNFSSGNRGAASTENFVKAGYAVVFLYRSGTCQPYCRSLPDDPFLDCFQFLDNTNIQVHSSHVEAVKMAVMDQQAAVAEARLLKLPFTTIYEYLQMLRLIATALKDVGPCSMFYLAAAVSDFYVPWNNMTEHKIESGSGPLDIRLAQVPKMLSILRTNWAPQAFCISFKLETDSKILIEKATKALGKYKVHAVVANELSTRKEEVVVVSSSGNVVVRRDSDKPEAIVEDNLIRLIVDRHSTYIKESHTWFLKCFQVKNMYESFIHSTETI

SEQ ID NO: 149512 - DNA, 963 bp, Glycine max
  CDS (1)..(963)
atggatgcagcaaagggattggaagcttctggggagacccttcgtgcagaagtgaaaacctttttcgattctgctcctcctttgcagaacagtgatgagataactcagaagttgaatcagttcattcaacgcaattcttcagctaggagaattgtttgtgtgacttctggtggcaccaccgcgccattggaacaacgatgcgttcgctatgttgacaatttcagttcaggtcacagaggggccacatccaccgagtattttctgaaggctggatatgctgttatctttctgtaccggaagagaagtttccagccattttgtagatcccttcctgatgatcccttacttgaatgcttcaagcccaaccatgagtccaacattcaagtttgcgaggcttattctgaaacagtgaagagggctatcgttgatcatcatactgcagtggcaggtggtctcttgttgaaacttccattcaacaccatatttgagtatctccagatgttacaaacaattgcaatgtcaatgaggtgtattggtccccgtgcaatgttctatcttgctgctgcagtgtctgactattatgttccttggaaggaaatggtagagcacaaaattcagtcaggatcatctcaccttttggatgtgaaactagttcaagtgccaaaaatgttgtcagtgcttaggaaagattgggctcctctggctttctgcatatctttcaagttagagacagattcaaacattcttctaaataaagctggtgcagctcttgaaaagtacaagatgcatgcagttgttgcaaatgaactctcaactcgcaaggagcaagtggtggttgtcactagtgctgagaaggttactgttcagcgtgataagagtctgtctgataatgatgtagagaatcccctgattaaacttctttcggagaaacatgccacttacattgaggattctggtagatga

SEQ ID NO: 149513 - protein, 320 aa, Glycine max
MDAAKGLEASGETLRAEVKTFFDSAPPLQNSDEITQKLNQFIQRNSSARRIVCVTSGGTTAPLEQRCVRYVDNFSSGHRGATSTEYFLKAGYAVIFLYRKRSFQPFCRSLPDDPLLECFKPNHESNIQVCEAYSETVKRAIVDHHTAVAGGLLLKLPFNTIFEYLQMLQTIAMSMRCIGPRAMFYLAAAVSDYYVPWKEMVEHKIQSGSSHLLDVKLVQVPKMLSVLRKDWAPLAFCISFKLETDSNILLNKAGAALEKYKMHAVVANELSTRKEQVVVVTSAEKVTVQRDKSLSDNDVENPLIKLLSEKHATYIEDSGR

SEQ ID NO: 149514 - DNA, 999 bp, Zea mays
  CDS (1)..(999)
atggtcgcggcggaagatccggaacacttcttcgccgcctcgccgccgctgcgcgacgctgccgttgtcgccgccagcctgcaggagttcgtcgcgcgcaattcgcacgcatcatcagacggcgtcgggcggcggcgcatcgtctgcgtcacgtcgggcgggaccacggtgccgctggagcagcgatgcgtgcgctacatcgacaacttcagctccggccaccgcggcgccgcgtccaccgagtatttcttaaaggctggctatgcggtcattttcgtccatcggcgagggagttgccagcctttctccaggttcctgcctgacgactcgtttctccagttctttgatgtcacaacagattcgaaggttcaagtggccgagtcccaagcaacggtggtaaagagagcaattggggattatcgcaaggctactgaaggaggctctctgctgaaactcccattcaccacgatatttgagtatcttcagttactgaagatggttgctacatccatgagctgtgtgggtctccacgggatgttctatctcgctgcagctgtgtctgacttctatgttccatgggatagcatggcaaaacataagatccagtcagccggaggcccactggatatgaagctcagccaggttccaaaaatgctccccgttctgcggaaccattgggcccccttggccttctgcgtatccttcaagctggagacggatccagacattctagttcagaaagcagagacggctctgaacaagtacaggatggacgttgttgtggccaatctgcttgcaacgtacaaggaggaggtcgtcatcatctcgaatggcaaaagcaacaccattcgaaggtgcagcaaaggcgaggatctggaggagcatatcatcaagctcctagagaagagccactccaagtatatttacagcagcacggaagggtgcagtaagaacgactacgaaaagcttataccgttaggcatcaaaagtctggcttaa

SEQ ID NO: 149515 - protein, 332 aa, Zea mays
MVAAEDPEHFFAASPPLRDAAVVAASLQEFVARNSHASSDGVGRRRIVCVTSGGTTVPLEQRCVRYIDNFSSGHRGAASTEYFLKAGYAVIFVHRRGSCQPFSRFLPDDSFLQFFDVTTDSKVQVAESQATVVKRAIGDYRKATEGGSLLKLPFTTIFEYLQLLKMVATSMSCVGLHGMFYLAAAVSDFYVPWDSMAKHKIQSAGGPLDMKLSQVPKMLPVLRNHWAPLAFCVSFKLETDPDILVQKAETALNKYRMDVVVANLLATYKEEVVIISNGKSNTIRRCSKGEDLEEHIIKLLEKSHSKYIYSSTEGCSKNDYEKLIPLGIKSLA

SEQ ID NO: 149516 - DNA, 999 bp, Zea mays
  CDS (1)..(999)
atggtcgcggcggaagatccggaacacttcttcgccgcctcgccgccgctgcgcgacgctgccgttgtcgccgccagcctgcaggagttcgtcgcgcgcaattcgcacgcatcatcagacggcgtcgggcggcggcgcatcgtctgcgtcacgtcgggcgggaccacggtgccgctggagcagcgatgcgtgcgctacatcgacaacttcagctccggccaccgcggcgccgcgtccaccgagtatttcttaaaggctggctatgcggtcattttcgtccatcggcgagggagttgccagcctttctccaggttcctgcctgatgactcgtttctccacttctttgatgtcacaacagattcgaaggttcaagtggccgagtcccaggcaacggtggtaaagagagcaattggggattatcgcaaggctactgaaggaggctctctgctgaaactcccattcaccacgatatttgagtatcttcagttactgaagatggttgctacatccatgagctgtgtgggtctccacgggatgttctatctcgctgcagctgtgtctgacttctatgttccatgggatagcatggcaaaacataagatccagtcagccggaggcccactggatatgaagctcagccaggttccaaaaatgctccccgttctgcgcaaccattgggcccccttggccttctgcgtatccttcaagctggagacggatccagacattctagttcagaaagcagagacggctctgagcaagtacaggatggacgttgttgtggccaatctacttgcaacgtacaaggaggaggtcgtcatcatctcgaatggcaaaagcaacaccattcgaaggtgcagcaaaggcgaggatctggaggagcatatcatcaagctcctagagaagagccactccaagtttatttacagcagcacggaagggtgcagtaagaacgactacgaaaagcttataccgttaggcatcaaaagtctggcttaa

SEQ ID NO: 149517 - protein, 332 aa, Zea mays
MVAAEDPEHFFAASPPLRDAAVVAASLQEFVARNSHASSDGVGRRRIVCVTSGGTTVPLEQRCVRYIDNFSSGHRGAASTEYFLKAGYAVIFVHRRGSCQPFSRFLPDDSFLHFFDVTTDSKVQVAESQATVVKRAIGDYRKATEGGSLLKLPFTTIFEYLQLLKMVATSMSCVGLHGMFYLAAAVSDFYVPWDSMAKHKIQSAGGPLDMKLSQVPKMLPVLRNHWAPLAFCVSFKLETDPDILVQKAETALSKYRMDVVVANLLATYKEEVVIISNGKSNTIRRCSKGEDLEEHIIKLLEKSHSKFIYSSTEGCSKNDYEKLIPLGIKSLA

SEQ ID NO: 149518 - DNA, 954 bp, Zea mays
  CDS (1)..(954)
atggccatggatccaagcgtcgcggcgcgccagagcgaggaggcggcggaggccttcttccgcgcggcgccgccgctccgtgaccgcgaccgtctcgccgccagcctcgccgatttcctcgcccgccactccgccgggggtggtggagtggtgtgcgtcacctccggcggcactacggtgcccctggagcagcgttgcgtgcgctacatcgacaattttagctccggccagcgcggtgccgcctccaccgagtattttcttaaggccggctacgctgtcatcttcatccatcgccgtgggagcaagcagccttactgtaggtttcttccagaggattcctttctcgatctttttgagctcggggaagactcagagatccaagttccacagtctcattcatcggtggtcaaggcagcaattagcaattaccggaaggcaatcgatgaatgccttcttctcaaactgcctttcacaacaatttttgagtaccttcagttactacaaatggtggctacttctatgaattgcttggggcaccgtggaatgttttatcttgctgctgcagtttccgacttctatgttccatgggaaagtatggctaaacataaaattgagtcagcaggcggccctttgaacatgcaactcaaccaagtccctaagatgcttttcatcctccggaaaaactgggctcctgctgcattttgtgtatccttcaagctcgaaacagatcctaacattctcctacagaaggcagagatggctttgaagaagtacggtatgaacgtcgtggtggcaaatgaactcgcaaactacaaagatgtagtggtgatggtcacaagcaacggggggaggacgaccgtgagcaggacgagcaaggcggaagaccttgaagtgcagctaaccgacctcctggtgaagatgcactcggagcacattgcacagcccaattcgtag

SEQ ID NO: 149519 - protein, 317 aa, Zea mays
MAMDPSVAARQSEEAAEAFFRAAPPLRDRDRLAASLADFLARHSAGGGGVVCVTSGGTTVPLEQRCVRYIDNFSSGQRGAASTEYFLKAGYAVIFIHRRGSKQPYCRFLPEDSFLDLFELGEDSEIQVPQSHSSVVKAAISNYRKAIDECLLLKLPFTTIFEYLQLLQMVATSMNCLGHRGMFYLAAAVSDFYVPWESMAKHKIESAGGPLNMQLNQVPKMLFILRKNWAPAAFCVSFKLETDPNILLQKAEMALKKYGMNVVVANELANYKDVVVMVTSNGGRTTVSRTSKAEDLEVQLTDLLVKMHSEHIAQPNS

SEQ ID NO: 149520 - DNA, 22 bp, Artificial sequence
  primer
atgccacctctacccgtgctca

SEQ ID NO: 149521 - DNA, 26 bp, Artificial sequence
  primer
ttatttcgtagctagcttagttttcg

SEQ ID NO: 149522 - protein, 447 aa, Artificial sequence
  consensus sequence
  Variant (2)..(10): Xaa in position 2 to 10 is any amino acid
  Variant (11)..(18): Xaa in position 11 to 18 is any or no amino acid
  Variant (20)..(20): Xaa in position 20 is any amino acid
  Variant (32)..(34): Xaa in position 32 to 34 is any amino acid
  Variant (37)..(38): Xaa in position 37 to 38 is any amino acid
  Variant (43)..(43): Xaa in position 43 is any amino acid
  Variant (45)..(45): Xaa in position 45 is any amino acid
  Variant (49)..(49): Xaa in position 49 is any amino acid
  Variant (51)..(51): Xaa in position 51 is any amino acid
  Variant (53)..(53): Xaa in position 53 is any amino acid
  Variant (55)..(57): Xaa in position 55 to 57 is any amino acid
  Variant (60)..(60): Xaa in position 60 is any amino acid
  Variant (64)..(65): Xaa in position 64 to 65 is any amino acid
  Variant (67)..(68): Xaa in position 67 to 68 is any amino acid
  Variant (69)..(77): Xaa in position 69 to 77 is any or no amino acid
  Variant (79)..(80): Xaa in position 79 to 80 is any amino acid
  Variant (82)..(83): Xaa in position 82 to 83 is any amino acid
  Variant (85)..(89): Xaa in position 85 to 89 is any amino acid
  Variant (90)..(104): Xaa in position 90 to 104 is any or no amino acid
  Variant (107)..(120): Xaa in position 107 to 120 is any amino acid
  Variant (121)..(155): Xaa in position 121 to 155 is any or no amino acid
  Variant (158)..(160): Xaa in position 158 to 160 is any amino acid
  Variant (162)..(162): Xaa in position 162 is any amino acid
  Variant (164)..(166): Xaa in position 164 to 166 is any amino acid
  Variant (169)..(170): Xaa in position 169 to 170 is any amino acid
  Variant (172)..(185): Xaa in position 172 to 185 is any amino acid
  Variant (186)..(191): Xaa in position 186 to 191 is any or no amino acid
  Variant (201)..(202): Xaa in position 201 to 202 is any amino acid
  Variant (204)..(209): Xaa in position 204 to 209 is any amino acid
  Variant (210)..(211): Xaa in position 210 to 211 is any or no amino acid
  Variant (215)..(215): Xaa in position 215 is any amino acid
  Variant (217)..(219): Xaa in position 217 to 219 is any amino acid
  Variant (220)..(298): Xaa in position 220 to 298 is any or no amino acid
  Variant (300)..(302): Xaa in position 300 to 302 is any amino acid
  Variant (304)..(305): Xaa in position 304 to 305 is any amino acid
  Variant (309)..(309): Xaa in position 309 is any amino acid
  Variant (311)..(312): Xaa in position 311 to 312 is any amino acid
  Variant (314)..(316): Xaa in position 314 to 316 is any amino acid
  Variant (318)..(318): Xaa in position 318 is any amino acid
  Variant (320)..(324): Xaa in position 320 to 324 is any amino acid
  Variant (325)..(325): Xaa in position 325 is any or no amino acid
  Variant (333)..(335): Xaa in position 333 to 335 is any amino acid
  Variant (337)..(338): Xaa in position 337 to 338 is any amino acid
  Variant (341)..(343): Xaa in position 341 to 343 is any amino acid
  Variant (345)..(346): Xaa in position 345 to 346 is any amino acid
  Variant (348)..(351): Xaa in position 348 to 351 is any amino acid
  Variant (353)..(354): Xaa in position 353 to 354 is any amino acid
  Variant (356)..(356): Xaa in position 356 is any amino acid
  Variant (358)..(358): Xaa in position 358 is any amino acid
  Variant (360)..(360): Xaa in position 360 is any amino acid
  Variant (362)..(363): Xaa in position 362 to 363 is any amino acid
  Variant (365)..(366): Xaa in position 365 to 366 is any amino acid
  Variant (368)..(384): Xaa in position 368 to 384 is any amino acid
  Variant (385)..(435): Xaa in position 385 to 435 is any or no amino acid
  Variant (437)..(446): Xaa in position 437 to 446 is any amino acid
FXXXXXXXXXXXXXXXXXVXVTSGGTTVPLEXXXVRXXDNFSXGXRGAXSXEXFXXXGYXVIFXXRXXXXXXXXXXXSXXPXXRXXXXXXXXXXXXXXXXXXXXFLXXXXXXXXXXXXXXXXXXXXXXXXXXXXXXXXXXXXXXXXXXXXXXXXXLLXXXFXTXXXYLXXLXXXXXXXXXXXXXXXXXXXXYLAAAVSDFXXPXXXXXXXXHKIXSXXXXXXXXXXXXXXXXXXXXXXXXXXXXXXXXXXXXXXXXXXXXXXXXXXXXXXXXXXXXXXXXXXXXXXXXXXXXXXXXXXLXXXLXXVPKXLXXLXXXWXPXXXXXXSFKLETDXXXLXXKAXXXLXXYXXXXVXXNXLXTXKXXVXXVXXXXXXXXXXXXXXXXXXXXXXXXXXXXXXXXXXXXXXXXXXXXXXXXXXXXXXXXXXXXXXXXXXXXEXXXXXXXXXXH

SEQ ID NO: 149523 - protein, 29 aa, Artificial sequence
  protein pattern
  Variant (2)..(2): Xaa in position 2 is any amino acid
  Variant (3)..(4): Xaa in position 3 to 4 is any or no amino acid
  Variant (14)..(14): Xaa in position 14 is any amino acid
  Variant (15)..(15): Xaa in position 15 is Asn, Gln or Arg
  Variant (16)..(16): Xaa in position 16 is Cys, Thr or Val
  Variant (19)..(19): Xaa in position 19 is any amino acid
  Variant (20)..(20): Xaa in position 20 is Ile, Leu or Val
  Variant (25)..(25): Xaa in position 25 is Ala or Ser
  Variant (27)..(27): Xaa in position 27 is any amino acid
VXXXSGGTTVPLEXXXVRXXDNFSXGXRG

SEQ ID NO: 149524 - protein, 21 aa, Artificial sequence
  protein pattern
  Variant (10)..(10): Xaa in position 10 is Phe or Tyr
  Variant (11)..(11): Xaa in position 11 is Ile, Leu, Met or Val
  Variant (13)..(15): Xaa in position 13 to 15 is any amino acid
  Variant (16)..(16): Xaa in position 16 is Leu, Met or Val
  Variant (17)..(18): Xaa in position 17 to 18 is any amino acid
  Variant (21)..(21): Xaa in position 21 is Ile, Leu or Met
YLAAAVSDFXXPXXXXXXHKX

SEQ ID NO: 149525 - protein, 15 aa, Artificial sequence
  protein pattern
  Variant (2)..(2): Xaa in position 2 is any amino acid
  Variant (4)..(4): Xaa in position 4 is Leu or Val
  Variant (5)..(6): Xaa in position 5 to 6 is any amino acid
  Variant (9)..(9): Xaa in position 9 is Ala, Cys, Ser or Val
  Variant (11)..(11): Xaa in position 11 is Ile or Val
  Variant (13)..(13): Xaa in position 13 is Ile, Leu, Met or Val
  Variant (14)..(14): Xaa in position 14 is any amino acid
EXFXXXGYXVXFXXR

SEQ ID NO: 149526 - protein, 23 aa, Artificial sequence
  protein pattern
  Variant (2)..(2): Xaa in position 2 is any amino acid
  Variant (3)..(3): Xaa in position 3 is Ile, Leu or Val
  Variant (4)..(4): Xaa in position 4 is Glu, Asn, Pro or Thr
  Variant (6)..(6): Xaa in position 6 is any or no amino acid
  Variant (8)..(9): Xaa in position 8 to 9 is any amino acid
  Variant (10)..(11): Xaa in position 10 to 11 is any or no amino acid
  Variant (13)..(13): Xaa in position 13 is Phe, Leu or Met
  Variant (14)..(15): Xaa in position 14 to 15 is any amino acid
  Variant (17)..(19): Xaa in position 17 to 19 is any amino acid
  Variant (20)..(20): Xaa in position 20 is Ala, Cys, Gly or Thr
  Variant (21)..(22): Xaa in position 21 to 22 is any amino acid
  Variant (23)..(23): Xaa in position 23 is Ile, Leu or Met
LXXXFXTXXXXYXXXLXXXXXXX

SEQ ID NO: 149527 - protein, 21 aa, Artificial sequence
  protein pattern
  Variant (2)..(2): Xaa in position 2 is any amino acid
  Variant (3)..(3): Xaa in position 3 is Ile, Leu, Met or Val
  Variant (4)..(4): Xaa in position 4 is any amino acid
  Variant (5)..(5): Xaa in position 5 is Leu or Met
  Variant (6)..(6): Xaa in position 6 is any amino acid
  Variant (7)..(7): Xaa in position 7 is Pro or Gln
  Variant (11)..(11): Xaa in position 11 is Phe, Met or Val
  Variant (13)..(14): Xaa in position 13 to 14 is any amino acid
  Variant (15)..(15): Xaa in position 15 is Ile or Leu
  Variant (16)..(18): Xaa in position 16 to 18 is any amino acid
  Variant (20)..(20): Xaa in position 20 is any amino acid
  Variant (21)..(21): Xaa in position 21 is Pro, Ser or Thr
LXXXXXXVPKXLXXXXXXWXX

SEQ ID NO: 149528 - DNA, 642 bp, SACCHAROMYCES CEREVISIAE
  CDS (1)..(642)
atgtcactaccggcacatttgcagcagactttctcaccagaagaaatacagttcattgtggaaaacgagccaataaagatttttcccagaataacaacacgccaaaaaattcgtggcgatgatagaggaactggaaaccacacccgctggcaacttattactacagatgacaaagctttaaataatatggtagccatgcgttctacagaagtggttctttggatcgctctattactgaagcaacaatccaagtgcagtattgtagcaccacagtggttaacgacgaaagagcttgatagaaaaatacaatatgagaaaactcatccggataggtttagtgagttgccgtggaactggcttgtcttggcacgtatacttttcaataaagctaaggatgattttcatgaccccattcacgaattacgtggtaaaatacaagacttaagggaaataaggcagatcaaagtgttaaaaggccttaagtatttgaatgaatctcatttacaattggataatttaagtctattagaaatcaatgagttgaggccgttcattactgaaatcatggataaactgcgagaaattcacacagcatctcttaccgctggtactgaaaatgatgaagaagaattcaatatttaa

SEQ ID NO: 149529 - protein, 213 aa, SACCHAROMYCES CEREVISIAE
MSLPAHLQQTFSPEEIQFIVENEPIKIFPRITTRQKIRGDDRGTGNHTRWQLITTDDKALNNMVAMRSTEVVLWIALLLKQQSKCSIVAPQWLTTKELDRKIQYEKTHPDRFSELPWNWLVLARILFNKAKDDFHDPIHELRGKIQDLREIRQIKVLKGLKYLNESHLQLDNLSLLEINELRPFITEIMDKLREIHTASLTAGTENDEEEFNI

SEQ ID NO: 149530 - DNA, 636 bp, Zea mays
  CDS (1)..(636)
atggcggggcagtccgacccgcacctctccatcttctcgccctccgaggtggagttcgtggctgaggatgagattgtcgaaatcgtccccaacatccgcatggacgccctcaacatgatctgcggggatttcgggcccttcttcccccagattcccaccaaggtgcctctctggctcgctgtcgcgctcaagaagcgtagcaagtgcaccatccgcaccccggactggatgactgttgaccgcttgacacaggtattggaagcggaaagagagtcgccacgagaattccagccattaccattccactatattgaaatttctaagcttctgtttgatcatgctcgtgatgacatctcagatgcatacctggtaagatctctaattgaggacatcagagatgtcagatttcacaaggttgagactggattagagacgatatctggacgcacccatgccgtaaagctcaaaaatctctctgcaatggaagtgaacattgtccgccctttcatggtgagaactttgcaggcattctataagcacgatagtgcacagatgattcagcaagcagataatatagggagcagagcaacactggttacagaccgtggcccgagaagagatctaaggcgcaggtag

SEQ ID NO: 149531 - protein, 211 aa, Zea mays
MAGQSDPHLSIFSPSEVEFVAEDEIVEIVPNIRMDALNMICGDFGPFFPQIPTKVPLWLAVALKKRSKCTIRTPDWMTVDRLTQVLEAERESPREFQPLPFHYIEISKLLFDHARDDISDAYLVRSLIEDIRDVRFHKVETGLETISGRTHAVKLKNLSAMEVNIVRPFMVRTLQAFYKHDSAQMIQQADNIGSRATLVTDRGPRRDLRRR

SEQ ID NO: 149532 - DNA, 609 bp, Zea mays
  CDS (1)..(609)
atggcggggcagtccgacccgcacctctccatcttctcgccctccgaggtggagttcgtggctgaggatgagattgtcgaaatcgtccccaacatccgcatggacgccctcaacatgatctgcattcccaccaaggtgcctctctggctcgctgtcgcgctcaagaagcgtagcaagtgcaccatccgcaccccggactggatgactgttgaccgcttgacacaggtattggaagcggaaagagagtcgccacgagaattccagccattaccattccactatattgaaatttctaagcttctgtttgatcatgctcgtgatgacatctcagatgcatacctggtaagatctctaattgaggacatcagagatgtcagatttcacaaggttgagactggattagagacgatatctggacgcacccatgccgtaaagctcaaaaatctctctgcaatggaagtgaacattgtccgccctttcatggtgagaactttgcaggcattctataagcacgatagtgcacagatgattcagcaagcagataatatagggagcagagcaacactggttacagaccgtggcccgagaagagatctaaggcgcaggtag

SEQ ID NO: 149533 - protein, 202 aa, Zea mays
MAGQSDPHLSIFSPSEVEFVAEDEIVEIVPNIRMDALNMICIPTKVPLWLAVALKKRSKCTIRTPDWMTVDRLTQVLEAERESPREFQPLPFHYIEISKLLFDHARDDISDAYLVRSLIEDIRDVRFHKVETGLETISGRTHAVKLKNLSAMEVNIVRPFMVRTLQAFYKHDSAQMIQQADNIGSRATLVTDRGPRRDLRRR

SEQ ID NO: 149534 - DNA, 714 bp, Zea mays
  CDS (1)..(714)
atggcggggcagtccgacccgcacctctccatcttctcgccctccgaggtggagttcgtggctgaggatgagattgtcgaaatcgtccccaacatccgcatggacgccctcaacatgatctgcggggatttcgggcccttcttcccccagattcccaccaaggtgcctctctggctcgctgtcgcgctcaagaagcgtagcaagtgcaccatccgcaccccggactggatgactgttgaccgcttgacacaggtattggaagcggaaagagagtcgccacgagaattccagccattaccattccactatattgaaatttctaagcttctgtttgatcatgctcgtgatgacatctcagatgcatacctggtaagatctctaattgaggacatcagagatgtcagatttcacaaggttgagactggattagagacgatatctggacgcacccatgccgtaaagctcaaaaatctctctgcaatggaagtgaacattgtccgccctttcatggtgagaactttgcaggcattctataagcacgatagtgcacagatgattcagcaagcagataatatagggagcagagcaacactggttacagaccgtggcccgagagtaagcttcccttgtagttatggtttcaacttgcttgcggattctaggaggttgttgtccccatcaaaatgtgaatctaagatgttgcgcacaaaatag

SEQ ID NO: 149535 - protein, 237 aa, Zea mays
MAGQSDPHLSIFSPSEVEFVAEDEIVEIVPNIRMDALNMICGDFGPFFPQIPTKVPLWLAVALKKRSKCTIRTPDWMTVDRLTQVLEAERESPREFQPLPFHYIEISKLLFDHARDDISDAYLVRSLIEDIRDVRFHKVETGLETISGRTHAVKLKNLSAMEVNIVRPFMVRTLQAFYKHDSAQMIQQADNIGSRATLVTDRGPRVSFPCSYGFNLLADSRRLLSPSKCESKMLRTK

SEQ ID NO: 149536 - DNA, 636 bp, Oryza sativa
  CDS (1)..(636)
atggctgggcagtctgaccctcatctttctatcttctcaccctcagaggtggagttcgtggcggaggatgagattgtcgagatcgtccctaacattcgcatggaggccctcaacatgatatgcggggattttgggcccttcttcccgcaaattgcaagcaaagtgcctctttggctcgcggttgcactcaagaagcgtggcaaatgtaccatacgcacacctgactggatgactgttgaccgcttgacgcaggtattagatgcagaaagagagtcacccaaagaatttcagccattgccgttccactatattgaaatatctaagcttctctttgatcatgctcgtgatgacatctcagatgcatacctggtaagatctttgattgaggacatccgagatgtcagattccataaggttgagactggtctggagacaatatctggccgtactcatgctgtaaagctaaaaaatctctctgcaatggaagtgaatatcgtgcgtcctttcatggtgagaactttacaagcattctataagcatgatagcccacagatgattcagcaggcagataacacaggtagcagaccaacaccagttacagaccgtggtccaagaagagatctaaggcgcaggtaa

SEQ ID NO: 149537 - protein, 211 aa, Oryza sativa
MAGQSDPHLSIFSPSEVEFVAEDEIVEIVPNIRMEALNMICGDFGPFFPQIASKVPLWLAVALKKRGKCTIRTPDWMTVDRLTQVLDAERESPKEFQPLPFHYIEISKLLFDHARDDISDAYLVRSLIEDIRDVRFHKVETGLETISGRTHAVKLKNLSAMEVNIVRPFMVRTLQAFYKHDSPQMIQQADNTGSRPTPVTDRGPRRDLRRR

SEQ ID NO: 149538 - DNA, 633 bp, Glycine max
  CDS (1)..(633)
atggccgggcaatcaaaccatgacctttcattgttttcagctgaggagcttgagttcattgctgaagatgagatcgtggacattgtacccaatctcaaaatgagtgctctcaatttcatttctggagattttggcccatttacgccccagattgttacccaagtaccactgtggttggccactgctctcaagaagagaggcaagtgctccatttgccctccccaatggatgtctgttgagaagttgagtcaagttttggaggcagagcgagactctcaagagatgtcagatcaattgccatttcattatgtggaaatctcaagacttctttttgatcatgcacgtgacaacattcctgatgtatatatggtgaggtctctaattgaggacatcagaaatgttcggtttcataaagttgaaactgatttggaagcatttaatggtcgtacaattgctgttaagattaaaaatttatctgcaatggaagtgaatattgttcgtccatttattggaagagctttacaggcattttataagcatgatagtccagagctgataccagacccagagagagtttctgataggcgcccccaagttatcaacaatgctccaagaagacaactacgaagatag

SEQ ID NO: 149539 - protein, 210 aa, Glycine max
MAGQSNHDLSLFSAEELEFIAEDEIVDIVPNLKMSALNFISGDFGPFTPQIVTQVPLWLATALKKRGKCSICPPQWMSVEKLSQVLEAERDSQEMSDQLPFHYVEISRLLFDHARDNIPDVYMVRSLIEDIRNVRFHKVETDLEAFNGRTIAVKIKNLSAMEVNIVRPFIGRALQAFYKHDSPELIPDPERVSDRRPQVINNAPRRQLRR

SEQ ID NO: 149540 - DNA, 636 bp, Zea mays
  CDS (1)..(636)
atggcggggcagtccgacccgcacctctccatcttctcgccctccgaggtggagttcgtggcggaggatgagattgtcgaaatcgtccccaacatccgcatggacgccctcaacatgatctgcggggatttcgggcccttcttcccccagattcccaccaaggtgcctctctggctcgctgtcgcgctcaagaagcgtagcaagtgcaccatccgcaccccggactggatgactgttgaccgcttgacacaggtattggaagcggaaagagagtcgccacgagaattccagccattaccattccactatattgaaatttctaagcttctgtttgatcatgctcgtgatgacatctcagatgcatacctggtaagatctctaattgaggacatcagagatgtcagatttcacaaggttgagactggattagagacgatatctggacgcacccatgctgtaaagctcaaaaatctctctgcaatggaagtgaacattgtccgccctttcatggtgagaactttgcaggcattctataagcacgatagtccacagatgattcagcaagcagataatatagggagcagagcaacactggttacagaccgtggcccgagaagagatctaaggcgcaggtag

SEQ ID NO: 149541 - protein, 211 aa, Zea mays
MAGQSDPHLSIFSPSEVEFVAEDEIVEIVPNIRMDALNMICGDFGPFFPQIPTKVPLWLAVALKKRSKCTIRTPDWMTVDRLTQVLEAERESPREFQPLPFHYIEISKLLFDHARDDISDAYLVRSLIEDIRDVRFHKVETGLETISGRTHAVKLKNLSAMEVNIVRPFMVRTLQAFYKHDSPQMIQQADNIGSRATLVTDRGPRRDLRRR

SEQ ID NO: 149542 - DNA, 633 bp, Arabidopsis thaliana
  CDS (1)..(633)
atggctggccagactgatcctcatatttcactgttttctccacaagaggttgagtttatggcagaggacgagctggtcgagattgttcctaatatgaacatggagcaactcaatttcatcagtggcgatttcggtcggttcattcctcagattccgacaaaggtgcctctgtggcttgcagtggcactgaagaggagaggaaaatgcactttccggcctccggggtggatgtctgttgataatttgactcagatcttggaagcagaacgtgaatctcagtcgacattccaggcattaccatttagttacgtggagattgccagactactttttgaccatgcacgtgacgatattccagacatgtatatggtgagatccctagtcgaggacatcagagatgtacggcttcacaaacttgagactaacttaggatcatttcaaggtacatctgcagtaaagatctctaatgtatcggcaatggaagtaaacatagtacgcccatttgtgataagagccttagaagcattttataagcatgacaagccagaggctgatgtagacagagacaccagaagtagtagacaacagcgtgaaaccaacaatgaaccaaggagacctctaaggcaacgctag

SEQ ID NO: 149543 - protein, 210 aa, Arabidopsis thaliana
MAGQTDPHISLFSPQEVEFMAEDELVEIVPNMNMEQLNFISGDFGRFIPQIPTKVPLWLAVALKRRGKCTFRPPGWMSVDNLTQILEAERESQSTFQALPFSYVEIARLLFDHARDDIPDMYMVRSLVEDIRDVRLHKLETNLGSFQGTSAVKISNVSAMEVNIVRPFVIRALEAFYKHDKPEADVDRDTRSSRQQRETNNEPRRPLRQR

SEQ ID NO: 149544 - DNA, 543 bp, Caenorhabditis elegans
  CDS (1)..(543)
atgaatgcagaacgttgcgagttcatcgccggaaactcgcttattgaagtgatcccctcaatttccgatgaccggccgattcacctgatttccggcgatattggtccatttgaggcaggcgtaccctgtcggattccagtttggacagcgattttgatgaaacgaaaacacaattgcaaggtggtggctcctcaatggatggatgtagatgagctgaagaagatattgacgtcagagactgaaagccaaggattggcgaaattaccggatcatttctttgaaatctcgcatatgcttgttcgagatgcccgtgaggatatattcgaagttgaagctgtcaaatcattggttcaggacatttatgatcggagggacgcaaaacttcgaagctcagcgatcgaattcttgagacagaaccaaacctgccacgctcaattggacaacgttcagctgattgaagcatcgtccgctcgtgccactttggaggcctgtcgtcagatgggagctgtcgtccgtaataaacacgaatcaacacctttatag

SEQ ID NO: 149545 - protein, 180 aa, Caenorhabditis elegans
MNAERCEFIAGNSLIEVIPSISDDRPIHLISGDIGPFEAGVPCRIPVWTAILMKRKHNCKVVAPQWMDVDELKKILTSETESQGLAKLPDHFFEISHMLVRDAREDIFEVEAVKSLVQDIYDRRDAKLRSSAIEFLRQNQTCHAQLDNVQLIEASSARATLEACRQMGAVVRNKHESTPL

SEQ ID NO: 149546 - DNA, 636 bp, Ashbya gossypii ATCC 10895
  CDS (1)..(636)
atggccctcccaagaaacctacaggatacgttttctttgcaagaagtgcaatttttggtagagaatgaacccatcaagataatgcccaggatcaccaccaagccgatccggcgtaaagcggcgtcaactccgtccgccgggtcgtcggtgcgctggaaactcataaccacggacgatcacaatgtcaacaacatggtggcgatgagtagtacagaggtgtcgctgtggctggcgctgctgcttaaacagcagggtaagtgcagtattgtggcgcccgcgtggctgacgatcaaacaactggatagcttcattgagtttgagcttcagaacacttcgaggttcgccaacctgccgtggaactggctcatcatcgcacacctactgtttcagaaagctgccgatgacttcagagaccctgtgcacatactacgggccaaaatccaggacctacgagaagcaaggctgggcaagattgcaaagggtctgcagcatctgaatgagtcccatctgcagctagacaacctgtctctgtcggaaatcaacgaaatgaggccgttcgcggtaggtgtgatggacaagttgcgggacatccacgcggcagcggcggacagagagcaatacgcaaacaatatataa

SEQ ID NO: 149547 - protein, 211 aa, Ashbya gossypii ATCC 10895
MALPRNLQDTFSLQEVQFLVENEPIKIMPRITTKPIRRKAASTPSAGSSVRWKLITTDDHNVNNMVAMSSTEVSLWLALLLKQQGKCSIVAPAWLTIKQLDSFIEFELQNTSRFANLPWNWLIIAHLLFQKAADDFRDPVHILRAKIQDLREARLGKIAKGLQHLNESHLQLDNLSLSEINEMRPFAVGVMDKLRDIHAAAADREQYANNI

SEQ ID NO: 149548 - DNA, 564 bp, Nasonia vitripennis
  CDS (1)..(564)
  misc_feature (355)..(355): n is a, g, c or t
  misc_feature (356)..(356): n is a, g, c or t
atggatccaagtgaagttgaatttctgggagagaaacagctagtcagcatagtgccaaattttagttttggtgttattcatttaatttccggatcgattggaccatttcgagctgggttacctgtcagagtgcctatttggattgcattgagccttaaacagcaacaaaaatgcagaatagttgctcaagaatggatggacatggaaaagttaactgaaattttggaggaggaaaaacaatctaaactctttacaagaatgccaaataatcatttcatggatgaggcacaaatgttacttacagctgcacctgatgatataccagatgttgataacattagaactataataaagnntatctgggatttgagaatggctaagctacgcagttctgtaattggttttgttaaaaatgaaggaacgtatgcgaaactagatcatcttacagccatggaaatcaatagtatacgatctttattaccagatgcattagacattatgctgcatatggaacaggctggtaaatctgctgcgtctcaaagcctggatgcaacattgcagtag

SEQ ID NO: 149549 - protein, 187 aa, Nasonia vitripennis
  misc_feature (119)..(119): The Xaa at location 119 stands for Ala, Arg, Asn, Asp, Cys, Gly, His, Ile, Leu, Phe, Pro, Ser, Thr, Tyr, or Val.
MDPSEVEFLGEKQLVSIVPNFSFGVIHLISGSIGPFRAGLPVRVPIWIALSLKQQQKCRIVAQEWMDMEKLTEILEEEKQSKLFTRMPNNHFMDEAQMLLTAAPDDIPDVDNIRTIIKXIWDLRMAKLRSSVIGFVKNEGTYAKLDHLTAMEINSIRSLLPDALDIMLHMEQAGKSAASQSLDATLQ

SEQ ID NO: 149550 - DNA, 549 bp, Nematostella vectensis
  CDS (1)..(549)
atggatccgtccgaagtcgaattcttggcagaacaggagttgatttctattctgccgaacttttcggagaagaaagtttatcttattggcggagatataggaccattcaatgcctccctgcccacagatgtacctttgtgggtcgctctgaacctcaaacaaagaaagaaatgcagaatccaggcaccagaatggatggatgtagaaaaactgaggacactaaaggaagaggaaaacaaagaagagtatttcactaagatgccttctaagtactacatggaaatggcttcattacttttgagctgtgctgcagaggatataccacatgctgacgaggtccgtaccctggtcaaagatatctgggacttgcgggtagctaaactaaggaaatctgtggatttgatggttggacagcaagctgttcatgctaggctggatgacttgactttgatggaaatcaacactattcgcccgttactgacagaatcattaaaccacatgcataatctgcgttgtgtggcttcagagaacccatccactgaatcatag

SEQ ID NO: 149551 - protein, 182 aa, Nematostella vectensis
MDPSEVEFLAEQELISILPNFSEKKVYLIGGDIGPFNASLPTDVPLWVALNLKQRKKCRIQAPEWMDVEKLRTLKEEENKEEYFTKMPSKYYMEMASLLLSCAAEDIPHADEVRTLVKDIWDLRVAKLRKSVDLMVGQQAVHARLDDLTLMEINTIRPLLTESLNHMHNLRCVASENPSTES

SEQ ID NO: 149552 - DNA, 651 bp, Vanderwaltozyma polyspora DSM 70294
  CDS (1)..(651)
atgtcattacctgctcatttacaagagactttctctccggaagagattcaatttattgtggaaaatgaacctataaagatattcccacgtattacaactagacaattagctcgtggcagagttggttcggtttctgataagtcatcctctaatcaatggaggttgatcactactgatgcaaataatctgaataatatggtagcaatgcaatcgacagaggtaactttgtggttggctttacttttaaaacaacagaacaagtgtagtattattgctcctaaatggttgaccattaaagagttggataagagtattcaatatgaaaagaaatatctggataggtttagttcaattccatggaactggttagttctatgtcaattactgttcaaaagagcgtctgatgacttccatgatcccgttcatgagttacgctcaaggatacaagatttaagggaaattagacaattaaaagtgttgaaaggtttaaagcatttaaacaattctcatttacaattggataacatttcgatattagaaattaacgaattgagaccatttattgttggcattatggataaattaagagaaatacattctgcatcagaatcaaacgactcatcccaagctaatgaagatatagatatatga

SEQ ID NO: 149553 - protein, 216 aa, Vanderwaltozyma polyspora DSM 70294
MSLPAHLQETFSPEEIQFIVENEPIKIFPRITTRQLARGRVGSVSDKSSSNQWRLITTDANNLNNMVAMQSTEVTLWLALLLKQQNKCSIIAPKWLTIKELDKSIQYEKKYLDRFSSIPWNWLVLCQLLFKRASDDFHDPVHELRSRIQDLREIRQLKVLKGLKHLNNSHLQLDNISILEINELRPFIVGIMDKLREIHSASESNDSSQANEDIDI

SEQ ID NO: 149554 - DNA, 606 bp, Aedes aegypti
  CDS (1)..(606)
atggaaccagatgaacttgaatttgtcggagaaaacacaaccattggagtgatacccaactttaatcacgatccgatttacctcatatccggtgccattggcccattccggggaggccaacccttgcacattccgctgtggtttgcgatacatctgaggcaacagcaaaagtgccggatagttcctccgctttggatggacatcaatttgctggaagacatcaaggaggaggaaaaacgctcaagaaatttcacaaaaatgcccagtgaacactacatggtagaggcaaaactggttctcaacacagcaccggaagacgttccccagtcggatgaaatcaaaaccctaatcaaggatatttgggacattcggtgcgccaagctacggacgacgacggacatgttcatcaagggcgagggcgaaatggtgaagctggacaacattacgatagtcgagttgaataccattcggcctttcttgccacacgcgatggatatgttgctgcggattctaaacgccaagaagggtctcacccagaattcgtccgtacacaatcagtcggccacgatgaacagcatgagcgggtcacactcacggtatacctaa

SEQ ID NO: 149555 - protein, 201 aa, Aedes aegypti
MEPDELEFVGENTTIGVIPNFNHDPIYLISGAIGPFRGGQPLHIPLWFAIHLRQQQKCRIVPPLWMDINLLEDIKEEEKRSRNFTKMPSEHYMVEAKLVLNTAPEDVPQSDEIKTLIKDIWDIRCAKLRTTTDMFIKGEGEMVKLDNITIVELNTIRPFLPHAMDMLLRILNAKKGLTQNSSVHNQSATMNSMSGSHSRYT

SEQ ID NO: 149556 - DNA, 654 bp, Chlamydomonas reinhardtii
  CDS (1)..(654)
atggcgcccacggcatcgctttttgagtatgtatcctccaagctggatgagccaccgctcacgccagaagagctggagttcatggcggagcacgagaaagtgacgattgtgcccaacttcacgcttaacctgcccaacagcatgcttacatgcatcgagggcacgtacggcccgttccgaccaaacatcccagtggaggtccccctctacctggcgctggcactcaaccgccggaacaagtgccgcatccagccacccggttggatggcgcgggaaaagctcaaagccgtgctggatgaggagcgcaccatcccgcagtacttccagccggtgccgcagtactatgtggagacggccaagatgttgttcgcggaggcgcgggccatctttggcaccaacgccgaggtcaccactcagatcatggacctagtggaggagctgaagaaggtgcgcaacagcaagattttggacggcctgcgcaaggtgagcggccccatcaccgtcaagctcaacaacctcagcgcctcggagagcaacaagatccgccttctgtttgagaacagcctcaacatgtggcaccagctgtccaagaacgacaaggagtggcaggaggtccggatgacgggcaccaccgacacgcccgcgacactgtag

SEQ ID NO: 149557 - protein, 217 aa, Chlamydomonas reinhardtii
MAPTASLFEYVSSKLDEPPLTPEELEFMAEHEKVTIVPNFTLNLPNSMLTCIEGTYGPFRPNIPVEVPLYLALALNRRNKCRIQPPGWMAREKLKAVLDEERTIPQYFQPVPQYYVETAKMLFAEARAIFGTNAEVTTQIMDLVEELKKVRNSKILDGLRKVSGPITVKLNNLSASESNKIRLLFENSLNMWHQLSKNDKEWQEVRMTGTTDTPATL

SEQ ID NO: 149558 - DNA, 585 bp, Physcomitrella patens subsp. patens
  CDS (1)..(585)
atggctgaggatgagccagtaaatattattcccaatgttcgcatggatacgcttcacatgatttgtggagactatggacctttcagacctcaaatacctatcacagtgccactttggcttggtatagcaatgaagaaaagaagcaaatgtcggatccaaccaccaggttggatgtcggtcgaaaggttgaccgaagtgctggagatggagagagaagctccccgtgagtttcaaccactgccttttcactacgtcgagatagccaagttgcttcttgacaatgcccgggaagattttgagaacaactacatggtgcaatcactgttagaggatatcaaagatgtaaggtgggacaaagtggagaaaggtttaaaaacgctttccggtcgtactcacgctgtgaagctgaaaaatctttctgctatggaagttaatagaatgcgaacattcactgtgagagctcttcaaagcttcttcaaacatgacaacgacgatatgatgaagcagacacctacagactcagatagtcaatcaacacccacgtcttcagatcggttacctcgtcggacactacgaccacgttga

SEQ ID NO: 149559 - protein, 194 aa, Physcomitrella patens subsp. patens
MAEDEPVNIIPNVRMDTLHMICGDYGPFRPQIPITVPLWLGIAMKKRSKCRIQPPGWMSVERLTEVLEMEREAPREFQPLPFHYVEIAKLLLDNAREDFENNYMVQSLLEDIKDVRWDKVEKGLKTLSGRTHAVKLKNLSAMEVNRMRTFTVRALQSFFKHDNDDMMKQTPTDSDSQSTPTSSDRLPRRTLRPR

SEQ ID NO: 149560 - DNA, 603 bp, Culex quinquefasciatus
  CDS (1)..(603)
atggaacccgacgagctggagtttatcggtgaaaacgccaccatcggtgtgattcccaacttcaaccacgatccgatctatctgatctcgggagcggtgggacctttccgtggaggtcaaccgctgcacatcccactgtggcttgcgatgcacctgaggcagcagcaaaagtgccgcatcgttcccccggtctggatggacgtcacgctgctagagaacctgaaggaagaggagaagcggtcccggaacttcaccaaaatgcccagcgagcactacatggtggaggccaagctggtcctgaacacggcccccgaggacgtgccgcagtcggacgagatcaagacgctgatcaaggacatctgggacattcggtgcgccaagctgcgcaccacgacggacatgttcctcaaaggcgagggcgaaatggtccggctggacaacgtgagcatcgtggagctgcacaccatccggccgtttctgccgcacgcgatggacctgctggagcgcatccagcaggccaagaagggcacccggggcaacgcgacggtgcgcgaccactcgctgctggtgaccagcttgagcgggtcgcactcgcggcattga

SEQ ID NO: 149561 - protein, 200 aa, Culex quinquefasciatus
MEPDELEFIGENATIGVIPNFNHDPIYLISGAVGPFRGGQPLHIPLWLAMHLRQQQKCRIVPPVWMDVTLLENLKEEEKRSRNFTKMPSEHYMVEAKLVLNTAPEDVPQSDEIKTLIKDIWDIRCAKLRTTTDMFLKGEGEMVRLDNVSIVELHTIRPFLPHAMDLLERIQQAKKGTRGNATVRDHSLLVTSLSGSHSRH

SEQ ID NO: 149562 - DNA, 576 bp, Brugia malayi
  CDS (1)..(576)
atgatgacgccggaacaatgtgaatttattgccggtaatgaatggattcagataaatccgcagtttaatttggatgaattgcatctgatatgtggtgatattggaccatttgaagctggtatgcctatttgggtaccactctggatagcagttacgttaaggaaaaggcgaaaatgcactatcattccaccacaatggttatgtgtggaggagttgaaaaagcttgtaatagcggaaagtggaactaatgcatttggacaagtaccacggttttatttggaaatagctcacatgttcgtacaatatgccaaagaagatcttccggatagcgatatgatacgagtttatgtacaagatttatgggataagcgatctgcaaagctcaacaattcatcgactaaatttttgggacaggtagaatcatgtcatgcaagaatggacaatattactttgatggaagtagcgtatattaaacgatcactaattacagccagtcgtgaaattgaagcgcttaacaagtcgtttcatgaattatccagtcaaaacagcagtgatcaaagatatgtaatagcttga

SEQ ID NO: 149563 - protein, 191 aa, Brugia malayi
MMTPEQCEFIAGNEWIQINPQFNLDELHLICGDIGPFEAGMPIWVPLWIAVTLRKRRKCTIIPPQWLCVEELKKLVIAESGTNAFGQVPRFYLEIAHMFVQYAKEDLPDSDMIRVYVQDLWDKRSAKLNNSSTKFLGQVESCHARMDNITLMEVAYIKRSLITASREIEALNKSFHELSSQNSSDQRYVIA

SEQ ID NO: 149564 - DNA, 612 bp, Acyrthosiphon pisum
  CDS (1)..(612)
atgatgcaccctgctgaaatcgagtatatggccgaaaacgagatcattcagattgtgccgacgttcaatcatgctagccacgtacacctgatatgcggttcttatggtccgttccgagcaggtctgccgttgaacgttcccatttgggtggcactgaatctgcgacaaaaaaagacttgtcgtatcctagcccctgactggatggccgttgacaaattgcaagaaagacttgaagaagagaaagcgtccaaatttttcacacaattaccaaccaatttttacttggaaatcactcaaatgttattgactgttgccagtgaggatattccacaagggaacgatataaaaacggcagttaaagatctatgggatttaagaatagcaaaattaagatcttctgtcgatttattcgttaaagaaggccgtgttcaagcttctttaaaccatttgaccccaatggagattaattctgtgagaccaatattcccagatacattggatgccttaatgacactccatgaacacattaactcgagtgacgacagagaagacagcagtcaatcttcagtagcaactcctagtagttcaacatctttttcattatccttgtaa

SEQ ID NO: 149565 - protein, 203 aa, Acyrthosiphon pisum
MMHPAEIEYMAENEIIQIVPTFNHASHVHLICGSYGPFRAGLPLNVPIWVALNLRQKKTCRILAPDWMAVDKLQERLEEEKASKFFTQLPTNFYLEITQMLLTVASEDIPQGNDIKTAVKDLWDLRIAKLRSSVDLFVKEGRVQASLNHLTPMEINSVRPIFPDTLDALMTLHEHINSSDDREDSSQSSVATPSSSTSFSLSL

SEQ ID NO: 149566 - DNA, 555 bp, Trichoplax adhaerens
  CDS (1)..(555)
atggaggcctgcgagattgaatttcttgctgaagatagcatcgtgacggtcctacccaatttctcagaaaacaagatttatttaatcagtggtgatgttggtccctttaatccttccatgccaacggatctgcctttatggctagccatcgatctgaagcaacgccaaaaatgtcgaattcaacctccaaaatggatgaatgtcgaaactcttcaagagttgaaacaagcggaaaatgattctgcacttttctgtcctatgcctgatccacattatattgagataacccagctgttgatgaactgtgctgcagaggatataccccatgccgatgagattaaaacattaataaaagatatagctgatttacgcatggcgaaattaaagaagagtatggacggaatgattaaagaaaaagcaaccaatgctaggttagataatttatccatgatggagattaacctcataagacctttattgacgcaagcacttgaccagtcgtatcgtctccaatgcttgcaagatgaacaacttcaactggctggtactgaatag

SEQ ID NO: 149567 - protein, 184 aa, Trichoplax adhaerens
MEACEIEFLAEDSIVTVLPNFSENKIYLISGDVGPFNPSMPTDLPLWLAIDLKQRQKCRIQPPKWMNVETLQELKQAENDSALFCPMPDPHYIEITQLLMNCAAEDIPHADEIKTLIKDIADLRMAKLKKSMDGMIKEKATNARLDNLSMMEINLIRPLLTQALDQSYRLQCLQDEQLQLAGTE

SEQ ID NO: 149568 - DNA, 633 bp, Vitis vinifera
  CDS (1)..(633)
atggccggtcaatctgatccttacatatccctcttttctgcccaggaggtggaatttcttggcgaagatgaaatggtggagattgttcccaatatgagaatggatcccctgaatttgatctgtggggattttgggcctttcaggccacaaatagctactcaagttccgttgtggcttgcagtggctttgaagaaacgagggaaatgcaccattcggccccctgaatggatgtcagttgataagttgacacaggttttggaagcagagcgaaactctctaagagaatttcagccacttccattccattatgttgaaatcgcaagacttctttctgaccatgcacgtgatgacattcctgatgtttatatggtaaggtctctcattgaagacatcaggaatgtaaggtttcataaagttgagactgggttagagacaatccatgagcgcacacatgcagtgaagcttaaaaatttatctgcgatggaagcaaatatagtgcgcccatttgttgtgagagccctgcaggcattttataagcacgatagtccagagatgataccacaaccagataccacggctattagaaggcggcaagtagctgatcgtggaccaaaacgggatcgacgatactaa

SEQ ID NO: 149569 - protein, 210 aa, Vitis vinifera
MAGQSDPYISLFSAQEVEFLGEDEMVEIVPNMRMDPLNLICGDFGPFRPQIATQVPLWLAVALKKRGKCTIRPPEWMSVDKLTQVLEAERNSLREFQPLPFHYVEIARLLSDHARDDIPDVYMVRSLIEDIRNVRFHKVETGLETIHERTHAVKLKNLSAMEANIVRPFVVRALQAFYKHDSPEMIPQPDTTAIRRRQVADRGPKRDRRY

SEQ ID NO: 149570 - DNA, 684 bp, Populus trichocarpa
  CDS (1)..(684)
atggctggtcaatctgactctaccatgtctctattttcttctgaagagattgaatttatggcagaagatgaaatggtggagattgttccaaatttgaggatggattctctcaattttatttgtggggattatggaccattttatccacaattggcagctcaagtgccgatttggttagctctggctttgaagaagagagggaaatgcacaatcaggcttcctcagtggatgtcaattgaaaatttgactcaggttttggaagcagaacgggactctcacgcattccagcctttaccctttcattacgtggaaatctcaagacttcttttcgaccttgcacgtgaggacattcctgacatgtatatggtgaggtcacttatcgaggatatcagagatgtaagatttcataaagtggagactaatctagaaaagtttactgcatctacggtgacgtggaaaaatatgtctgcaatggaagtcaatgtaatccgtgcatttgctgggagagctctgcaggcattttataagcatgataatgaacagcaaacaccagatacagacagaacgctggataaacagccacaaatacctactgacaggccaaaagtatgccatctcttaatatcagatttatatgtctgtgcattggcggacttatgtgttcattttatttcattattatga

SEQ ID NO: 149571 - protein, 227 aa, Populus trichocarpa
MAGQSDSTMSLFSSEEIEFMAEDEMVEIVPNLRMDSLNFICGDYGPFYPQLAAQVPIWLALALKKRGKCTIRLPQWMSIENLTQVLEAERDSHAFQPLPFHYVEISRLLFDLAREDIPDMYMVRSLIEDIRDVRFHKVETNLEKFTASTVTWKNMSAMEVNVIRAFAGRALQAFYKHDNEQQTPDTDRTLDKQPQIPTDRPKVCHLLISDLYVCALADLCVHFISLL

SEQ ID NO: 149572 - DNA, 630 bp, Pediculus humanus corporis
  CDS (1)..(630)
atggaacctgcagaaattgaatttttggccgaagaaaaatacataacaataattcctagatttcattgtagaaaaacatatttcataacaggagaattgggaccttttcgtgcaggtattccattaaaagtacctttatggttggctcgggatttaaaaagacgacaaaaatgccacgttttaacaccggaatggttggatttagaaaatttaagtcaactcaatgctgatgaagttaattctgttaaatttatcaaattgccaagtgaaaattatttcattggtgccaaaataatattgggctttggagttgatgtcaattttttttcattaatgacagcagttaaagatttgtgggataaaagaaaatcaaagttggaagatgcagcagaaatgtttttaggaatcggaatggatcatgttgttgctcctaaaattacaactgcagaaattaacattgtgagacctctactaccagaattaactgattttttgaacagattagcaagtactgaaatcacaaggcctgaaagacttgaagattctgaaaatagtttagatgaatcattcaattatagcaatattatttcttctttaaatgtcggctctattagcacaattgaatcataa

SEQ ID NO: 149573 - protein, 209 aa, Pediculus humanus corporis
MEPAEIEFLAEEKYITIIPRFHCRKTYFITGELGPFRAGIPLKVPLWLARDLKRRQKCHVLTPEWLDLENLSQLNADEVNSVKFIKLPSENYFIGAKIILGFGVDVNFFSLMTAVKDLWDKRKSKLEDAAEMFLGIGMDHVVAPKITTAEINIVRPLLPELTDFLNRLASTEITRPERLEDSENSLDESFNYSNIISSLNVGSISTIES

SEQ ID NO: 149574 - DNA, 636 bp, Sorghum bicolor
  CDS (1)..(636)
atggcggggcagtccgacccgcacctctccatcttctcgccctccgaggtggagttcgtggcggaggatgagatcgtccaaattgtccccaacatccgcatggacgccgtcaacatgatctgcggggatttcgggcccttcttcccacagatccccaccaaggtgccgctctggctcgccgtcgcgctcaagaagcgtagcaagtgcaccattcgcaccccagactggatgactgttgaccgcttgacacaggtattggaagctgaaagagagtcgcctcgagaattccagccattaccattccactatattgaaatttctaagctgctatttgatcatgctcgtgatgacatctcagatgcatacctggtgagatctctaattgaggacatcagagatgtcagattccacaaggttgagactggattagagacgatatctggacgcacccatgctgtaaagctcaaaaatctctctgcaatggaagtgaacattgtccgtcctttcatggtgagaactttgcaggcattctataagcacgattgtccacagatgattcagcaagcagataatatagggagcagagcaacaccagttacagaccgtgctccaagaagagatctaaggcgcaggtag

SEQ ID NO: 149575 - protein, 211 aa, Sorghum bicolor
MAGQSDPHLSIFSPSEVEFVAEDEIVQIVPNIRMDAVNMICGDFGPFFPQIPTKVPLWLAVALKKRSKCTIRTPDWMTVDRLTQVLEAERESPREFQPLPFHYIEISKLLFDHARDDISDAYLVRSLIEDIRDVRFHKVETGLETISGRTHAVKLKNLSAMEVNIVRPFMVRTLQAFYKHDCPQMIQQADNIGSRATPVTDRAPRRDLRRR

SEQ ID NO: 149576 - DNA, 636 bp, Sorghum bicolor
  CDS (1)..(636)
atggcggggcagtccgacccgcacctctccatcttctcgccctccgaggtggagttcgtggcggaggatgagatcgtcgaaatcgtccccaacatccgcatggacgccctcaacatgatctgtggggatttcgggcccttcttcccacagattcccaccaaggtgccgctctggctcgccgtcgcgctcaagaagcgtagcaagtgcactatccgcacccctgactggatgactgttgaccgcttgacacaggtattggaagcggaaagagagtcgcctcgagaattccagccattaccattccactacattgaaatttctaagctgctatttgatcatgctcgtgatgacatctcagatgcatacctggtgagatctctaattgaggacatcagagatgtcagattccataaggttgagactggattagagacaatatctggacgcacccatgccgtaaagctcaaaaatctctctgcaatggaagtgaacattgtccgccctttcatggtgagaactttgcaggcattctataagcacgatagtccacagatgattcagcaagcagataatacagggagcagagcaacgccagttacagaccgtgtcccaagaagagatctaaggcgcaggtag

SEQ ID NO: 149577 - protein, 211 aa, Sorghum bicolor
MAGQSDPHLSIFSPSEVEFVAEDEIVEIVPNIRMDALNMICGDFGPFFPQIPTKVPLWLAVALKKRSKCTIRTPDWMTVDRLTQVLEAERESPREFQPLPFHYIEISKLLFDHARDDISDAYLVRSLIEDIRDVRFHKVETGLETISGRTHAVKLKNLSAMEVNIVRPFMVRTLQAFYKHDSPQMIQQADNTGSRATPVTDRVPRRDLRRR

SEQ ID NO: 149578 - DNA, 600 bp, Pichia pastoris GS115
  CDS (1)..(600)
atgtcacttcctaaaaagtataaaaacacgtttctaccgtcagaggtcgaatttcaggctgaggatcaaccaattttaattatccctagatatgccctcaaagatcgtcagttaataggaactagtattccagttttgaaacccatgaagagagctgaagtgccattgtggttgggatttatattgaagcaacaagatagatgtaacatagtaacccctagttggttatccataaactttctgaaaaaggcctaccaagaagaagtgacatatactaccagattctttagaatgccttggaattggctagagatatccaagatgattttagataaagcttcggacgacatgaccgagcctccccatcaaatcagggccctaatacaagatctgagggaagtcagactgataaaagctagaagaggtctgaaagaactaaatgaatcttacatgcaattggacaacttgagtttaatggaaattaatgagctgaggccgatggttgttggagttatggaccaattgagaaagctgcaagtcggcactaatgaggacgaagaagtgagcgatgaggagggcccactgagttatgatatatga

SEQ ID NO: 149579 - protein, 199 aa, Pichia pastoris GS115
MSLPKKYKNTFLPSEVEFQAEDQPILIIPRYALKDRQLIGTSIPVLKPMKRAEVPLWLGFILKQQDRCNIVTPSWLSINFLKKAYQEEVTYTTRFFRMPWNWLEISKMILDKASDDMTEPPHQIRALIQDLREVRLIKARRGLKELNESYMQLDNLSLMEINELRPMVVGVMDQLRKLQVGTNEDEEVSDEEGPLSYDI

SEQ ID NO: 149580 - DNA, 633 bp, Zygosaccharomyces rouxii CBS 732
  CDS (1)..(633)
atgtcacttcctgaccaactggagtctacattctcaccagaggaaattcaattcattgtagagaatgaacccattagaatttttccccgtgtaaccactagaaagacaaagagaccccttccgatgggagggggtagtaatgaaagcgttcgttggaaacttatcactacagatgatcacaacgttaacaatatggttgctatgcaatctacagaagtaaccctctggctcgcattattgttaaagcaacagaacaaatgtagtattgttgccccctcatggctcacactaaaggaattggacagaagtattcaatatgaaaaaacacatgtggatagattctgccctgtcccttggaactggcttgtgctggcacaagtacttttcaaaagggctcctgaacatttccatgatccggttcacgaattgagagctaaagtacaagatctgagagagatccgccagctaaaagtgctgaggggtcttagacacttgaatgaatcgcatctgcaactagataacctaagtctactggagataaacgaattaaggcccttcatcgtggatgttatggataaactacgacaattgcatactgcaaagggaaccatggaagacgaagaagaagaatga

SEQ ID NO: 149581 - protein, 210 aa, Zygosaccharomyces rouxii CBS 732
MSLPDQLESTFSPEEIQFIVENEPIRIFPRVTTRKTKRPLPMGGGSNESVRWKLITTDDHNVNNMVAMQSTEVTLWLALLLKQQNKCSIVAPSWLTLKELDRSIQYEKTHVDRFCPVPWNWLVLAQVLFKRAPEHFHDPVHELRAKVQDLREIRQLKVLRGLRHLNESHLQLDNLSLLEINELRPFIVDVMDKLRQLHTAKGTMEDEEEE

SEQ ID NO: 149582 - DNA, 750 bp, Micromonas sp. RCC299
  CDS (1)..(750)
atgaaaggagtgcgtgaagctctcgaacatcaggaggtgcactttctcgctgaagacgagaaagtcgtaatactgccaacattcgcgctcacgcagcgtgctttgccagcattcaatacattcggtcccttccgtccccaaattcaagtcactgttcctttctggcttgctctcatcttgaaaaagcaaggtagatgtttgatagtgccccctagatggctacaaatatcatcgttggactcgttagtaagcttggagcgtacagacgatatatttcagacactgcctttccactacgtcgaaatcgccacagacttgtgcaagtatgcgcgggacgatttgccggaatgggatcacttattcgacttagtagaaactgttagatcagttcgccacaataaaatgcaggcagggttacggagcctagatgcgcgcgcgacaaagggagtgaaactcagcaatataacattattagaagtcaacatcatgcgggcatttatgacaaactccttggaattttatcgccttttatcgactcaaaccgctgttgctgttgtgggcatcgcatcttcactgtcgcatacacgatccctgcatcttcattctgtcacacaaagacacgggccttccatcgtaaaagtctccttcgagacctttttccaaacccggtgcaacacaactgatacgaaggttaataagtaccgtcgaaggtaccttcgaagggaccttcgagtacgaaggtatcaatag

SEQ ID NO: 149583 - protein, 249 aa, Micromonas sp. RCC299
MKGVREALEHQEVHFLAEDEKVVILPTFALTQRALPAFNTFGPFRPQIQVTVPFWLALILKKQGRCLIVPPRWLQISSLDSLVSLERTDDIFQTLPFHYVEIATDLCKYARDDLPEWDHLFDLVETVRSVRHNKMQAGLRSLDARATKGVKLSNITLLEVNIMRAFMTNSLEFYRLLSTQTAVAVVGIASSLSHTRSLHLHSVTQRHGPSIVKVSFETFFQTRCNTTDTKVNKYRRRYLRRDLRVRRYQ

SEQ ID NO: 149584 - DNA, 630 bp, Lachancea thermotolerans CBS 6340
  CDS (1)..(630)
atgtcgctgccatggaatattcaagagacattctcgccggaggagattcaattcatagtggaaaatgaacccatcaaaatatttcccagattcacaacgcgtgtgagcttgcgcggagaccgtgcgaagcccgcgcatacgaggtggaagctcgtaaccgcagacgaccacccgttgaacaacttggtcgccatccagaccacggaagttgcgctgtggatggcccttttgctcaagcagcaaggaaagtgtagcattgttgcgccaggatggctgcggctctcgcaactacaaaaatacatcgattatgagctgaaacacgcggagcgctttagcgaactgccttggaactggcttgtcgtagcacagctgctgttttcgaaggctgcggacgacttacatgacccggtgcatttgctgcgagggaaaatacaagacctgcgggagatccgactgggcaagattggccagggcttgaagcatctgaacgagtcgcatttgcaattggataacctaagtttgctcgagatcaacgagctgcggccgtttgtccttggagtaatgaacaagctgaagcaggtgcattcgagcatctccgaggaacgaggctccgaggactactacgagtaa

SEQ ID NO: 149585 - protein, 209 aa, Lachancea thermotolerans CBS 6340
MSLPWNIQETFSPEEIQFIVENEPIKIFPRFTTRVSLRGDRAKPAHTRWKLVTADDHPLNNLVAIQTTEVALWMALLLKQQGKCSIVAPGWLRLSQLQKYIDYELKHAERFSELPWNWLVVAQLLFSKAADDLHDPVHLLRGKIQDLREIRLGKIGQGLKHLNESHLQLDNLSLLEINELRPFVLGVMNKLKQVHSSISEERGSEDYYE

SEQ ID NO: 149586 - DNA, 597 bp, Schistosoma mansoni
  CDS (1)..(597)
atgaatccggcagagcttgaatttctttcagaagaggaaggattgaccatagtacctaagtttaaacttgattctattaagctgctcaatactaccattggtccttttttcccaaatgtgccaactgttgtccctctttgggttgctctttttctcagagggcagcaaaagtgtcgtattatgccaccagcgtggttagcgttggagaagttaaatgagtgtaaagaagctgaagaaaatgactccggttgtacttctcctcctcatcctcaatatattgaaattagtacacttcttcttcaacatgcggctgaggatataccgaatcctgaaagtattcgcaacattgttcgtgatgtatgggatattcgtgttggaaagttattatcgtctgttaatggtttcctctctagtggatcgtcaacagcacgagttagtcaattgactaatatggaattaaccactttacataatcttctgactaattcaatggaccagttatctttactacgtcaggcaacttcacaagctgtagaattcggtggtggtgcagctaatcgaacatcatttttgaattcatcatctgtcggaaactaa

SEQ ID NO: 149587 - protein, 198 aa, Schistosoma mansoni
MNPAELEFLSEEEGLTIVPKFKLDSIKLLNTTIGPFFPNVPTVVPLWVALFLRGQQKCRIMPPAWLALEKLNECKEAEENDSGCTSPPHPQYIEISTLLLQHAAEDIPNPESIRNIVRDVWDIRVGKLLSSVNGFLSSGSSTARVSQLTNMELTTLHNLLTNSMDQLSLLRQATSQAVEFGGGAANRTSFLNSSSVGN

SEQ ID NO: 149588 - DNA, 552 bp, Branchiostoma floridae
  CDS (1)..(552)
atggacccttcagaagtagaattcctggctgagaaggagatggtacacatcgtgcccaacttctccatggacaggatgtatcttattgggggtgatatcggtcccttcaaccccggtctccctgtgcagatccccctgtggatggccatcaacctgaaacagcgacagaagtgcaggatacagcctcctgactggatggatgtggaaaaactacaggagaaaaaagaagaagaagagggctcagagttcttcaagcccatgctgaacaagcattacatggaagtggcacaactcttactcacacatgcaacagatgatatcccgagggcagatgaggtcaggactctgatcaaggatatctgggacatccggacagccaagctgcgcacctctgtggacaagttcgtctcagagcaggaatcccacgctcagctggatgacctttctctgatggaaatcaacacgatgagacagttcctgacacaggcactggatcacatgcaccaactgcgagcaccacaagggggcgccactcaacatacacaggaatga

SEQ ID NO: 149589 - protein, 183 aa, Branchiostoma floridae
MDPSEVEFLAEKEMVHIVPNFSMDRMYLIGGDIGPFNPGLPVQIPLWMAINLKQRQKCRIQPPDWMDVEKLQEKKEEEEGSEFFKPMLNKHYMEVAQLLLTHATDDIPRADEVRTLIKDIWDIRTAKLRTSVDKFVSEQESHAQLDDLSLMEINTMRQFLTQALDHMHQLRAPQGGATQHTQE

SEQ ID NO: 149590 - DNA, 558 bp, Saccoglossus kowalevskii
  CDS (1)..(558)
atggatccatcggaagtagaatttctatcagaaaagcagaaagttgtgatcattccaaatttttcacaggacaaggtctatttaatcagtggtgatgtaggaccattcaatcctggcttacctgtagaagtccctctctggatggctgttaatttgaaacaaagacaaaaatgtagaatacaacctccagactggatggatgtggaaatattggaagagaagaagaaagaagaagttggatctcaagtgtttcagccgatgttaaacgaacattacatggaagtggcacagttattgattaaatgtgctgcgaacgacatcccgagagctgatgaagtcaggacattaataaaagatatctgggatgtcaggattgccaaacttaggagcagtattgaccgatttgttagtgatcaagaaacccatgcaaggctggacaatctatcattaatggaaataaacacaatacgtccatttttgacactcgcattggatcatatgcatacactgagaatgaacacgcagcaaagtagtcgggccgcaccaacacaagattga

SEQ ID NO: 149591 - protein, 185 aa, Saccoglossus kowalevskii
MDPSEVEFLSEKQKVVIIPNFSQDKVYLISGDVGPFNPGLPVEVPLWMAVNLKQRQKCRIQPPDWMDVEILEEKKKEEVGSQVFQPMLNEHYMEVAQLLIKCAANDIPRADEVRTLIKDIWDVRIAKLRSSIDRFVSDQETHARLDNLSLMEINTIRPFLTLALDHMHTLRMNTQQSSRAAPTQD

SEQ ID NO: 149592 - DNA, 633 bp, Arabidopsis lyrata subsp. lyrata
  CDS (1)..(633)
atggctggccagactgatcctcatacttcactattttctccacaagaggttgagtttatggcagaggacgaactggtggagattgttcctaatatgaatatggagcaactcaatttcatcagtggcgatttcggtcggttcattcctcagattccgacaaaggtgcctctgtggcttgcagtggcactgaagaggagaggaaaatgcactttccggcctcctgggtggatgtctgttgataatttgactcagatcttggaagcagaacgtgaatctcagtcgacatttcaggcattaccatttagttacgtggaaattgccagactactttttgaccatgcacgtgatgatattccagacatgtatatggtgagatccctagtcgaggacatcagagatgtgcggcttcataaactcgagactaacttgggatcatttcaaggtacatctgcagtaaagatctctaatgtatcggcaatggaagtgaacatagtccgcccatttgtgataagagccttagaagcattttacaagcatgacaagccagaggctgatgtagacagagacaccagaagtagtagacaacagcgtgaagccaacaatgaaccaaggaggcccttaaggcaacgctag

SEQ ID NO: 149593 - protein, 210 aa, Arabidopsis lyrata subsp. lyrata
MAGQTDPHTSLFSPQEVEFMAEDELVEIVPNMNMEQLNFISGDFGRFIPQIPTKVPLWLAVALKRRGKCTFRPPGWMSVDNLTQILEAERESQSTFQALPFSYVEIARLLFDHARDDIPDMYMVRSLVEDIRDVRLHKLETNLGSFQGTSAVKISNVSAMEVNIVRPFVIRALEAFYKHDKPEADVDRDTRSSRQQREANNEPRRPLRQR

SEQ ID NO: 149594 - DNA, 561 bp, Apis mellifera
  CDS (1)..(561)
atggatccaagtgaagtagaatttcttggtgaaaaagaattagtcactgttgtacccaattttagttttgatacaattcatttgatttctggctcggtaggtccttttcgagctggtttacctgtcaaaattccaatttggttggctgtgaatttaaaacaacagcaaaagtgtcgaattattaatcaagactggatggatgccgaaagtttaaatgaagcgaaggaagaagaaaaattatcaaaattatttacaaaaatgcctagtaatcattatgtggatgaaacgcaactcttattaagtgctgcaagtgatgatatacacgaagcagataaaataaggacagcagtgaaagatttgtgggacataagaatgtcaaagcttcgtacgtctatagatgcattcctcaaaagtgatggaatgcatgcaaaattagatcatttaactgctatggaaatcaatagtgtgcgtccattacttccgcatgctcttgatcaaatgatgagaattcaaactatcacaaaatcaacacaacttcagcaacatttaaacaaggtataa

SEQ ID NO: 149595 - protein, 186 aa, Apis mellifera
MDPSEVEFLGEKELVTVVPNFSFDTIHLISGSVGPFRAGLPVKIPIWLAVNLKQQQKCRIINQDWMDAESLNEAKEEEKLSKLFTKMPSNHYVDETQLLLSAASDDIHEADKIRTAVKDLWDIRMSKLRTSIDAFLKSDGMHAKLDHLTAMEINSVRPLLPHALDQMMRIQTITKSTQLQQHLNKV

SEQ ID NO: 149596 - DNA, 648 bp, Candida glabrata CBS 138
  CDS (1)..(648)
atggcattgcctgctcatttgcaagagacattcagtccagaagaagtgcagtttctagtggaagaagagacagttaagatatttccccgtataactacgagacagaaacggagggataagaacagaggagcatacggtgatgtggatacaaaatggagtatgttaaccactgaaaacgacaacttgaataatatggtagcgatgaggtctactgaagtaaagctgtggatagcgttgttattgaaacaacaaaacaaatgtagtatagtggctccctcctggctgacattacgcgaacttaatcgtaagatccaacaagaaacgaataactcagataggttttgcgatttaccatggaattggttggtaatcgccaatgtactgtttgcaaaagcagcagatgattttcatgatccagtacatgaattgcgtagcaaagttcaagacctccgagaaataagacaaacgaaagtgctgaaaggtttaaaacaattaaatgcatctcatttacaacttgataatctgagtttgctagaaattaatgaacttcgaccatttatagtgaggacgatggataaacttcgagagattcatgattctgccaatacggatggtggagtagttgatggagacgaagaagaaatctag

SEQ ID NO: 149597 - protein, 215 aa, Candida glabrata CBS 138
MALPAHLQETFSPEEVQFLVEEETVKIFPRITTRQKRRDKNRGAYGDVDTKWSMLTTENDNLNNMVAMRSTEVKLWIALLLKQQNKCSIVAPSWLTLRELNRKIQQETNNSDRFCDLPWNWLVIANVLFAKAADDFHDPVHELRSKVQDLREIRQTKVLKGLKQLNASHLQLDNLSLLEINELRPFIVRTMDKLREIHDSANTDGGVVDGDEEEI

SEQ ID NO: 149598 - DNA, 606 bp, Kluyveromyces lactis NRRL Y-1140
  CDS (1)..(606)
atggcactaccgagagatctatcaataggattttctccccaagagatacagtttttaattgaaaatgaaccgacacgaattatgcccagaatcactacgaggaagaccaaaaaacagctcgcgaaggatcctggcgcccaatggtcactgatcacatgcgatgattctacggtaaataacatggttgcaatgaatagttgcgaagtcacgttatggctggctttactgttaaaacaacagggaaagtgtaacgtcgtggtacccagttggctgacgttacaacagctggagaagtatttagattttgaattgaaaaacccatcacgattctccaatctaccctggaattggctagtggtatcgtcactgctgtttgccagatgcagcgatgattttcaggatccagttcatctactgagatctaaggtccaagatctgcgagaagttcgtttgggaaaagtcaacaagggtttgcagtacctgaacgaatcgcatttacagctagagaacttgtccttgatggaaatcaatgagatgagaccctatgcgtgtggtatcatggacaaactgaggacaattcatgactccagtaatgacaccacgtga

SEQ ID NO: 149599 - protein, 201 aa, Kluyveromyces lactis NRRL Y-1140
MALPRDLSIGFSPQEIQFLIENEPTRIMPRITTRKTKKQLAKDPGAQWSLITCDDSTVNNMVAMNSCEVTLWLALLLKQQGKCNVVVPSWLTLQQLEKYLDFELKNPSRFSNLPWNWLVVSSLLFARCSDDFQDPVHLLRSKVQDLREVRLGKVNKGLQYLNESHLQLENLSLMEINEMRPYACGIMDKLRTIHDSSNDTT

SEQ ID NO: 149600 - DNA, 621 bp, Debaryomyces hansenii CBS767
  CDS (1)..(621): transl_table=12
atggttttaccggctcatttacagaacagtttgatgccctcagaggttagttttctcgcagagaatgaatatattacgattttgccgagatattcaatgaaaaaactagagttgataggaaccaaagtaccgacgttgaggggtatgagaagagaaaaaattccaatttggatagctgtgatcttgaaatctcaagataaatgtaatatcgttcctccagagtggttaaacttgatatacttgaaagaaaaatacgaagaagaattgaagcaaccacataagttcagtgtattaccttggaactggcttgaaatttcgaaaattttacttaataaagcagcagatgatttatctgatcctactcatcaattaagatccataatacaagacttgagagaaatacgacttgttaagtctcgaaaaggtctaaaggaattgaacgaatcgaatatccaattggatgggctttctttattggaaattaacgaattgaggccgtttgtcttaactgtcatgaacaaattgaggcaactccacgaatccgtgaacaccaaaacagatagaggaaccggaaacgaccaggatgatgatatgtaccacgatgtatctgataatgaatga

SEQ ID NO: 149601 - protein, 206 aa, Debaryomyces hansenii CBS767
MVLPAHLQNSLMPSEVSFLAENEYITILPRYSMKKLELIGTKVPTLRGMRREKIPIWIAVILKSQDKCNIVPPEWLNLIYLKEKYEEELKQPHKFSVLPWNWLEISKILLNKAADDLSDPTHQLRSIIQDLREIRLVKSRKGLKELNESNIQLDGLSLLEINELRPFVLTVMNKLRQLHESVNTKTDRGTGNDQDDDMYHDVSDNE

SEQ ID NO: 149602 - DNA, 618 bp, Anopheles gambiae str. PEST
  CDS (1)..(618)
atggaaccggccgagctagagtttatcggtgaaaactccctaattagtgtgatacccaactttaaccatgattccatctatctcatatcgggcaccatcgaaccattccgaggaggcacgccgctttatgtaccgctgtggctgggaatacatcttcggcaacaacaaaagtgtcgcatcgtagcaccgaactggatggatattgatctgctggaagatattaaggaaacggagaaacgcatcagtacctttaccaaaatgcccagccccaactatatggtggaagctaaattgattctcaataccgcaccggaagacgttccctcgtccgatggcatcaaaacgctcatcaaggatatctacgatgtgcgctgcgctaagctgcgtaccacggtggaaaacttcatcaaaagtgaagggtcgcatacggtgaatttggaaaatgtaactgtgctggagctgcacaccattcaaccgttgctgccccatgcaatggacttgcttagtcggatagaacaaacgaggaaggttgtacgttcgatgaacacaacaacacaatcgttcagcttcggcggtacgagcgggctgggatcgtccggttcatccagaccttggtaa

SEQ ID NO: 149603 - protein, 205 aa, Anopheles gambiae str. PEST
MEPAELEFIGENSLISVIPNFNHDSIYLISGTIEPFRGGTPLYVPLWLGIHLRQQQKCRIVAPNWMDIDLLEDIKETEKRISTFTKMPSPNYMVEAKLILNTAPEDVPSSDGIKTLIKDIYDVRCAKLRTTVENFIKSEGSHTVNLENVTVLELHTIQPLLPHAMDLLSRIEQTRKVVRSMNTTTQSFSFGGTSGLGSSGSSRPW

SEQ ID NO: 149604 - DNA, 537 bp, Tribolium castaneum
  CDS (1)..(537)
atggatcctgaagaggttgaatttttgggtgagaaacaactagtcacgattgtcccactgaccacagacgatgactaccttaaactaatttcgggtgattttggcccatttcgtatgggtatgcctgttaaagtaccgttatgggttgctgtccaattaaagcgacaaaaacattgcaaaatacaaccccctgattggatggaaatcgagactttggaggcgattaaaaacgaagagaaactttctaggaactttacgaaaatgcccagtaagttctacatggtcgaagcgaaacaaattttggggtgcgcctctgatgatatttcacgtgcggatgaaataagaacgataattaaagatatttgggacataagaatgtcaaaattgaggtcttcaattgatttattggttcggaataatggggcttctgctgtcgttacaaacttaactttgatggaaattaattcgattagaccgattttaccacacactttagatcagatacgccgaatgaaaaacgtgagtgattttttctag

SEQ ID NO: 149605 - protein, 178 aa, Tribolium castaneum
MDPEEVEFLGEKQLVTIVPLTTDDDYLKLISGDFGPFRMGMPVKVPLWVAVQLKRQKHCKIQPPDWMEIETLEAIKNEEKLSRNFTKMPSKFYMVEAKQILGCASDDISRADEIRTIIKDIWDIRMSKLRSSIDLLVRNNGASAVVTNLTLMEINSIRPILPHTLDQIRRMKNVSDFF

SEQ ID NO: 149606 - DNA, 627 bp, Picea sitchensis
  CDS (1)..(627)
atggctggccagtccgatccacaattatctcttttctcttcagcagaggttgaatttttggcagaggacgagatgacggacattattccaaacgtgcgcatggatgctttaaacatgatttgtggagattttggtccattccgtcctcaaatccctgcaaaagtaccactatggttggcaattgcattgaagaaacgtgggaaatgtagaatacagccaccaaattggatgaccgttgagagattgacagaagttcttgatgctgagcgtgaagccccaagagaatttcaaccgctgccattccattatgtggagatatcaaggttgctttttgactacgcccgtgatgacataccagacatttatcttgtgaggtctttaatagaggatataagggatgtcaggttccacaaggttgagaccggcttagagtcacttgactctagaactcatgcagtgaagctgaaaaacctttctgctatggaggttaatttagtgcggccatttatagtgagagctcttcaaactttctataaacatgatactggagatgagcaagtgtcagatggaaatagccaacctactccggtagatcgtggtgcacgacgtgtgctccgacctcgctag

SEQ ID NO: 149607 - protein, 208 aa, Picea sitchensis
MAGQSDPQLSLFSSAEVEFLAEDEMTDIIPNVRMDALNMICGDFGPFRPQIPAKVPLWLAIALKKRGKCRIQPPNWMTVERLTEVLDAEREAPREFQPLPFHYVEISRLLFDYARDDIPDIYLVRSLIEDIRDVRFHKVETGLESLDSRTHAVKLKNLSAMEVNLVRPFIVRALQTFYKHDTGDEQVSDGNSQPTPVDRGARRVLRPR

SEQ ID NO: 149608 - DNA, 618 bp, Zea mays
  CDS (1)..(618)
atgtttggagctgtcctgtctgtgctgcaggtggagttcgtggcggaggatgagattgtcgaaatcgtccccaacatccgcatggacgccctcaacatgatctgcggggatttcgggcccttcttcccccagattcccaccaaggtgcctctctggctcgctgtcgcgctcaagaagcgtagcaagtgcaccatccgcaccccggactggatgactgttgaccgcttgacacaggtattggaagcggaaagagagtcgccacgagaattccagccattaccattccactatattgaaatttctaagcttctgtttgatcatgctcgtgatgacatctcagatgcatacctggtaagatctctaattgaggacatcagagatgtcagatttcacaaggttgagactggattagagacgatatctggacgcacccatgctgtaaagctcaaaaatctctctgcaatggaagtgaacattgtccgccctttcatggtgagaactttgcaggcattctataagcacgatagtccacagatgattcagcaagcagataatatagggagcagagcaacactggttacagaccgtggcccgagaagagatctaaggcgcaggtag

SEQ ID NO: 149609 - protein, 205 aa, Zea mays
MFGAVLSVLQVEFVAEDEIVEIVPNIRMDALNMICGDFGPFFPQIPTKVPLWLAVALKKRSKCTIRTPDWMTVDRLTQVLEAERESPREFQPLPFHYIEISKLLFDHARDDISDAYLVRSLIEDIRDVRFHKVETGLETISGRTHAVKLKNLSAMEVNIVRPFMVRTLQAFYKHDSPQMIQQADNIGSRATLVTDRGPRRDLRRR

SEQ ID NO: 149610 - DNA, 675 bp, Oryza sativa subsp. indica
  CDS (1)..(675)
atggctgggcagtctgaccctcatctttctatcttctcaccctcagaggtggagttcgtggcggaggatgagattgtcgagatcgtccctaacattcgcatggaggccctcaacatgatatgcggggattttgggcccttcttcccgcaaattgcaagcaaagtgcctctttggctcgcggttgcactcaagaagcgtggcaaatgtaccatacgcacacctgactggatgactattgattctgactgcctgattgcatatttgtctgtgctacttctttacattttcatggtattagatgcagaaagagagtcacccaaagaatttcagccattgccgttccactatattgaaatatctaagcttctctttgatcatgctcgtgatgacatctcagatgcatacctggtaagatctttgattgaggacatccgagatgtcagattccataaggttgagactggtctggagacaatatctggccgtactcatgctgtaaagctaaaaaatctctctgcaatggaagtgaatatcgtgcgtcctttcatggtgagaactttacaagcattctataagcatgatagcccacagatgattcagcaggcagataacacaggtagcagaccaacaccagttacagaccgtggtccaagaagagatctaaggcgcaggtaa

SEQ ID NO: 149611 - protein, 224 aa, Oryza sativa subsp. indica
MAGQSDPHLSIFSPSEVEFVAEDEIVEIVPNIRMEALNMICGDFGPFFPQIASKVPLWLAVALKKRGKCTIRTPDWMTIDSDCLIAYLSVLLLYIFMVLDAERESPKEFQPLPFHYIEISKLLFDHARDDISDAYLVRSLIEDIRDVRFHKVETGLETISGRTHAVKLKNLSAMEVNIVRPFMVRTLQAFYKHDSPQMIQQADNTGSRPTPVTDRGPRRDLRRR

SEQ ID NO: 149612 - DNA, 675 bp, Oryza sativa subsp. japonica
  CDS (1)..(675)
atggctgggcagtctgaccctcatctttctatcttctcaccctcagaggtggagttcgtggcggaggatgagattgtcgagatcgtccctaacattcgcatggaggccctcaacatgatatgcggggattttgggcccttcttcccgcaaattgcaagcaaagtgcctctttggctcgcggttgcactcaagaagcgtggcaaatgtaccatacgcacacctgactggatgactgttgattctgactgcctgattgcatatttgtctgtgctacttctttacattttcatggtattagatgcagaaagagagtcacccaaagaatttcagccattgccgttccactatattgaaatatctaagcttctctttgatcatgctcgtgatgacatctcagatgcatacctggtaagatctttgattgaggacatccgagatgtcagattccataaggttgagactggtctggagacaatatctggccgtactcatgctgtaaagctaaaaaatctctctgcaatggaagtgaatatcgtgcgtcctttcatggtgagaactttacaagcattctataagcatgatagcccacagatgattcagcaggcagataacacaggtagcagaccaacaccagttacagaccgtggtccaagaagagatctaaggcgcaggtaa

SEQ ID NO: 149613 - protein, 224 aa, Oryza sativa subsp. japonica
MAGQSDPHLSIFSPSEVEFVAEDEIVEIVPNIRMEALNMICGDFGPFFPQIASKVPLWLAVALKKRGKCTIRTPDWMTVDSDCLIAYLSVLLLYIFMVLDAERESPKEFQPLPFHYIEISKLLFDHARDDISDAYLVRSLIEDIRDVRFHKVETGLETISGRTHAVKLKNLSAMEVNIVRPFMVRTLQAFYKHDSPQMIQQADNTGSRPTPVTDRGPRRDLRRR

SEQ ID NO: 149614 - DNA, 603 bp, Glossina morsitans morsitans
  CDS (1)..(603)
atggaacctcgtgtaatagaatttattggtgaaaattctttaataggtgttgtaccacatttttcatttgaacctttgcatttaatatcgggtagtttgggcccatttcgtgccggaatgccagttcatgtgcctttgtggttagccatacatctaagaaagcatcaaaaatgtcgaattgtgccgccggagtggatggacttagagttgttggaagaaattaaggaagccgagaagaaatctaagtactttacgaaaatgccgagtgaacattacatgattgaagcacaattaataatgagtacggctccagacgatgtgccacgttgcgaggagctacgtactattattaaggatattttcgatattagagaatcaaagttacgtacttcaattgatgctttcattaaaggtgaggggacatatgccaaactggataatttaactttgctagaaatacacagtgtccgtcctatattaccgcactcattggaccacatagcacgttatcaacgtactgctatggctacccaaagagatacttccagttttttgagtttaaattcaagcaccgcaaataccaattcattttttactccataa

SEQ ID NO: 149615 - protein, 200 aa, Glossina morsitans morsitans
MEPRVIEFIGENSLIGVVPHFSFEPLHLISGSLGPFRAGMPVHVPLWLAIHLRKHQKCRIVPPEWMDLELLEEIKEAEKKSKYFTKMPSEHYMIEAQLIMSTAPDDVPRCEELRTIIKDIFDIRESKLRTSIDAFIKGEGTYAKLDNLTLLEIHSVRPILPHSLDHIARYQRTAMATQRDTSSFLSLNSSTANTNSFFTP

SEQ ID NO: 149616 - DNA, 573 bp, Brugia malayi
  CDS (1)..(573)
atgacgccggaacaatgtgaatttattgccggtaatgaatggattcagataaatccgcagtttaatttggatgaattgcatctgatatgtggtgatattggaccatttgaagctggtatgcctatttgggtaccactctggatagcagttacgttaaggaaaaggcgaaaatgcactatcattccaccacaatggttatgtgtggaggagttgaaaaagcttgtaatagcggaaagtggaactaatgcatttggacaagtaccacggttttatttggaaatagctcacatgttcgtacaatatgccaaagaagatcttccggatagcgatatgatacgagtttatgtacaagatttatgggataagcgatctgcaaagctcaacaattcatcgactaaatttttgggacaggtagaatcatgtcatgcaagaatggacaatattactttgatggaagtagcgtatattaaacgatcactaattacagccagtcgtgaaattgaagcgcttaacaagtcgtttcatgaattatccagtcaaaacagcagtgatcaaagatatgtaatagcttga

SEQ ID NO: 149617 - protein, 190 aa, Brugia malayi
MTPEQCEFIAGNEWIQINPQFNLDELHLICGDIGPFEAGMPIWVPLWIAVTLRKRRKCTIIPPQWLCVEELKKLVIAESGTNAFGQVPRFYLEIAHMFVQYAKEDLPDSDMIRVYVQDLWDKRSAKLNNSSTKFLGQVESCHARMDNITLMEVAYIKRSLITASREIEALNKSFHELSSQNSSDQRYVIA

SEQ ID NO: 149618 - DNA, 768 bp, Yarrowia lipolytica
  CDS (1)..(768)
atgtcggtgccagcggaacagctggagaccttcctgccgtcggagctgcatttcatggcggagaatgagaccatcgagatcctgccgcgacgagtcggcaaccccatcaagctggcaggcacagatctgcctctcatgcatcctcttcgaaagaacagagtccccatctggatggccatcgcgctcaagaaacagcagcggtgtcagttcgtgcccccggactggatggaggaaagcaatttgcggcggatcttggcttttgagcatgccaaccccaccgcgttctccaacgtggatttccactggctggaaatcgcccagattgtgctcaccaccgctccagacgacctcacctcgccgccacaggtgatccgaaacctcgtgcgagatatccgagaggtgcgggagcaaaaaagtcgacagggtatgaaggaggtcaacgaaaacatgctgcagatggaccgactgggggctctggagatcaacgaaatgagaccgtttgtggtagaaggcatggaggaaatgatcaagatccgcaaggccggcaagaaggaggagcccataatctattcggaaagtgacaaccccgaggacgacgaggatgatgagcctacttatggacatgacgacgagtcttcgttggctgtgccttcatctcaactggactcttcgttgcgatatggagaccgagtggacacttcggaaagaagacgagagttgtctcagtgggatgataatgtgccgcaacaaggcggccccgaatggtga

SEQ ID NO: 149619 - protein, 255 aa, Yarrowia lipolytica
MSVPAEQLETFLPSELHFMAENETIEILPRRVGNPIKLAGTDLPLMHPLRKNRVPIWMAIALKKQQRCQFVPPDWMEESNLRRILAFEHANPTAFSNVDFHWLEIAQIVLTTAPDDLTSPPQVIRNLVRDIREVREQKSRQGMKEVNENMLQMDRLGALEINEMRPFVVEGMEEMIKIRKAGKKEEPIIYSESDNPEDDEDDEPTYGHDDESSLAVPSSQLDSSLRYGDRVDTSERRRELSQWDDNVPQQGGPEW

SEQ ID NO: 149620 - DNA, 633 bp, Brassica napus
  CDS (1)..(633)
atggctggacagactgatcctcatgtctcactattttctcctgaagaggttgagtttatggcagaggacgaactggtggagattgttcctaatatgaacatggagcccctcaatttcatcgctggggattttggccggttcattcctcagattccaatacaagtgcctctgtggcttgcagtggctctgaagcgtagaggaaaatgtactttccggcctccagggtggttgtctgttgacaatttgactcaggtcttggaagcagagcgggaacctcagtcgaaatttcaggcattaccatttagttacgtggagattgctagactactttttgatcatgcacgtgatgatattccagacatgtatatggtaagatcgctagttgaggacattagagatgtgcggcttcacaaactggagaataacttgggcacatttctaggtacatctgcagtaaagatggagaatgtatcggcaatggaagtgaacctagtccgcccatttgctagaagagccttagaagcgttttataagcatgacaagccagaggctgctgcagacagaaacactagaagtagcagacaaccccgtgaagctaacgatgaaccaaggagacctctaaggcaacgctaa

SEQ ID NO: 149621 - protein, 210 aa, Brassica napus
MAGQTDPHVSLFSPEEVEFMAEDELVEIVPNMNMEPLNFIAGDFGRFIPQIPIQVPLWLAVALKRRGKCTFRPPGWLSVDNLTQVLEAEREPQSKFQALPFSYVEIARLLFDHARDDIPDMYMVRSLVEDIRDVRLHKLENNLGTFLGTSAVKMENVSAMEVNLVRPFARRALEAFYKHDKPEAAADRNTRSSRQPREANDEPRRPLRQR

SEQ ID NO: 149622 - DNA, 636 bp, Triticum aestivum
  CDS (1)..(636)
atggcggggcagtccgacccgcatctctccctcttctcgccctccgaggtggagttcgtggccgaggacgagatcgtcgagatcgtccccaacatccggatggaggccctgaacatgatctgcggggatttcggacccttcttcccacaaattccaagcaaggtccctctgtggcttgctgtggcactcaagaggcgtggcaagtgcaccatacgtgcacccgagtggatgactgttgagcgcttaacacaggtgttggatgctgaaagagagtcacctagggaatttcagccattaccattccactatatcgaaatttctaagcttctgtttgatcatgctcgtgatgacatcacagatgcttacttggtgagatctttgatcgaggatatcagagatgtcaggttccataaggtcgagactggattagagacaatatctggccgtactcatgctgtgaagctcaaaaatctctctgcaatggaggtgaatatcgtgcgtccatttatggtgagaactttgcaggcgttctacaagcatgatagcccacagatgattcagcaggcagacaacacagggagcagatcaacaccagtcacagatcgtggtccaaggagagacctaaggcgcaggtaa

SEQ ID NO: 149623 - protein, 211 aa, Triticum aestivum
MAGQSDPHLSLFSPSEVEFVAEDEIVEIVPNIRMEALNMICGDFGPFFPQIPSKVPLWLAVALKRRGKCTIRAPEWMTVERLTQVLDAERESPREFQPLPFHYIEISKLLFDHARDDITDAYLVRSLIEDIRDVRFHKVETGLETISGRTHAVKLKNLSAMEVNIVRPFMVRTLQAFYKHDSPQMIQQADNTGSRSTPVTDRGPRRDLRRR

SEQ ID NO: 149624 - DNA, 633 bp, Brassica napus
  CDS (1)..(633)
atggctggacagactgatcctcatgtctcactattttctcctgaagaggttgagtttatggcagaggacgaactggtggagattgttcctaatatgaacatggagcccctcaatttcatcgctggggattttggccggttcattcctcagattccaatacaagtgcctctgtggcttgcagtggctctgaagcgtagaggaaaatgtactttccggcctccagggtggttgtctgttgacaatttgactcaggtcttggaagcagaacgggaacctcagtcgaaatttcaggcattaccatttagttacgtggagattgctagactactttttgatcatgcacgtgatgatattccagacatgtatatggtaagatcgctagttgaggacattagagatgtgcggcttcacaaactggagaataacttgggcacatttctaggtacatctgcagtaaagatggagaatgtatcggcaatggaagtgaacctagtccgcccatttgctagaagagccttagaagcgttttataagcatgacaagccagaggctgctgcagacagaaacactagaagtagcagacaaccccgtgaagctaacgatgaaccaaggagacctctaaagcaacgctaa

SEQ ID NO: 149625 - protein, 210 aa, Brassica napus
MAGQTDPHVSLFSPEEVEFMAEDELVEIVPNMNMEPLNFIAGDFGRFIPQIPIQVPLWLAVALKRRGKCTFRPPGWLSVDNLTQVLEAEREPQSKFQALPFSYVEIARLLFDHARDDIPDMYMVRSLVEDIRDVRLHKLENNLGTFLGTSAVKMENVSAMEVNLVRPFARRALEAFYKHDKPEAAADRNTRSSRQPREANDEPRRPLKQR

SEQ ID NO: 149626 - DNA, 630 bp, Helianthus annuus
  CDS (1)..(630)
atgtctggccaatccgaccctcgtggttctgcgttttcagctgctgagttggagttcttagcagaagatgaaatgatcgagatagttccaaacctaagaataaagcctctcagtttgatttgtggtgactttggtccgtttcagccacaaatacctactcaagtcccaatatggttggctgtggctttgaaaaagagagggaaatgcactattcgccctccagattggatgtctgttgaaaaactgacccaggtattggaggcagagcgtgactcagcaagttcctttgaagcattgccatttcattatgttgagatctcaaggcttctttttgaccatgctcgggatgacattcctgaagtatatatggtaaggtcgcttattgaagacatcaaagatgtaaggtttcataaaattggtactggattggagaagctttcatctcggacatacgcaatgaagttaaatttatccgcaatggaagtaaatgtaatacgaccatttgttactggaagtctggaaacgttttatgaacttaccgctccagagattattcaagaatcacagagagaggaatatagacgacctcaaaccgctgatcggggaccaaggcgtgaattgagacgctaa

SEQ ID NO: 149627 - protein, 209 aa, Helianthus annuus
MSGQSDPRGSAFSAAELEFLAEDEMIEIVPNLRIKPLSLICGDFGPFQPQIPTQVPIWLAVALKKRGKCTIRPPDWMSVEKLTQVLEAERDSASSFEALPFHYVEISRLLFDHARDDIPEVYMVRSLIEDIKDVRFHKIGTGLEKLSSRTYAMKLNLSAMEVNVIRPFVTGSLETFYELTAPEIIQESQREEYRRPQTADRGPRRELRR

SEQ ID NO: 149628 - DNA, 23 bp, Artificial sequence
  primer
atgtcactaccggcacatttgca

SEQ ID NO: 149629 - DNA, 29 bp, Artificial sequence
  primer
ttaaatattgaattcttcttcatcatttt

SEQ ID NO: 149630 - protein, 192 aa, Artificial sequence
  consensus sequence
  Variant (2)..(3): Xaa in position 2 to 3 is any amino acid
  Variant (5)..(6): Xaa in position 5 to 6 is any amino acid
  Variant (8)..(12): Xaa in position 8 to 12 is any amino acid
  Variant (14)..(14): Xaa in position 14 is any amino acid
  Variant (16)..(30): Xaa in position 16 to 30 is any amino acid
  Variant (31)..(59): Xaa in position 31 to 59 is any or no amino acid
  Variant (64)..(64): Xaa in position 64 is any amino acid
  Variant (66)..(67): Xaa in position 66 to 67 is any amino acid
  Variant (70)..(72): Xaa in position 70 to 72 is any amino acid
  Variant (75)..(75): Xaa in position 75 is any amino acid
  Variant (77)..(78): Xaa in position 77 to 78 is any amino acid
  Variant (80)..(80): Xaa in position 80 is any amino acid
  Variant (82)..(86): Xaa in position 82 to 86 is any amino acid
  Variant (87)..(99): Xaa in position 87 to 99 is any or no amino acid
  Variant (101)..(106): Xaa in position 101 to 106 is any amino acid
  Variant (108)..(126): Xaa in position 108 to 126 is any amino acid
  Variant (127)..(127): Xaa in position 127 is any or no amino acid
  Variant (129)..(131): Xaa in position 129 to 131 is any amino acid
  Variant (133)..(140): Xaa in position 133 to 140 is any amino acid
  Variant (141)..(146): Xaa in position 141 to 146 is any or no amino acid
  Variant (148)..(151): Xaa in position 148 to 151 is any amino acid
  Variant (153)..(156): Xaa in position 153 to 156 is any amino acid
  Variant (158)..(159): Xaa in position 158 to 159 is any amino acid
  Variant (161)..(176): Xaa in position 161 to 176 is any amino acid
  Variant (177)..(180): Xaa in position 177 to 180 is any or no amino acid
  Variant (182)..(185): Xaa in position 182 to 185 is any amino acid
  Variant (187)..(187): Xaa in position 187 is any amino acid
  Variant (189)..(189): Xaa in position 189 is any amino acid
  Variant (190)..(190): Xaa in position 190 is any or no amino acid
EXXFXXEXXXXXIXPXXXXXXXXXXXXXXXXXXXXXXXXXXXXXXXXXXXXXXXXXXXXVPLWXAXXLKXXXKCXIXXPXWXXXXXXXXXXXXXXXXXXLXXXXXXEXXXXXXXXXXXXXXXXXXXXLXXXAXXXXXXXXXXXXXXRXXXXDXXXXRXXKXXXXXXXXXXXXXXXXXXXXNXXXXEXNXXRP

SEQ ID NO: 149631 - protein, 35 aa, Artificial sequence
  protein pattern
  Variant (2)..(2): Xaa in position 2 is any amino acid
  Variant (3)..(3): Xaa in position 3 is Phe, Ile or Leu
  Variant (4)..(4): Xaa in position 4 is Trp or Tyr
  Variant (5)..(5): Xaa in position 5 is Ile, Leu, Met or Val
  Variant (6)..(6): Xaa in position 6 is Ala or Gly
  Variant (7)..(8): Xaa in position 7 to 8 is any amino acid
  Variant (9)..(9): Xaa in position 9 is Leu or Met
  Variant (10)..(14): Xaa in position 10 to 14 is any amino acid
  Variant (16)..(16): Xaa in position 16 is any amino acid
  Variant (17)..(17): Xaa in position 17 is Phe, Ile or Val
  Variant (18)..(19): Xaa in position 18 to 19 is any amino acid
  Variant (21)..(21): Xaa in position 21 is any amino acid
  Variant (23)..(23): Xaa in position 23 is Leu or Met
  Variant (24)..(27): Xaa in position 24 to 27 is any amino acid
  Variant (29)..(34): Xaa in position 29 to 34 is any amino acid
VXXXXXXXXXXXXXCXXXXPXWXXXXXLXXXXXXE

SEQ ID NO: 149632 - DNA, 1668 bp, Saccharomyces cerevisiae
  CDS (1)..(1668)
atgttagttttatccttgatttattctgtttcattcccttttttttccagtgaaaaagaagtaacaatgacagaagataatattgctccaatcacctccgttaaagtagttaccgacaagtgcacgtacaaggacaacgagctgctcaccaagtacagctacgaaaatgctgtagttacgaagacagctagtggccgcttcgatgtaacgcccactgttcaagactacgtgttcaaacttgacttgaaaaagccggaaaaactaggaattatgctcattgggttaggtggcaacaatggctccactttagtggcctcggtattggcgaataagcacaatgtggagtttcaaactaaggaaggcgttaagcaaccaaactacttcggctccatgactcaatgttctaccttgaaactgggtatcgatgcggaggggaatgacgtttatgctccttttaactctctgttgcccatggttagcccaaacgactttgtcgtctctggttgggacatcaataacgcagatctatacgaagctatgcagagaagtcaagttctcgaatatgatctgcaacaacgcttgaaggcgaagatgtccttggtgaagcctcttccttccatttactaccctgatttcattgcagctaatcaagatgagagagccaataactgcatcaatttggatgaaaaaggcaacgtaaccacgaggggtaagtggacccatctgcaacgcatcagacgcgatatccagaatttcaaagaagaaaacgcccttgataaagtaatcgttctttggactgcaaatactgagaggtacgtagaagtatctcctggtgttaatgacaccatggaaaacctcttgcagtctattaagaatgaccatgaagagattgctccttccacgatctttgcagcagcatctatcttggaaggtgtcccctatattaatggttcaccgcagaatacttttgttcccggcttggttcagctggctgagcatgagggtacattcattgcgggagacgatctcaagtcgggacaaaccaagttgaagtctgttctggcccagttcttagtggatgcaggtattaaaccggtctccattgcatcctataaccatttaggcaataatgacggttataacttatctgctccaaaacaatttaggtctaaggagatttccaaaagttctgtcatagatgacatcatcgcgtctaatgatatcttgtacaatgataaactgggtaaaaaagttgaccactgcattgtcatcaaatatatgaagcccgtcggggactcaaaagtggcaatggacgagtattacagtgagttgatgttaggtggccataaccggatttccattcacaatgtttgcgaagattctttactggctacgcccttgatcatcgatcttttagtcatgactgagttttgtacaagagtgtcctataagaaggtggacccagttaaagaagatgctggcaaattcgagaacttttatccagttttaaccttcttgagttactggttaaaagctccattaacaagaccaggatttcacccggtgaatggcttaaacaagcaaagaaccgccttagaaaattttttaagattgttgattggattgccttctcaaaacgaactaagattcgaagagagattgttgtaa

SEQ ID NO: 149633 - protein, 555 aa, Saccharomyces cerevisiae
MLVLSLIYSVSFPFFSSEKEVTMTEDNIAPITSVKVVTDKCTYKDNELLTKYSYENAVVTKTASGRFDVTPTVQDYVFKLDLKKPEKLGIMLIGLGGNNGSTLVASVLANKHNVEFQTKEGVKQPNYFGSMTQCSTLKLGIDAEGNDVYAPFNSLLPMVSPNDFVVSGWDINNADLYEAMQRSQVLEYDLQQRLKAKMSLVKPLPSIYYPDFIAANQDERANNCINLDEKGNVTTRGKWTHLQRIRRDIQNFKEENALDKVIVLWTANTERYVEVSPGVNDTMENLLQSIKNDHEEIAPSTIFAAASILEGVPYINGSPQNTFVPGLVQLAEHEGTFIAGDDLKSGQTKLKSVLAQFLVDAGIKPVSIASYNHLGNNDGYNLSAPKQFRSKEISKSSVIDDIIASNDILYNDKLGKKVDHCIVIKYMKPVGDSKVAMDEYYSELMLGGHNRISIHNVCEDSLLATPLIIDLLVMTEFCTRVSYKKVDPVKEDAGKFENFYPVLTFLSYWLKAPLTRPGFHPVNGLNKQRTALENFLRLLIGLPSQNELRFEERLL

SEQ ID NO: 149634 - DNA, 2063 bp, Oryza sativa
  CDS (76)..(1605)
gcatccaaacacccatccgccgccgctggctgaactcgcgggtgatctgatcggagccggaggaggaggaggaggatgttcgtggagggcttcagggtggagagcccgcgcgtgcggtacggcgacggggagatcgagtcggagtaccgatatgacacgacggaggtggtggcgccgccgtcgccggagaaggggtgggtcgtccgccccaagtccgtcacctaccacttcaagaccaccaccaccgtccccaagctcggggtgatgctggttggatggggaggcaacaacggcaccacgctcacggctggtgtcatcgccaacagagagggaatttcatgggcgaccaaggagaaggtgcacaaggccaactactttggttccctgacacaatcatccaccatcagggttgggagctacaacggggaggagatctatgcgccttttaggagccttgtacccatggtaaacccaaacgacatcgtgttcggtgggtgggacatcagcagcatgaacctggccgacgccatgaccagggctcgggtgctggacatcgacctgcagaagcagctccggcatcacatggagtccatggtgcccctccccggcgtctacaaccctgacttcatcgccgccaaccagggctcccgcgccaacaatgtcatcaagggcaccaagaaggagcaggtcgaacaggtcaagaaggacatcagggagttcaaggagaagagcaaggtggacaaggtggtggtgctgtggacggccaacacggagcggtacagcaacgtggtggccgggatgaacgacaccatggacaacctgctggcgtcgctggacaaggacgagccggagatgtcgccgtcgacgctctacgccatcgcctgcgtcatggagggcgtccccttcatcaacggcagcccccagaacaccttcgtgcccgggctgatcgagctcgccatcaagaagaactcggtgatcggcggcgacgacttcaagagtgggcagaccaagatgaagtccgtcctcgtcgacttcctcgtcggcgccggcatcaagccgacgtcgatcgcgagctacaaccacctaggcaacaacgacggcatgaacctgtcggcgccgcagacgttccggtccaaggagatctccaagagcggcgtcgtcgacgacatggtctccagcaacgccatcctctacgagcccggcgagcaccccgaccacgtcatcgtcatcaagtatattccatacgttggggacagcaagagggccatggacgagtacacctcggagatcttcatgggagggaagaacaccatcgtgctgcacaacacctgcgaggactcgctcctcgccgcgcccatcatcctcgacctcgtcctcctcgccgagctcagcaccaggatccagttcaaagctgaagaccaggataagtaccattctttccatccagtggctaccatcctgagctacctcagcaaggctcctcttgttcccccaggcacaccagtggtgaatgcactggccaagcagagggccatgctggagaacatcctgagggcctgtgttggactggcccctgagaacaacatgatgcttgagtacaagtgatataggccttgacaggtcctcttatcaggagggatgatgaacagcaagtggtggaggaaggtgacagttttcttcaacaagaaaaagaacaaaaaaagagagaaaatgaggaacacctgaaagaaataacaagaggccaagtggggaagcaaatgaaatgatcaagtgatattcattcagaaaatgggtgtcattcacttggatcctcttaattgggggcatctattgacagtttgacactctgctccatgattttttttttcattttttgtttttttaattgagatggagacttttttcagctctgctgctagtatgctgtgagctgcatgaacattggttaatattgtgtatgatgataggtgaagcaaggaactaatcgtcttctatgcttatggatctatagtacaagttgtcagtattactgttaagtcttatatctggaacacttttgaatc

SEQ ID NO: 149635 - protein, 509 aa, Oryza sativa
MFVEGFRVESPRVRYGDGEIESEYRYDTTEVVAPPSPEKGWVVRPKSVTYHFKTTTTVPKLGVMLVGWGGNNGTTLTAGVIANREGISWATKEKVHKANYFGSLTQSSTIRVGSYNGEEIYAPFRSLVPMVNPNDIVFGGWDISSMNLADAMTRARVLDIDLQKQLRHHMESMVPLPGVYNPDFIAANQGSRANNVIKGTKKEQVEQVKKDIREFKEKSKVDKVVVLWTANTERYSNVVAGMNDTMDNLLASLDKDEPEMSPSTLYAIACVMEGVPFINGSPQNTFVPGLIELAIKKNSVIGGDDFKSGQTKMKSVLVDFLVGAGIKPTSIASYNHLGNNDGMNLSAPQTFRSKEISKSGVVDDMVSSNAILYEPGEHPDHVIVIKYIPYVGDSKRAMDEYTSEIFMGGKNTIVLHNTCEDSLLAAPIILDLVLLAELSTRIQFKAEDQDKYHSFHPVATILSYLSKAPLVPPGTPVVNALAKQRAMLENILRACVGLAPENNMMLEYK

SEQ ID NO: 149636 - DNA, 2018 bp, Glycine max; identical to SEQ ID NO: 142755
  CDS (98)..(1630)

SEQ ID NO: 149637 - protein, 510 aa, Glycine max; identical to SEQ ID NO: 142756

SEQ ID NO: 149638 - DNA, 1533 bp, Glycine max; line LR33
  CDS (1)..(1533)
atgttcatcgagaattttaaggttgagtgtcctaatgtgaagtacaccgagactgagattcagtccgtgtacaactacgaaaccaccgaacttgttcacgagaacaggaatggcacctatcagtggattgtcaaacccaaatctgtcaaatacgaatttaaaaccaacatccatgttcctaaattaggggtaatgcttgtgggttggggtggaaacaacggctcaaccctcaccggtggtgttattgctaaccgagagggcatttcatgggctacaaaggacaagattcaacaagccaattactttggctccctcacccaagcctcagctatccgagttgggtccttccagggagaggaaatctatgccccattcaagagcctgcttccaatggttaaccctgacgacattgtgtttgggggatgggatatcagcaacatgaacctggctgatgccatggccagggcaaaggtgtttgacatcgatttgcagaagcagttgaggccttacatggaatccatgcttccactccccggaatctatgacccggatttcattgctgccaaccaagaggagcgtgccaacaacgtcatcaagggcacaaagcaagagcaagttcaacaaatcatcaaagacatcaaggcgtttaaggaagccaccaaagtggacaaggtggttgtactgtggactgccaacacagagaggtacagtaatttggttgtgggccttaatgacaccatggagaatctcttggctgctgtggacagaaatgaggctgagatttctccttccaccttgtatgccattgcttgtgttatggaaaatgttcctttcattaatggaagccctcagaacacttttgtaccagggctgattgatcttgccatcgcgaggaacactttgattggtggagatgacttcaagagtggtcagaccaaaatgaaatctgtgttggttgatttccttgtgggggctggtatcaagccaacatctatagtcagttacaaccatctgggaaacaatgatggtatgaatctttcggctccacaaactttccgttccaaggaaatctccaagagcaacgttgttgatgatatggtcaacagcaatgccatcctctatgagcctggtgaacatccagaccatgttgttgttattaagtatgtgccttacgtaggggacagcaatagagccatggatgagtacacttcagagatattcatgggtggaaagagcaccattgttttgcacaacacatgcgaggattccctcttagctgctcctattatcttggacttggtccttcttgctgagctcagcactagaatcgagtttaaagctgaaaatgagggaaaattccactcattccacccagttgctaccatcctcagctacctcaccaaggctcctctggttccaccgggtacaccagtggtgaatgcattgtcaaagcagcgtgcaatgctggaaaacataatgagggcttgtgttggattggccccagagaataacatgattctcgagtacaagtga

SEQ ID NO: 149639 - protein, 510 aa, Glycine max; line LR33
MFIENFKVECPNVKYTETEIQSVYNYETTELVHENRNGTYQWIVKPKSVKYEFKTNIHVPKLGVMLVGWGGNNGSTLTGGVIANREGISWATKDKIQQANYFGSLTQASAIRVGSFQGEEIYAPFKSLLPMVNPDDIVFGGWDISNMNLADAMARAKVFDIDLQKQLRPYMESMLPLPGIYDPDFIAANQEERANNVIKGTKQEQVQQIIKDIKAFKEATKVDKVVVLWTANTERYSNLVVGLNDTMENLLAAVDRNEAEISPSTLYAIACVMENVPFINGSPQNTFVPGLIDLAIARNTLIGGDDFKSGQTKMKSVLVDFLVGAGIKPTSIVSYNHLGNNDGMNLSAPQTFRSKEISKSNVVDDMVNSNAILYEPGEHPDHVVVIKYVPYVGDSNRAMDEYTSEIFMGGKSTIVLHNTCEDSLLAAPIILDLVLLAELSTRIEFKAENEGKFHSFHPVATILSYLTKAPLVPPGTPVVNALSKQRAMLENIMRACVGLAPENNMILEYK

SEQ ID NO: 149640 - DNA, 1931 bp, Zea mays; identical to SEQ ID NO: 142763
  CDS (99)..(1631)

SEQ ID NO: 149641 - protein, 510 aa, Zea mays; identical to SEQ ID NO: 142764

SEQ ID NO: 149642 - DNA, 1605 bp, Aspergillus fumigatus
  CDS (1)..(1605)
atggctccccatgctacctcggatgctgttgccaatggcgccgtgaacgggtcggctcgtaccaccaccgctcctcttttcaccgtcaactcgcccaatgttgagtacactgacaacgagattaagagtcggtatgcttaccataccactgacattactcgcaccgctgagggtaagatggttgccactcccaaggtgaccaactaccagttcaaggtcgaccgcaaggttggcaaggttggtatgatgctggtcggctggggtggaaacaacgggtccacggtgactgctggtatccttgctaatcgccggcgcctcgtctgggagacccgcgaaggcgagcgcgctgccaactactatggttcccttgtcatgagctcgaccgtcaagctaggtactgattccaagaccggtgaggagatcaacattccgttccatgatatgctcccgatgatccaccccaatgatcttgtcattggcggttgggacatcagcagtatgaaccttgccgatgccatggatcgggcgcaagttcttgagccaaccctcaagcagctggttcgtaaggagatggccgagatgaagcccttgcccagtatctactaccccgacttcattgctgccaatcaggaagaccgtgcagacaatgtcatcgagggcaacaaggcttcctgggctcacgtcgagcgtatccagcaggacatacgtgacttcaaggctcagaacggcctggacaaggtcattgtcatgtggactgccaacaccgagcgctacgctgatatcatccccggcgtcaatgacactgcagacaacctgctgaacgctatcaaggccggccaccaggaggttgccccctcgaccgtttttgcggtggcctgtatcttggagaacgttcctttcatcaacggatcgccccagaacactttcgtccccggtgccatccagcttgctgagaagcacggagccttcattggtggtgacgacttcaagtctggtcagaccaagatgaagtctgctctggttgactttttgatcaacgcgggtatcaagctcacctcgatcgccagctacaaccacctgggtaacaatgacggcaagaacttgagctctcagaagcagttccgttccaaggagatctccaagtccaatgtagttgatgacatggtcgctgcgaaccacctcctctacaaggagggcgaacaccccgaccacactgttgtgatcaagtacatgcctgctgtcggtgacaacaagcgtgctctggatgagtactacgccgagatcttcatgggtggccaccagaccatcagcttgttcaatatctgcgaggactctctgcttgcttcccctctgatcatcgacctggttgttatcgccgagatgatgactcgcatcacctggaagtcagcggatgacgaggagtacaagggattccacagtgttctcagtgtcctcagctacatgctcaaggctcctctgactccccccggcacccctgtggtcaatgctctcgccaagcagcgctctgctctgaccaacatcttccgggcctgtgttggtctccagcctgactctgagatgactctggagcacaagctcttctag

SEQ ID NO: 149643 - protein, 534 aa, Aspergillus fumigatus
MAPHATSDAVANGAVNGSARTTTAPLFTVNSPNVEYTDNEIKSRYAYHTTDITRTAEGKMVATPKVTNYQFKVDRKVGKVGMMLVGWGGNNGSTVTAGILANRRRLVWETREGERAANYYGSLVMSSTVKLGTDSKTGEEINIPFHDMLPMIHPNDLVIGGWDISSMNLADAMDRAQVLEPTLKQLVRKEMAEMKPLPSIYYPDFIAANQEDRADNVIEGNKASWAHVERIQQDIRDFKAQNGLDKVIVMWTANTERYADIIPGVNDTADNLLNAIKAGHQEVAPSTVFAVACILENVPFINGSPQNTFVPGAIQLAEKHGAFIGGDDFKSGQTKMKSALVDFLINAGIKLTSIASYNHLGNNDGKNLSSQKQFRSKEISKSNVVDDMVAANHLLYKEGEHPDHTVVIKYMPAVGDNKRALDEYYAEIFMGGHQTISLFNICEDSLLASPLIIDLVVIAEMMTRITWKSADDEEYKGFHSVLSVLSYMLKAPLTPPGTPVVNALAKQRSALTNIFRACVGLQPDSEMTLEHKLF

SEQ ID NO: 149644 - DNA, 1659 bp, Magnaporthe grisea 70-15; identical to SEQ ID NO: 142769
  CDS (1)..(1659)

SEQ ID NO: 149645 - protein, 552 aa, Magnaporthe grisea 70-15; identical to SEQ ID NO: 142770

SEQ ID NO: 149646 - DNA, 1569 bp, Nasonia vitripennis; identical to SEQ ID NO: 142771
  CDS (1)..(1569)

SEQ ID NO: 149647 - protein, 522 aa, Nasonia vitripennis; identical to SEQ ID NO: 142772

SEQ ID NO: 149648 - DNA, 1626 bp, Gibberella zeae PH-1; identical to SEQ ID NO: 142773
  CDS (1)..(1626)

SEQ ID NO: 149649 - protein, 541 aa, Gibberella zeae PH-1; identical to SEQ ID NO: 142774

SEQ ID NO: 149650 - DNA, 1590 bp, Kluyveromyces lactis NRRL Y-1140; identical to SEQ ID NO: 142775
  CDS (1)..(1590)

SEQ ID NO: 149651 - protein, 529 aa, Kluyveromyces lactis NRRL Y-1140; identical to SEQ ID NO: 142776

SEQ ID NO: 149652 - DNA, 1563 bp, Debaryomyces hansenii CBS767; identical to SEQ ID NO: 142777
  CDS (1)..(1563)

SEQ ID NO: 149653 - protein, 520 aa, Debaryomyces hansenii CBS767; identical to SEQ ID NO: 142778

SEQ ID NO: 149654 - DNA, 1593 bp, Yarrowia lipolytica CLIB122; identical to SEQ ID NO: 142779
  CDS (1)..(1593)

SEQ ID NO: 149655 - protein, 530 aa, Yarrowia lipolytica CLIB122; identical to SEQ ID NO: 142780

SEQ ID NO: 149656 - DNA, 1542 bp, Apis mellifera; identical to SEQ ID NO: 142781
  CDS (1)..(1542)

SEQ ID NO: 149657 - protein, 513 aa, Apis mellifera; identical to SEQ ID NO: 142782

SEQ ID NO: 149658 - DNA, 1539 bp, Apis mellifera; identical to SEQ ID NO: 142783
  CDS (1)..(1539)

SEQ ID NO: 149659 - protein, 512 aa, Apis mellifera; identical to SEQ ID NO: 142784

SEQ ID NO: 149660 - DNA, 1419 bp, Aspergillus nidulans FGSC A4
  CDS (1)..(1419)
atggctccccacgcaaacttggatgttgctgccaatggcgccgtgaacgggtccgcccaaactgctcgcgcccctctgtttaccgtcaactcgcccaacgtcgagtacaccgagacggaaatcaagagtacttatgcttaccataccaccgatgtcactcgctctgccgaaggcaagcttatcgctactcctaaggcggccacctatcacttcaaggttgaccgtaaggttggcaaggttggtctgatgttggtcggttggggtggaaacaacggttccactgtgactgccggtatcatcgccaatcgtcggaagctttcctgggagaccaaggaagggccccgtgctgccaactactacggttcccttgtcatgagctcgaccattaagcttggaaccgactccaagactggcgaggagatcaacatccccttcaatgacatgttgcccatggtccaccccaatgacctcgtcattggtggctgggacattagcagcatgaacctggctgactctatggaccgtgcccaggtccttgagcccaccctgaagcagcttgtccgtaaggaaatggctgagatgaagcctttgcccagcgtttactaccctgacttcatcgctgccaaccaggaggatcgtgccgacaacgtcctcgagggcagcaaggcctcgtgggctcatgttgagaagattcaggcggatatccgcaatttcaaggccgaaaatggtcttgacaaggtgattgtcatgtggacggccaacactgaacgctacgccgacattctccctggcgtcaacgacactgctgagaacctggtcaactccattaagtccggtcacaccgaggtttctccctctaccgtcttcgctgttgcttgtatcctcgacaacactcctttcatcaacgggtctccccagaatacctttgttcctggtgcgattgagcttgccgagaagcacaacgccttcatcggtggcgatgacttcaagtctggccagaccaaaatgaagtctgccctggttgacttcttgatcaacgctggtatcaagcttacctcgatcgccagttacaaccaccttgttggtgacaacaagcgtgctttggacgagtactacgccgagatcttcatgggcggccaccagaccatcagcttgttcaacatctgcgaggattcgcttctcgcctctcctttgatcatcgacttggttgtgcttgccgagatgatgacccgcatcacctggaaggctgatgatgctgccgagtacaagggattccacagtgttctcagcgttctcagctacatgctcaaggctccccttgacccctcctggtactccggttgtcaactccttggcaaagcagcgcagcgctttgaccaacatcttccgcgcctgcgttggattgcagcccgagtctga

SEQ ID NO: 149661 - protein, 472 aa, Aspergillus nidulans FGSC A4
MAPHANLDVAANGAVNGSAQTARAPLFTVNSPNVEYTETEIKSTYAYHTTDVTRSAEGKLIATPKAATYHFKVDRKVGKVGLMLVGWGGNNGSTVTAGIIANRRKLSWETKEGPRAANYYGSLVMSSTIKLGTDSKTGEEINIPFNDMLPMVHPNDLVIGGWDISSMNLADSMDRAQVLEPTLKQLVRKEMAEMKPLPSVYYPDFIAANQEDRADNVLEGSKASWAHVEKIQADIRNFKAENGLDKVIVMWTANTERYADILPGVNDTAENLVNSIKSGHTEVSPSTVFAVACILDNTPFINGSPQNTFVPGAIELAEKHNAFIGGDDFKSGQTKMKSALVDFLINAGIKLTSIASYNHLVGDNKRALDEYYAEIFMGGHQTISLFNICEDSLLASPLIIDLVVLAEMMTRITWKADDAAEYKGFHSVLSVLSYMLKAPLDPSWYSGCQLLGKAAQRFDQHLPRLRWIAARV

SEQ ID NO: 149662 - DNA, 1692 bp, Ustilago maydis 521; identical to SEQ ID NO: 142785
  CDS (1)..(1692)

SEQ ID NO: 149663 - protein, 563 aa, Ustilago maydis 521; identical to SEQ ID NO: 142786

SEQ ID NO: 149664 - DNA, 1677 bp, Cryptococcus neoformans var. neoformans B-3501A; identical to SEQ ID NO: 142787
  CDS (1)..(1677)

SEQ ID NO: 149665 - protein, 558 aa, Cryptococcus neoformans var. neoformans B-3501A; identical to SEQ ID NO: 142788

SEQ ID NO: 149666 - DNA, 1581 bp, Tribolium castaneum; identical to SEQ ID NO: 142791
  CDS (1)..(1581)

SEQ ID NO: 149667 - protein, 526 aa, Tribolium castaneum; identical to SEQ ID NO: 142792

SEQ ID NO: 149668 - DNA, 1275 bp, Acidobacteria bacterium Ellin345; identical to SEQ ID NO: 142793
  CDS (1)..(1275): transl_table=11

SEQ ID NO: 149669 - protein, 424 aa, Acidobacteria bacterium Ellin345; identical to SEQ ID NO: 142794

SEQ ID NO: 149670 - DNA, 1332 bp, Rubrobacter xylanophilus DSM 9941; identical to SEQ ID NO: 142797
  CDS (1)..(1332): transl_table=11

SEQ ID NO: 149671 - protein, 443 aa, Rubrobacter xylanophilus DSM 9941; identical to SEQ ID NO: 142798

SEQ ID NO: 149672 - DNA, 1356 bp, Rubrobacter xylanophilus DSM 9941; identical to SEQ ID NO: 142799
  CDS (1)..(1356): transl_table=11

SEQ ID NO: 149673 - protein, 451 aa, Rubrobacter xylanophilus DSM 9941; identical to SEQ ID NO: 142800

SEQ ID NO: 149674 - DNA, 1320 bp, Solibacter usitatus Ellin6076; identical to SEQ ID NO: 142801
  CDS (1)..(1320): transl_table=11

SEQ ID NO: 149675 - protein, 439 aa, Solibacter usitatus Ellin6076; identical to SEQ ID NO: 142802

SEQ ID NO: 149676 - DNA, 1533 bp, Zea mays
  CDS (1)..(1533)
atgttcatcgagagcttccgcgtcgagagcccccacgtgcggtacggcccgacggagatcgagtcggagtaccggtacgacacgacggagctggtgcacgaggccaaggacggcgcctcccgctgggtcgtccgccccaagtccgtcaagtacaacttccggaccagcaccgccgtccccaagctcggggtcatgcttgtggggtggggaggcaacaacgggtccacgctgacggctggggtcattgccaacagggaggggatctcatgggcgaccaaggacaaggtgcagcaagccaactactacggctccctcacccaggcttccaccatcagagtaggcagctacaacggggaggagatatatgcgccgttcaagagcctcctacccatggtgaacccagacgaccttgtgtttggaggctgggacatcagcagcatgaacctggcagatgccatgaccagggccaaggtgctggacattgacctgcagaagcagctcaggccctacatggagtccatggtgccacttcccggtgtctatgatccggacttcatcgccgctaaccagggctctcgtgccaacaatgtcatcaagggcaccaagaaagaacaggtggagcagataatcaaggatatcagggagtttaaggagaagaacaaagtggacaaggtagttgtgctgtggactgcaaacactgaaaggtacagcaatgtatgcgctggtctcaacgacacaatggagaatctgctggcatctgtggacaagaacgaggcggagatctcgccatcaacactatatgccattgcctgtgtcacggagggggtgccgttcatcaatgggagcccccagaacacttttgtgcctgggctgattgatcttgctatcaagaacaactgcctgatcggtggtgacgacttcaagagtgggcagaccaagatgaaatcggtcctggttgattttcttgttggtgctggaataaagcccacctcgattgtgagctacaaccacttgggaaacaacgacggcatgaacctgtctgcccctcaaacattcaggtccaaggagatctccaagagcaacgtggtggatgacatggtctcaagcaatgccattctctatgggcccggcgagcatcccgatcatgttgttgtcatcaagtacgtgccgtacgtgggagacagtaagagggctatggacgagtacacatcagagatcttcatgggcggcaagagcaccatcgtgctgcacaacacctgcgaggactcgctcctcgccgcaccgatcatcctcgatctggtgctcctggctgagctcagcaccaggatccagctaaaacctgagggaacggacaagttccactccttccacccggtggccaccatccttagctacctcaccaaggcaccactggttccgcccggcacaccggtggtgaacgctcttgcaaagcagagggcgatgctggagaacatcatgagggcctgcgttggcctggccccagagaacaacatgatcctggagtacaagtga

SEQ ID NO: 149677 - protein, 510 aa, Zea mays; identical to SEQ ID NO: 142804

SEQ ID NO: 149678 - DNA, 1533 bp, Glycine max; identical to SEQ ID NO: 142805
  CDS (1)..(1533)

SEQ ID NO: 149679 - protein, 510 aa, Glycine max; identical to SEQ ID NO: 142806

SEQ ID NO: 149680 - DNA, 1533 bp, Medicago falcata
  CDS (1)..(1533)
atgttcatcgagaatttcaaggtcgaaagtcctaacatgaagtacacagagactgagattcagtccgtgtacagttacgaaacaaccgaacttgttcatgagaacagaaataacacttatgagtggattgttaagcccaaaacagtcaaatatgagtttaaaacacaaacaaatgtccctaaattgggggtaatgcttgttgggtggggtggaaacaatggttcaaccctcactggtggtgttattgcaaaccgagagggtatatcttgggcaacaaaggacaagattcagcaagccaattattttggttcgctaactcaagcatcagctatcagagtggggtctttccaaggggaggaaatacatgccccattcaagagccttcttccaatggtaaaccctgaggatattgtgtggggaggatgggatatcagtaacttgaacctagctgatgccatgggcagagctagagtgtttgacatagacctacaaaaacaactaaggccctacatggaatccatggttccacttcctggtatctatgaccctgatttcattgctgctaatcaaggagatcgtgctaacaacatcattaaaggaacaaagaaagaacaacttcaacaagtcatcaaagacattaaggagtttaaggaaactaccaaggttgacaaggttgttgtactctggactgccaacactgagaggtatagtaatattgttgtgggactaaatgacaccactgaaaatcttttggcttctgtggacaagaatgaagctgagatttcaccttcaaccctttatgccttggcttgtgttcttgaaaatgttcctttcattaatggaagccctcaaaacacctttgtcccagggttgattgatctggccatcaaaaggaatagtttgattggtggagatgacttcaagagtggtcagacaaaaatcaagtctgtgttggttgatttccttgtgggagctggtatcaaaccaacatcaatagtgagttacaaccatttgggaaacaatgatggaatgaatctttctgcaccacaaaccttccgctctaaggaaatctccaagagtaacgttgttgatgatatggtcaacagcaacgccatcctctatgggcctggtgaacatccagaccatgttgttgtcattaagtatgtgccttatgtgggggacagtaagagagcaatggatgagtacacttcagagatattcatgggtggaaagaacacaattgtgatgcacaacacatgtgaagattcacttttggcagctccaattatcttggatttggtccttcttgctgaacttagcactagaatccagttcaaatctgaacatgaggacaagtttcattcattccatgctgttgcaaccatcctcagttacctctctaaggctccacttgttccaccaggtacaccagttgtgaatgcactgtcaaagcagagagctatgctggaaaacattatgagagcttgtgttggattggctccagaaaacaacatgatccttgaatacaagtga

SEQ ID NO: 149681 - protein, 510 aa, Medicago falcata; identical to SEQ ID NO: 142810

SEQ ID NO: 149682 - DNA, 1533 bp, Xerophyta viscosa; identical to SEQ ID NO: 142811
  CDS (1)..(1533)

SEQ ID NO: 149683 - protein, 510 aa, Xerophyta viscosa; identical to SEQ ID NO: 142812

SEQ ID NO: 149684 - DNA, 1578 bp, Pichia pastoris
  CDS (1)..(1578)
atgactattcaatacactcctaaagtccaagtcaacactgacaaggcaagatacaccgagaatgaactgcttaccgactacacctatgagaacactatagttgaaaagcaagctgacggtacttacaacgtcactccaacttccctggactttgagttcaaggttgacttgaagacaccaaagacgggtttgttgctggtaggtcttggtggtaacaatggtaccaccttggttggttccgtgttagccaacaaacacaatatatcctttgagaccaagacgggtattcagcagccaaactactatggttctgttacacaagcttctactgttaagttgggaattgacagcaatggtagagatgtctacgcccctttcaactctttgttaccattggttcaccccaatgactttgtagttggaggttgggatatcagtggccttgatttggcctcctctatgagaagatctcaagtcttgcaaccagacttggtcagaaagttggagccttacatgaaggatattgttcctctgccttctgtctactacccagatttcattgctgctaaccagaacgaaagagccgacaactgtttcaatagagaaggcaaagatggagaagtttctaccaagggtaaatggtcccacgttgagcgcattagaagtgacattgccgaattcaagcagaagaacgacttggacaaggttatcgtcctttggactgccaacactgagagatatgccgagctgatcccaggtgtcaatgacaccgctgagaacctgatcaaggctatcaaaaacgaccatgaggaagtctctgcttctacaatttttgctgttgcttgtattttggacaagattccttacatcaatggttccccacagaacacattcgtaccaggatgcatcgagttggctgaaaccgaaggttctttcatcggtggtgacgatttcaaatctggacagaccaagctcaagtctgtgctggcacaattcttggtagatgctggtattagaccagtctcaatcgcatcttacaaccatcttggaaacaatgacggttacaatttgagtgcaccacaacaattcagatccaaagaaatctccaaggcttcagtcgttgatgacatgatcgagagtaacgagattttgtacaatgagaagaacggaaataccattgaccattgcattgtcatcaagtacatgaaggccgttggtgacgacaaagttgccatggatgaataccattccgaactgatgctgggtggacacaacaccatctctatccacaatatttgcgaggactcactactggccactccattgatcattgatctggttgtaatggctgaattcctttccagagtttcttacaagaagaagggtgatgctgaatacgaatctctacactcagtcctctcattcctcagttattggttgaaggctccactgactagaccaggataccaggctattaacggattgaataaacaaagggccggattggacaatttcttgagaatgctaattggtcttccaactcagaatgagctgagatttgaggagagattacagtag

SEQ ID NO: 149685 - protein, 525 aa, Pichia pastoris; identical to SEQ ID NO: 142814

SEQ ID NO: 149686 - DNA, 1533 bp, Passiflora edulis f; identical to SEQ ID NO: 142819
  CDS (1)..(1533)

SEQ ID NO: 149687 - protein, 510 aa, Passiflora edulis f; identical to SEQ ID NO: 142820

SEQ ID NO: 149688 - DNA, 1533 bp, Medicago truncatula; identical to SEQ ID NO: 142821
  CDS (1)..(1533)

SEQ ID NO: 149689 - protein, 510 aa, Medicago truncatula; identical to SEQ ID NO: 142822

SEQ ID NO: 149690 - DNA, 1533 bp, Glycine max; identical to SEQ ID NO: 142823
  CDS (1)..(1533)

SEQ ID NO: 149691 - protein, 510 aa, Glycine max; identical to SEQ ID NO: 142824

SEQ ID NO: 149692 - DNA, 1533 bp, Glycine max; identical to SEQ ID NO: 142825
  CDS (1)..(1533)

SEQ ID NO: 149693 - protein, 510 aa, Glycine max; identical to SEQ ID NO: 142826

SEQ ID NO: 149694 - DNA, 1533 bp, Glycine max; identical to SEQ ID NO: 142827
  CDS (1)..(1533)

SEQ ID NO: 149695 - protein, 510 aa, Glycine max; identical to SEQ ID NO: 142828

SEQ ID NO: 149696 - DNA, 1536 bp, Trifolium pratense
  CDS (1)..(1536)
atgttcatcgagaattttaaggttgagagtcctaacgtgaagtacacagagactgagattgagtccgtgtacagttacgaaacaaccgaacttgttcatcagaagaacacaaatgacacttatgagtgggttgttaagcccaaaactgtcaaatatgaatttaaaactcaaaccaatctccctaaattaggggtaatgcttgttgggtggggtggaaacaatggttcatccctcactggtggtgttattgcaaaccgagagggtatttcatgggcaacaaaggacaatattcagcaagccaattattttggttcactgacccaagcatcagctatcagagtggggtctttccaaggggaagaaatctatgccccattcaagagccttcttccaatggtaaaccctgaggacatagtgtggggaggatgggatatcagtgacatgaacctagctgatgccatgggtagagccaaggtgtttgacatagacctacagaaacagttgaggccttacatggaatccatggttccactccctggaatctatgaccctgatttcattgctgctaatcaaggagatcgtgctaacaacatcattaaaggaacaaagaaagaacagcttcaacaagtcatcaaagacattaaggagtttaaggaagctaacaaggttgacaaggttgttgtactttggactgcaaacactgagaggtacagtaatattgttgtgggactaaatgacactatggagaatctcttggcttctgtggacaagaatgaatctgagatttctccttcaaccctatttgctttggcttgtgttcttgaaaatgttcctttcatcaatggaagccctcaaaacacctttgtcccagggttgattgatttggctatcaaaaggaacagtttgatcggcggagatgacttcaagagtggtcagacaaaaatgaagtctgtgctagttgatttccttgtgggagctggtatcaaaccaacatcaatagtgagttacaaccatttgggaaacaatgatggaatgaatctctctgcaccgcaaaccttccgctccaaggaaatctcgaagagcaacgtcgttgatgatatggttaacagcaatgcaatcctctatggacctggtgaacatccagaccatgttgttgtcattaagtatgtgccttatgtgggagacagcaagagagcaatggatgagtacacttctgagatatttatgggtggaaagaacactattgtgatgcataacacttgtgaagattctcttttggctgctccaattatcttggacttggtccttcttgctgagcttagcactagaatccagttcaaatctgaacatgaggacaagttccacacattccaccctgttgcaaccatcctcagttacctcactaaggctcctcttgttccaccaggtacaccagtagtgaatgcattatcaaagcagagatctatgctggaaaacattctgagagcttgtgttggattggcacctgagaacaacatgatccttgaatacaagtga

SEQ ID NO: 149697 - protein, 511 aa, Trifolium pratense; identical to SEQ ID NO: 142830

SEQ ID NO: 149698 - DNA, 1596 bp, Aspergillus oryzae
  CDS (1)..(1596)
atggctccccacgctaattcggatgttgctgccaatggcgccgtgaacgggtcggctcaatcctctctgtttactgtcaattcccccaatgtcgagtacaccgacaatgagatcaagagcaagtatgcctaccacactaccgacatcactcgtaccgccgacaacaagctggtcgccactcccaaggcgactacctaccactttaaggttgaccgcaaagtgggcaaggttggtatgatgatggtcggctggggtggtaacaacgggtccactgtgacggccggtattattgccaatcgccgtggcctccagtgggagactcgtgagggcatgcgtgctgccaactactacggctctgtcgtcatgagctcgactgtcaagctaggaactgaccccaagaccggtgaggagatcaacattcccttccaggacatgctgccgatggtccaccccaatgatctcgccattggtggatgggacatcagcagcatgaacatcgccgatgccatggaccgggctcaggtcctcgagccttctctcaagcagttggtccgcaaggaaatggccgagatgaagccactgcctagcatctactatcccgactttattgctgccaaccaggaggaccgtgccgacaacgtcctcgagggaaccaaggcttgctgggctcacgtggagaagatccagcaggacatccgggacttcaaggcccagcacggtctggacaaggtgattgtcatgtggactgccaacaccgagcggtacgccgacatcgtccccggtgtcaatgataccgccgacaacctcctcaactcgatcaagactggccatgaggaagttgccccgtccactgtctttgccgtcgcctgtatcttggagaacactcctttcatcaacggttcgccccagaacaccttcgtccccggcgcccttgagctggccgagaagcacaaggccttcatcggtggagacgacttcaagtcgggccagaccaagatgaagtcggctctcgtggacttcctcatcaatgctggtatcaagcttacttccatcgccagctacaaccacctgggcaacaacgacggcaagaacctgagctcccagaagcaattccgctccaaggagatctccaagtccaacgtggtggatgacatggttgcggccaaccacatcctgtacgagaaggatgagcatccggaccacaccgtggtgatcaagtacatgccggccgtgggtgacaacaagcgtgctctggatgagtactacgccgagatcttcatgggcggtcaccagaccatcagcttgttcaacatctgcgaggactccttgctggcttcccctctgatcatcgacttggttgtgcttgccgagatgatgacccgcgtcagctggaaggcggaggaggctgccgactacaagggcttccacagtgtgctcagcgtcctgagctacatgctcaaggctcctctgactcccccgggcaccccggttgtcaacgcgctcaacaagcagcgcaatgcgttgaccaacatcttccgtgcttgcgttggcctccagccggaatcggatatgactttggagcacaagctgttctag

SEQ ID NO: 149699 - protein, 531 aa, Aspergillus oryzae
MAPHANSDVAANGAVNGSAQSSLFTVNSPNVEYTDNEIKSKYAYHTTDITRTADNKLVATPKATTYHFKVDRKVGKVGMMMVGWGGNNGSTVTAGIIANRRGLQWETREGMRAANYYGSVVMSSTVKLGTDPKTGEEINIPFQDMLPMVHPNDLAIGGWDISSMNIADAMDRAQVLEPSLKQLVRKEMAEMKPLPSIYYPDFIAANQEDRADNVLEGTKACWAHVEKIQQDIRDFKAQHGLDKVIVMWTANTERYADIVPGVNDTADNLLNSIKTGHEEVAPSTVFAVACILENTPFINGSPQNTFVPGALELAEKHKAFIGGDDFKSGQTKMKSALVDFLINAGIKLTSIASYNHLGNNDGKNLSSQKQFRSKEISKSNVVDDMVAANHILYEKDEHPDHTVVIKYMPAVGDNKRALDEYYAEIFMGGHQTISLFNICEDSLLASPLIIDLVVLAEMMTRVSWKAEEAADYKGFHSVLSVLSYMLKAPLTPPGTPVVNALNKQRNALTNIFRACVGLQPESDMTLEHKLF

SEQ ID NO: 149700 - DNA, 1533 bp, Brassica rapa subsp; identical to SEQ ID NO: 142831
  CDS (1)..(1533)

SEQ ID NO: 149701 - protein, 510 aa, Brassica rapa subsp; identical to SEQ ID NO: 142832

SEQ ID NO: 149702 - DNA, 1533 bp, Phaseolus vulgaris
  CDS (1)..(1533)
atgttcattgagaattttaaggttgagtctcctaatgttaagtactccgagactgagattcagtccgtgtataactatgaaaccaccgaacttgttcacgagaacagaaatggcgcctatcagtggattatcaaacccaaatctgtcaaatatgaatttaaaaccaacacccatgttcctaaattgggggtaatgcttgtggggtggggtggaaacaacggttcaaccctcactggtggtgttattgctaaccgagagggcatttcatgggcaacaaaggacaagattcaacaagccaattactttggctccctcacccaagcttccgctatccgagttggctcctaccagggagaggaaatctatgccccattcaagagccttcttccaatggttaaccctgacgacattgtgtttgggggatgggatatcagtaacatgaacctggctgatgccatgggtagggccaaggtgtttgacatcgatttgcagaagcagttgaggccttatatggaatccatggttccactccctggaatctatgacccagatttcattgctgccaaccaagaagagcgtgctaacaatgtgatcaagggcacaaagaaagagcaagttcaacaagtcatcaaagacattaaggagtttaaggcagccaccaaagtggacaaggtggttgtcctgtggactgccaacacagagaggtacagtaatttggttgtcggtcttaatgacaccacggagaacctcttggctgccctggacagaaatgaggctgagatttctccttccaccttgtttgccattgcttgtgttacggaaaatgttccattcatcaacggaagccctcagaacacttttgtcccagggttgattgattttgccatccagaaaaactgtttgattggaggagatgacttcaagagtggtcagaccaaaatgaaatccgtgctggtagatttccttgtgggggctggtatcaagccaacatcaatagttagttacaaccatctgggaaacaatgatggtatgaatctctctgctccacaaaccttccgttccaaggaaatctccaagagtaacgttgttgatgatatggtcaacagcaatgccatcctctatgagcctggtgaacatcccgaccatgttgttgttattaagtatgtgccttacgttgcggacagcaagagagccatggatgagtacacttcagagatattcatgggtggaaagaacaccattgtgctgcacaatacatgcgaggattctctcttggctgctcctattatattggacttggtccttcttgctgagcttagcactcgtatccagttcaaagctgaaaaggagggaaaattccactcattccacccagttgctaccattctcagctacctgaccaaggctcctctagttccaccgggcacaccagtggtgaatgcattgtcaaagcagcgtgcaatgctggaaaacattatgagagcttgtgttggattggccccagagaataacatgattcttgagtacaagtga

SEQ ID NO: 149703 - protein, 510 aa, Phaseolus vulgaris; identical to SEQ ID NO: 142834

SEQ ID NO: 149704 - DNA, 1533 bp, Xerophyta viscosa; identical to SEQ ID NO: 142835
  CDS (1)..(1533)

SEQ ID NO: 149705 - protein, 510 aa, Xerophyta viscosa; identical to SEQ ID NO: 142836

SEQ ID NO: 149706 - DNA, 1539 bp, Oryza coarctata; identical to SEQ ID NO: 142837
  CDS (1)..(1539)

SEQ ID NO: 149707 - protein, 512 aa, Oryza coarctata; identical to SEQ ID NO: 142838

SEQ ID NO: 149708 - DNA, 1533 bp, Suaeda salsa
  CDS (1)..(1533)
atgttcatcgaaaatttcaaggtagaaagcccaaatgttaactacactgaaaatgaaattcattcagtttacaattatgaaaccactgaattagttcacgagaatcgcaaaggctctggttatcaatggatcgtcaaacctaaaaccgtcaaataccaattcaaaactcaaactcatgttcccaaacttggggtgatgttggtgggatggggtggcaacaacggttgcacactcaccggtggtgtcatcgccaatcgcgagggtatatcatgggcaacaaaggacaaaattcaacaagctaactattttggatccctcactcaggcttcttctattcgtgttggttcttttaatggagaggagatttatgctccttttaagagccttcttcctatggtgaacccagatgatatagtgtttgggggctgggacataagtgacttgaacctagcagacgccatgacgagggcaaaggtgttggacattgatttgcaaaagcagttgagaccttacatggagcacatggttccccttcctggtatctatgaccctgatttcattgctgctaaccaagattctcgtgcaaataacatcattaagggcactaagaaggagcaagttgagcaagtcattaaggacatcagggaatttaaggagaagaacaaagtggacaaggtggtggtactctggacagcaaacacagagaggtacagtgatgtggtggtgggactcaatgacaccacagagaaccttatggcagctgttgaaaggaatgagtctgagatttctccatcgactttgtatgctattgcttgcatccaagaagatgtccctttcatcaacggtagtcctcagaacacctttgtccctggtctcattgaactggccataaagaagaattgtttgattggaggagatgacttcaagagtggtcagactaagatgaaatcagtgctcgttgacttccttgttggggctggtattaagccaacatcaattgtgagctacaaccacttgggaaacaatgatgggatgaacctttcagcacctcagaccttcaggtctaaagagatttcaaagagtaatgtggttgatgacatggttgctagcaacggtatcttgtatgagcctggtgaacaccctgatcatgttgttgtcatcaagtatgttccatatgtcggagacagcaagagagctatggatgagtacacatctgagatattcatgggtggtaagaacaccatcgttttgcacaacacctgtgaggactctctcttggccgctccaatcatcctagacttggtcctacttgccgagcttagcacccgcattgaattcaaagccgaaactgaggacaagttccacaccttccatccagtggctaccatactcagttatctaactaaagcacctctggttccaccaggtactccggtggtgaatgcgctgtcaaagcagagggcaatgttagagaaaatgagggcatgtgtaggtttagctccagagaacaacatgatccttgagtacaagtag

SEQ ID NO: 149709 - protein, 510 aa, Suaeda salsa; identical to SEQ ID NO: 142840

SEQ ID NO: 149710 - DNA, 1533 bp, Glycine max
  CDS (1)..(1533)
atgttcatcgagaattttaaggttgagtgtcctaatgtgaagtacaccgagactgagattcagtccgtgtacaactacgaaaccaccgaacttgttcacgagaacaggaatggcacctatcagtggattgtcaaacccaaatctgtcaaatacgaatttaaaaccaacatccatgttcctaaattaggggtaatgcttgtgggttggggtggaaacaacggctcaaccctcaccggtggtgttattgctaaccgagagggcatttcatgggctacaaaggacaagattcaacaagccaattactttggctccctcacccaagcctcagctatccgagttgggtccttccagggagaggaaatctatgccccattcaagagcctgcttccaatggttaaccctgacgacattgtgtttgggggatgggatatcagcaacatgaacctggctgatgccatggccagggcaaaggtgtttgacatcgatttgcagaagcagttgaggccttacatggaatccatgcttccactccccggaatctatgacccggatttcattgctgccaaccaagaggagcgtgccaacaacgtcatcaagggcacaaagcaagagcaagttcaacaaatcatcaaagacatcaaggcgtttaaggaagccaccaaagtggacaaggtggttgtactgtggactgccaacacagagaggtacagtaatttggttgtgggccttaatgacaccatggagaatctcttggctgctgtggacagaaatgaggctgagatttctccttccaccttgtatgccattgcttgtgttatggaaaatgttcctttcattaatggaagccctcagaacacttttgtaccagggctgattgatcttgccatcgcgaggaacactttgattggtggagatgacttcaagagtggtcagaccaaaatgaaatctgtgttggttgatttccttgtgggggctggtatcaagccaacatctatagtcagttacaaccatctgggaaacaatgatggtatgaatctttcggctccacaaactttccgttccaaggaaatctccaagagcaacgttgttgatgatatggtcaacagcaatgccatcctctatgagcctggtgaacatccagaccatgttgttgttattaagtatgtgccttacgtaggggacagcaagagagccatggatgagtacacttcagagatattcatgggtggaaagagcaccattgttttgcacaacacatgcgaggattccctcttagctgctcctattatcttggacttggtccttcttgctgagctcagcactagaatcgagtttaaagctgaaaatgagggaaaattccactcattccacccagttgctaccatcctcagctacctcaccaaggctcctctggttccaccgggtacaccagtggtgaatgcattgtcaaagcagcgtgcaatgctggaaaacataatgagggcttgtgttggattggccccagagaataacatgattctcgagtacaagtga

SEQ ID NO: 149711 - protein, 510 aa, Glycine max; identical to SEQ ID NO: 142842

SEQ ID NO: 149712 - DNA, 1533 bp, Glycine max
  CDS (1)..(1533)
atgttcatcgagaattttaaggttgagtgtcctaatgtgaagtacaccgagactgagattcagtccgtgtacaactacgaaaccaccgaacttgttcacgagaacaggaatggcacctatcagtggattgtcaaacccaaatctgtcaaatacgaatttaaaaccaacatccatgttcctaaattaggggtaatgcttgtgggttggggtggaaacaacggctcaaccctcaccggtggtgttattgctaaccgagagggcatttcatgggctacaaaggacaagattcaacaagccaattactttggctccctcacccaagcctcagctatccgagttgggtccttccagggagaggaaatctatgccccattcaagagcctgcttccaatggttaaccctgacgacattgtgtttgggggatgggatatcagcaacatgaacctggctgatgccatggccagggcaaaggtgtttgacatcgatttgcagaagcagtggaggccttacatggaatccatgcttccactccccggaatctatgacccggatttcattgctgccaaccaagaggagcgtgccaacaacgtcatcaagggcacaaagcaagagcaagttcaacaaatcatcaaagacatcaaggcgtttaaggaagccaccaaagtggacaaggtggttgtactgtggactgccaacacagagaggtacagtaatttggttgtgggccttaatgacaccatggagaatctcttggctgctgtggacagaaatgaggctgagatttctccttccaccttgtatgccattgcttgtgttatggaaaatgttcctttcattaatggaagccctcagaacacttttgtaccagggctgattgatcttgccatcgcgaggaacactttgattggtggagatgatttcaagagtggtcagaccaaaatgaaatctgtgttggttgatttccttgtgggggctggtatcaagccaacatctatagtcagttacaaccatctgggaaacaatgatggtatgaatctttcggctccacaaactttccgttccaaggaaatctccaagagcaacgttgttgatgatatggtcaacagcaatgccatcctctatgagcctggtgaacatccagaccatgttgttgttattaagtatgtgccttacgtaggggacagcaagagagccatggatgagtacacttcagagatattcatgggtggaaagagcaccattgttttgcacaacacatgcgaggattccctcttagctgctcctattatcttggacttggtccttcttgctgagctcagcactagaatcgagtttaaagctgaaaatgagggaaaattccactcattccacccagttgctaccatactcagctacctcaccaaggctcctctggttccaccgggtacaccgggtgtgaatgcattgtcaaagcagcgtgcaatgctggaaaacataatgagggcttgtgttggattggccccagagaataacatgattctcgagtacaagtga

SEQ ID NO: 149713 - protein, 510 aa, Glycine max; identical to SEQ ID NO: 142844

SEQ ID NO: 149714 - DNA, 1530 bp, Avicennia marina
  CDS (1)..(1530)
atgttcatcgagagcttcaaggttgacagcccaaacgttaagtacacagacagtgagattcactccgtctacaactatgaaactgcagagcttgttcacgagaacagaaacggtacctatcagtggatcgtgaagcccaaaactgttaaatatgagttcaggaccgacacccatgtcccgaaattaggtgttatgcttgttgggtggggaggcaacaatggttcaactctgacaggtggtgtcattgcaaatcgggagggtatttcatgggcaacgaaagacaaggtgcaacaggccaactattttgggtccctaactcaggcttctgcaattagggttgggtccttcaatggagaagagatctatgctccattcaagagcttactccctatggtcaaccctgatgacataatttttgggggatgggacatcagtaacatgaatctggctgatgccatgggcatgggccaagggttagacattgatctccaaaagcagctgaggccctacatggagcacatggtcccactccctgggatctactaccctgacttcattgctgccaatcagggctcacgtgccaacaacgtgatcaaaggaaccaagaaggagcaagttcaacaagtcatcaaagacattaaggagtttaaggagaaaactaaggtggaaagggtagtggtggggacagccaacaccgagagatacagcaatgttgttgtgggcttaaatgatacagcggaaagccttatggcctcgttggaaaggaatgaggctgagatatctccttcaaccttatatgccatagcttgcgtgcttgaagatgtcccttttatcaatggcagcccacaaaacactttcgttccagggctgattgagttagccatccaaaggaactgtttgattggtggagatgatttcaagagtggtcaaaccaagatgaaatcggtgctagttgatttccttgttggggctggtattaagccaacttcgatagtgagctataaccatttgggaaataatgatggaatgaatctatcagccccgcaaactttccggtcaaaggagatctccaaaagcaatgtggtagacgacatggtcgccagcaacagcatcctctacgagccgggagagcaccctgatcatgttgttgtcatcaagtatgtgcctgatgtgggagacagcaagagagcgatggacgagtacacatcggagatattcatgggaggtaaaagcacaatagtgatgcacaacacttgtgaggattctctcctggctgctccaatcatcctggatttggtcctccttgcggaactcagcacccgcattcagctcaaggccgagggagagggcaaattccactccttccatcccgtggccaccatcctcagctacctgaccaaagccccccttgtgcctccgggaacaccagttgtgaatgccctctcaaagcaaagggcaatgcttgagaacatcctaagggcttgtgttggattggccccagaaaacaacatgattttggaatacaagtga

SEQ ID NO: 149715 - protein, 509 aa, Avicennia marina; identical to SEQ ID NO: 142846

SEQ ID NO: 149716 - DNA, 1533 bp, Avena sativa
  CDS (1)..(1533)
atgttcatcgagagcttccgggtggagagcccgaacgtgcggtacggcgccggcgagatcgagtcggagtaccgctacgacaccacggagctggtgcacgagagccacaacggcgcatccaagtgggtcgtccgccccaagtccgtcaactaccacttcaagaccgacaccaacgtccccaagctcggggtgatgcttgtgggctggggcggcaacaatggctccacgctcatggctggcgtcatcgcaaacagggaggggatctcttgggcaaccaaggacaaggtgcagcaggccaactactttggctccctcacccaggcctccaccatcagggtcgggagctacaacggagaggagatctatgctcccttcaagagcctcctgcccatggtgagcccagatgacattgtgttcgggggctgggacatcagcagcatgaacatggctgatgcaatgaccagggccaaggtgctcgacatcgaccttcagaagcagctcaggccgtacatggagtccattgttccacttcctggcatctatgacccagacttcatcgctgcaaaccaggggtcccgggccaacaacgtcatcaagggcaccaaaaaggagcagatggagcaggttattaaggatataagggagttcaaggagaagaacaaagtggacaaggtagttgtgctgtggactgcaaacactgagaggtacagtggagtctctgtcgggctaaatgacacgatggagaacctcttggcctctgtggacaagaacgaggcggagatctctccgtctacactgtatgccatcgcctgcgtcatggagggcgtaccgttcatcaacgggagccctcagaacaccttcgtgccagggctgatcgatcttgcaatcaagaacaattgcttgattggtggcgatgacttcaagagtgggcagactaagatgaagtctgtcttggtcgacttcctcgttggtgctggaatcaagcccacctcgattgtcagctataatcacctgggcaacaacgacggcatgaacctctcggcgccacagacattccggtccaaggagatttccaagagcaatgtggtggatgacatggtcgcaagcaacaacatcctttacgagcccggggagcaccctgaccatgtcgtcgtcatcaagtatgtgccgtatgtcggggacagcaaaagggccatggacgaatacacctctgagatcttcatgggcggcaagaacaccatcgtattgcacaatacttgcgaggattcacttcttgcggcacctatcatccttgatctggtgctcctggctgagctcagcaccaggatccagttgaaagccgagggggaggagaagttccactccttccacccggttgcaaccatcctgagctacctcaccaaggcgccccttgttcctcctggcacaccggtggtgaatgctctggccaagcagagggcgatgctcgagaacatcatgagggcctgcgtcggcctggcgcccgagaacaacatgatcctcgagtacaagtga

SEQ ID NO: 149717 - protein, 510 aa, Avena sativa; identical to SEQ ID NO: 142848

SEQ ID NO: 149718 - DNA, 1536 bp, Arabidopsis thaliana
  CDS (1)..(1536)
atgtttattgagagcttcaaagttgagagcccgaacgtgaagtacacagagaatgagattcactctgtgtacgattacgagacgacggaggttgttcatgagaagaccgtcaatggcacttaccaatggattgtgaagccaaagactgtcaaatacgatttcaaaaccgatattcgtgtccccaaattaggggttatgcttgtgggtttgggaggaaacaatggatcaactctcaccgctggtgtgattgcgaacaaagaaggaatctcgtgggcaacgaaggacaaagtgcaacaagcgaattacttcgggtcactaactcaagcttcatcgattcgtgtcggatcttttaacggtgaagagatctatgctcctttcaagagtctccttccaatggtgaatccggatgatgttgtgtttggaggatgggatataagtgacatgaacttagcagatgccatggctagagccagggttcttgatatcgacttgcagaaacagctcaggccttacatggagaacattgtgccactccctgggatcttcgatcctgatttcatagctgctaatcaagggtcacgtgctaaccacgtgatcaaaggtaccaagaaggaacaagtcgaccacatcatcaaggacatgagggagtttaaggagaagaataaggtggataaggttgtggttctctggacggctaacacagagcgttatagcaatgtggtcgttgggatgaacgatacaatggagaatctcatggagtctgtggatagggatgaggctgagatctctccttcaacactttatgcgattgcttgtgttcttgagggaatcccgttcatcaatggaagccctcaaaacacctttgttccaggtctaattgatatggcgatcaggaacaatgttttgatcggtggagatgatttcaagagtggtcaaaccaagatgaaatctgtcttggttgatttcctagttggcgcaggaatcaagcctacttcaattgtgagctacaatcacttgggaaacaacgatggaatgaatctctcagctccacagactttcagatctaaggagatctccaaaagcaatgtcgtggacgatatggttgctagcaatggtatcctctttgagcctggggaacacccggaccatgttgttgtcatcaagtatgtaccgtatgttgcggatagtaagcgagccatggacgagtacacatcagagatattcatgggagggaagaacacaattgtgatgcacaatacctgcgaggactctctcttagctgctccaatcatcttggatcttgttctcctcgcggagctcagcaccaggatccagttcaaatccgagggagagggaaagtttcactctttccatcctgtggccaccatactcagctacctcaccaaggcaccacttgtaccgccgggaactccggtgattaacgcactgtcgaagcagcgggctatgctggagaatattatgagggcgtgcgttggactggctccggagaacaacatgatcatggaattcaagtga

SEQ ID NO: 149719 - protein, 511 aa, Arabidopsis thaliana; identical to SEQ ID NO: 142850

SEQ ID NO: 149720 - DNA, 1533 bp, Brassica napus
  CDS (1)..(1533)
atgttcatcgagagcttcaaagtcgagagcccgaacgtgaagtacacggagaatgagattcattcggtgtacgattacgagaccacggaggtcgttcacgagaacgtcaacggtgcttaccagtggatcgtgaagcccaaggttgtcaaatacgatttcaaaaccgacactcgtgtccccaaattaggggttatgcttgttggttggggaggaaacaatggatcaaccctcaccgctggtgtaattgccaataaagaaggaatctcgtgggcgaccaaggacaaggtgcaacaagcgaactacttcgggtcgttaacacaagcatcgtctattcgtgtcggatcctttaacggtgaagagatgtatgcccctttcaagagtctcgttccaatggtgaatccggatgatgttgtgtttggaggatgggacataagcgatatgaatttagcagacgcgatgggtagagccaaggttcttgacattgatctgcagaaacagctcaggccttacatggagaacattgtcccactccctgggatctacgaccctgatttcatcgctgccaatcaaggctcacgtgccaacaacgtgatcaaaggtaccaagaaggaacaagtcgaccaaatcatcaaggacatgagggagtttaaggagaagaacaaggtggataaggttgtggttctgtggacggctaacacagagcgttacagcaatgtgatcgtggggctaaacgacactatggagaatcttatgaactctgtggatagggatgagtctgagatctctccttccacgctttatgctattgcatgtgttcttgaaggtattcctttcatcaatggaagccctcagaacacctttgttccgggtcttattgatttggctatcaagaacaatgttttgatcggtggagatgacttcaagagtggtcaaaccaagatgaaatctgtcttggttgatttccttgttggtgcaggcatcaagcctacttcaattgtgagctacaatcacctagggaacaacgatggaatgaacctctcagctccacagacattcagatctaaggagatctccaaaagtaatgtggttgacgatatggttgctagcaacggtatcctcttcgagcccggggaacatccagaccatgtagttgtcatcaagtatgtaccgtatgttgcagatagcaagcgagccatggatgagtatacatcagagatattcatgggaggcaagaacacaattgtgatgcacaatacctgcgaggactctctcttagctgctccaatcatcttggatcttgttctcctcgctgaaatcagcaccaggattcagttcaaatccgagaaagaggggaagtttcattctttccatcctgtggccaccaaacttagctatctcaccaaggcaccgctcgtgccgccgggaacaccggtggttaatgcgctgtcgaagcagcgggctatgctggagaatattcttagggcgtgtgttgggctggcgccggagaacaatatgatcttggaatacaagtga

SEQ ID NO: 149721 - protein, 510 aa, Brassica napus; identical to SEQ ID NO: 142852

SEQ ID NO: 149722 - DNA, 1563 bp, Candida albicans; identical to SEQ ID NO: 142853
  CDS (1)..(1563): transl_table=12

SEQ ID NO: 149723 - protein, 520 aa, Candida albicans; identical to SEQ ID NO: 142854

SEQ ID NO: 149724 - DNA, 1617 bp, Candida glabrata; identical to SEQ ID NO: 142855
  CDS (1)..(1617)

SEQ ID NO: 149725 - protein, 538 aa, Candida glabrata; identical to SEQ ID NO: 142856

SEQ ID NO: 149726 - DNA, 1524 bp, Citrus paradisi
  CDS (1)..(1524)
atgtttatcgaaaatttcaaggttgagagcccaaatgtgaagtacacagatcatgagattcactctgtgtacgattatgaaaccactgagcttgttcatgagaacagaaatggcacttatcagtggattgtcaagcccaaaactgtcaaatatgagttcaaaaccgatgttcatgtccctaaacttggggttatgcttgtgggttggggtggaaacaacggctcaactctcacgggtggtgttatcgcgaatcgagagggaatctgctgggccacaaaggacactgtgcagcaagccaattattttggttcacttacccaagcatcagcaattagagttgggtcttacaatggagaggagatttatgctccattcaagagcattctccctatggtgaacccagatgacattgtgtttggaggatgggacattagtgacatgaacttggctgatgccatggccagggctagagtgtttgatattgatcttcaaaagcaacttaggccttacatggaatcaatggtcccacttcctggaatctatgaccctgatttcattgctgccaatcaagggtcgcgtgccaacaacgtgatcaaaggaaccaagaaagaacaaatgctacaaatcatcaaagatattagagagtttaaggagaaaaacaaggtggatagggttgttgtactgtggactgctaacactgagaggtacagtaatgtgattgtcgggctaaatgacacagtggagagccttcttgcttcactggacaaaaacgaagctgagatttctccttccaccttgtatgctattgcttgtgttcttgaaaatatccctttcatcaatggaagcccccaaaacacctttgtaccagggcttattgacttggctattaggaggaactgtttgattggtggagatgacttcaagagtgggcagactaagatgaaatctgttttggttgatttccttgttggggcaggaatcaagccaacatcaattgttagctacaaccacttgggaaacaatgatggaatgaatctttcagctcctcaaaccttccgctccaaggagatttccaaaagtaatgttgttgatgacatggtctccagcaatgtattctttatgggcctggtgaacacccgaccacgttggatcaagtatgtgccatatgttgcgatcgagagagccatggatgagtacacatcagaaattttcatgggtggcaagagcaccattgtgctgcacaacacgtgtgaggactctcttttggctgctccaatcattctagatttggttctgctggctgaactcagcaccaggatccagctcaaagctgaaggagagggcaaattccactctttccaccctgtggctacaattctcagctacctcaccaaggctcctctggtccctccaggcacaccagtggtgaatgcgctgtcgaagcagcgtgcaatgcttgagaacattctgagggcttgcgttggcttggctcctgagaacaacatgattttggaatacaagtga

SEQ ID NO: 149727 - protein, 507 aa, Citrus paradisi; identical to SEQ ID NO: 142858

SEQ ID NO: 149728 - DNA, 1698 bp, Drosophila melanogaster; identical to SEQ ID NO: 142859
  CDS (1)..(1698)

SEQ ID NO: 149729 - protein, 565 aa, Drosophila melanogaster; identical to SEQ ID NO: 142860

SEQ ID NO: 149730 - DNA, 1533 bp, Hordeum vulgare
  CDS (1)..(1533)
atgttcatcgagagcttccgcgtggagagcccgaaggtgcggtacggcgcgggggagatcgagtccgagtaccgctacgacaccacggagctggtgcacgagagccacgacggcgcctccaagtgggtcgtccgccccaagtccgtcaactaccacttcaagaccaacaccaccgtccccaagctcggggtgatgctcgtggggtggggcggcaacaatggctccacactcatggctggggtcatcgccaacagggaggggatctcatgggcgacaaaggacaaggtgcagcaggccaactactttgggtccctcacccaggcctccaccatcagggtcgggagctacaacggagaggagatctatgcgcccttcaagagcctccttcccatggtgaatccggatgaccttgtgttcgggggctgggacattagcagcatgaacctggctgatgctatgaccagggccaaggtgctggacattgacctgcagaagcagctcaggccctatatggagtccatgtgcccgctccctggcatctatgacccggacttcatcgcagccaaccagggctcccgggctaacaatgtcatcaagggcacaaagaaagagcagatggagcaggtcatcaaagatataagggagttcaaggagaagaacaaggtagacaaggtagtggtgctctggacggcaaacactgaaaggtacagcaacgtctctgttgggcttaatgacacgactgagaacctcttggcgtctgtggacaagaacgaggctgagatatctccatcaacactgtatgccattgcctgtgtcatggagggtgtgccgttcatcaatgggagccctcagaacacctttgtgcctggactgattgatcttgctattaagaatgactgcctgattggtggcgatgatttcaagagtggccagaccaagatgaagtctgtcttggtcgacttccttgttggtgctggaatcaagcccacctcaattgtcagctacaaccatctggggaacaacgacgggatgaacctatccgcaccgcaaacatttcgttccaaggagatctcaaagagcaacgtggtggatgacatggtctcaagcaatgctatcctctatgagcccggggaacatcctgaccacgtcgtcgtgatcaagtacgtgccatacgttggagacagcaagagggccatggacgagtatacctcggagatcttcatggggggcaagagcaccatcgtgctgcacaacacctgcgaggactcgctcctccgcgcgccgatcattcttgatttggtgctcctggccgagctcagcaccaggattcagctgaaagccgagggagaggacaagctccattccttccatccggttgccaccatcctgagctacctcaccaaggcgcccctggtccctccaggcacaccggtggtgaacgcgctggcgaagcagagggcgatgctggagaacatcatgagggcgtgcgtcggcctggcgcccgagaacaacatgatcctggagtacaagtga

SEQ ID NO: 149731 - protein, 510 aa, Hordeum vulgare; identical to SEQ ID NO: 142862

SEQ ID NO: 149732 - DNA, 1533 bp, Zea mays
  CDS (1)..(1533)
atgttcatcgagagcttccgcgtcgagagcccccacgtgcggtacggcccgatggagatcgagtcggagtaccggtacgacacgacggagctggtacacgagggcaaggacggcgcctcacgctgggtcgtccgccccaagtccgtcaagtacaacttccggaccagaaccgccgtccccaagctcggggtgatgcttgtggggtggggaggcaacaacgggtccacgctgacggctggggtcattgccaacagggaggggatctcatgggcgaccaaggacaaggtgcagcaagccaactactacggctccctcacccaggcctccaccatcagagtcggcagctacaacggggaggagatctatgcgccgttcaagagcctccttcccatggtgaacccagacgacattgtgttcggaggctgggacattagcaacatgaacctggccgactccatgaccagggccaaggtgctggatattgacctgcagaagcagctcaggccctacatggagtccatggtgccacttcccggtatctatgatccggacttcatcgcggctaaccagggctctcgcgccaacagtgtcatcaagggcaccaagaaagaacaggtggagcagatcatcaaggatatcagggagtttaaggagaagaacaaagtggacaagatagttgtgttgtggactgcaaacactgaaaggtatagcaatgtgtgcgctggtctcaacgacacgatggagaatctactggcatctgtggacaagaacgaggcggaggtatcaccatcaacactatatgccattgcctgtgtcatggagggggtgccgttcatcaatgggagcccccagaacacctttgtgcctgggctgattgatcttgctataaaaaacaactgcttgattggtggtgacgacttcaagagtggacagaccaagatgaaatctgtcttggtcgatttccttgttggtgctggaataaagcccacctcaatcgtgagctacaaccacttgggaaacaacgatggcatgaacctgtctgcccctcaagcattcaggtccaaggagatctccaagagcaacgtggtggatgacatggtctcgagcaatgccatcctctatgagcccggcgagcatcccgatcatgtcgttgtcatcaagtatgtgccgtacgtgggagacagcaagagggctatggacgagtacacctcagagatcttcatgggcggcaagaacaccatcgtgctgcacaacacctgtgaggactcgctcctcgccgcacctatcatccttgatctggtgctcttggctgagctcagcaccaggatccagctgaaagctgagggagaggacaaattccactccttccacccggtggccaccatcctgagctacctcaccaaggcacccctggttccccctggcacaccggtggtgaacgctctggccaagcagagggcgatgctggagaacatcatgagggcctgcgttgggctggccccagagaacaacatgatcctggagtacaagtga

SEQ ID NO: 149733 - protein, 510 aa, Zea mays; identical to SEQ ID NO: 142864

SEQ ID NO: 149734 - DNA, 1539 bp, Mesembryanthemum crystallinum
  CDS (1)..(1539)
atgtttattgagagcttcaaagtagagagcccaaacgtgaagtacacagagaatgagattgaatcggtgtacaactacgacaccaccgagttggttcatgagaatcgcaaagatgctggtggttatcaatggatcgttaagcccaagaccgttcagtatcacttcaagactgacactcgtgtccccaaactcggggtgatgctggttggatggggtggaaataacggctccaccctcacaggtggtgtgatcgccaaccgcgagggaatatcttgggcaaccaaggacaagatccagcaagcgaactattttggttcgttgacccaggcttcttcaattcgggtcgggtcttttaatggagaggagatttatgctcctttcaagagcttgctccctatggtgaacccagatgacgtagtgtttgggggttgggacataagcgacatgaacctggctgatgcaatgaccagggctagggtctttgacattgatcttcaaaagcagctcaggccttacatggagcacatggttcccctccctggtatttacgaccctgatttcatcgctgcgaaccaaggctcccgagccaacaacgtcattaagggcaccaagaaggaacaagttgagcgagtcattaaagacattagggagttcaaggagaagaacaaagtggacaaggtggtggtgctatggactggcaacacagagaggtacagcaatgtggtggtcgggctcaacgacaccatggagaacctgttggcatctctggagaaaaacgagtcggagatttctccatccacttcgtatgccttggcatgtatcgaagaaaatattcccttcatcaatggtagccctcagaacacctttgtgccagggctcattgatctggctatcaagaagaacagtttgattggtggtgatgacttcaagagtggtcagaccaagatgaaatctgtcctcgtcgacttcctcgttggggctggtattaagccaacatccatagtgagctacaaccacttggggaacaatgatgggatgaacctgtcagcacctcaaactttcaggtccaaggagatttctaagagcaacgtggtcgatgacatggttgccagcaacggcatcctctatgagccgggcgaacaccctgatcatgttgtggtcatcaagtatgtgccatatgtgggagacagcaagagagccatggatgagtacacttcggaaatatttatggggggaacgaacactattgtcatgcacaacacctgtgaggactctctcttggctgcccccatcatcctggacttggtcctccttgctgaactaagcacccgcattcagctgaaggctgaggaagaggacaagttccactccttccatccggtcgctaccatcctgagttacctcaccaaggcccctcttgttccaccaggcactccagtggtaaatgcactttcgaagcagagggctatgctggagaacatactgagggcttgtgttggtttggctcctgagaacaacatgatcctcgaatacaagtga

SEQ ID NO: 149735 - protein, 512 aa, Mesembryanthemum crystallinum; identical to SEQ ID NO: 142866

SEQ ID NO: 149736 - DNA, 1533 bp, Nicotiana paniculata
  CDS (1)..(1533)
atgtttattgagaattttaaggttgagagccccaacgttaagtacaccgaaagtgaaattcactctgtctatgattatcaaaccactgagttagttcatgatgagaaaaatgggacatatcaatggaccgtcaagcctaagactgtcaaatatgagttcaagactgatgttcatgttcccaaattaggggttatgcttgttggatggggtggaaacaatggttcaaccttgaccggtggtgttattgctaacagagaaggaatttcatgggccaccaaagataaggtgcaacaagccaattactttggctctcttactcaggcttctactattcgagttgggtctttcaatggagaagagatctatgctccatttaaaagcctccttccaatggtcaatccagatgacgtagtgtttggaggatgggacatcagcgacatgaatttagcagatgccatggccagggctaaggtatttgatattgatctacaaaagcagttgaggccctacatggaatctatggtcccactccctggtatctatgaccctgatttcattgctgctaaccaagggtcacgtgccaacaacgtgatcaaaggaaccaagaaagaacaaattgatcaaatcattaaggatattagggagtttaaggaaaagaacaaagtggacaaggtggtagtattgtggactgctaacactgaaagatacagtaatgtggttgttggacttaatgacactatggaaaacctctttgcttctgtggacagaaatgaagctgaaatatctccttccactttgtatgctattgcctgcattcttgaaaatgtgccttttattaatggaagcccccagaacacctttgtcccaggcctcattgatttggccatcaagaagaacacattgattggtggtgatgactttaagagtggtcaaaccaaaatgaagtcagtgctggttgatttccttgttggagctggtattaagccaacatcaattgtgagctacaaccatttgggtaacaatgatggaatgaatctgtctgcccctcaaactttccggtcaaaggagatctcgaaaagtaatgttgttgatgacatggtttcaagcaatgccatcctttatgagcctggagagcaccctgaccatgttgttgtgattaagtatgtgccatatgtgggagacagcaagagggcaatggatgagtacacatctgagattttcatggggggaaagaacaccattgttttgcacaatacttgtgaggattcacttttagctgctccaattatattggatttggtccttcttgctgaactcagtacccgcattcagctcaaagctgaaggagagggtaagttccactccttccaccccgtggctactatcctcagctaccttaccaaggctcctctggtaccaccaggtacaccagtggtgaatgcactctcaaagcagagggcaatgcttgagaacatattgagggcttgtgttggacttgcaccagagaacaacatgattctggaatacaaatga

SEQ ID NO: 149737 - protein, 510 aa, Nicotiana paniculata; identical to SEQ ID NO: 142868

SEQ ID NO: 149738 - DNA, 1536 bp, Phaseolus vulgaris
  CDS (1)..(1536)
atgtttattgagagcttcaaagttgagagcccgaacgtgaagtacacagagaatgagattcactctgtgtacgattacgagacgacggaggttgttcatgagaagaccgtcaatggcacttaccaatggattgtgaagccaaagactgtcaaatacgatttcaaaaccgatattcgtgtccccaaattaggggttatgcttgtgggtttgggaggaaacaatggatcaactctcaccgctggcgtgattgcgaacaaagaaggaatctcgtgggcaacgaaggacaaagtgcaacaagcgaattacttcgggtcactaactcaagcttcatcgattcgtgtcggatcttttaacggtgaagagatctatgctcctttcaagagtctccttccaatggtgaatccggatgatgttgtgtttggaggatgggatataagtgacatgaacttagcagatgccatggctagagccagggttcttgatatcgacttgcagaaacagctcaggccttacatggagaacattgtgccactccctgggatcttcgatcctgatttcatagctgctaatcaagggtcacgtgctaaccacgtgatcaaaggtaccaagaaggaacaagtcgaccacatcatcaaggacatgagggagtttaaggagaagaataaggtggataaggttgtggttctctggacggctaacacagagcgttatagcaatgaggtcgttgggatgaacgatacaatggaggatctcatggagtctgtggatagggatgaggctgagatctctccttcaacactttatgcgattgcttgtgttcttgagggaatcccgttcatcaatggaagccctcaacacacctttgttccaggtctaattgatatggcgatcaggaacaatgttttgatcggtggagatgatttcaagagtggtcaaaccaagatgaaatctgtcttgggtgatttcctagttggcgcaggaatcaagcctacttcaattgtgagctacaatcacttgggcaacaacgatggaatgaatctctcagctccacagactttcagatctaaggagatctcgaaaagcaatgtcgtggacgatatggtcgctagcaatggtatcctctttgagcctggggaacacccggaccatgttgttgtcatcaagtatgtaccgtatgttgcggatagtaagcgagccatggacgagtacacatcagagatattcatgggagggaagaacacaattgtgatgcacaatacctgcgaggactctctcttagctgctccaatcatcttggatcttgttctcctcgcggagctcagcaccaggatccagttcaaatccgagggagagggaaagtttcactctttccatcctgtggccaccatactcagctacctcaccaaggcaccacttgtaccgccaggaactccggtgattaacgcactgtcgaagcagcgggctatgctggagaatattatgagggcgtgcgttggactggctccggagaacaacatgatcatggaattcaagtga

SEQ ID NO: 149739 - protein, 511 aa, Phaseolus vulgaris; identical to SEQ ID NO: 142870

SEQ ID NO: 149740 - DNA, 1533 bp, Sesamum indicum
  CDS (1)..(1533)
atgttcatcgagagcttcaaggttgagagccccaatgtcaagtacaccgagggtgagattcactctgtctacaactacgagactacagagcttgttcatgagagcagaaacggcacctaccaatggattgtcaagcccaagactgtcaaatacgagttcaaaactgatactcatgtccccaaattaggggtcatgcttgttggatggggagggaacaatggttcaactctcactggcggtgtcattgcaaacagggaagggatttcatgggcaacaaaggataaggtgcaacaggccaattattttgggtcactgacacaggcatcctcaatcagagttggttccttcaatggagaagagatctatgcccccttcaaaagccttcttcccatggtcaacccagatgacgtagtgtttgggggatgggacatcagcaatatgaatttggctgatgccatgggcagggccaaggtgttagatattgatctccagaagcagctcaggccctacatggagcacatggtcccactccctggaatctacgatcctgatttcatagccgccaatcagggatcacgtgccaacaacgtgattaaaggaaccaagaaagaacaagttcaacagatcatcaaagacatgagggactttaaggagcaaaataaggtggacaaggtcgtagtgctgtggacagccaacacagaaagatacagtaatgttgtcgttgggctaaacgatacagccgaaagcctgatggcctcggtagagaggaatgaggccgagatatctccttcaaccttgtatgccatagcttgtgtttttgaaaatgttccgttcattaatggcagcccacaaaatacttttgttccagggttgattgatttggcgattcagaggaacagtttgattggtggagatgatttcaagagcggtcaaaccaagatgaaatcagtgctagttgatttccttgttggagctggtatcaagccaacgtcgattgtgagctataatcatctgggaaacaacgacgggatgaatctatcagcaccccaaactttccggtccaaagagatttctaaaagcaatgtggtagacgacatggttgccagcaacggcatcctttatgagcctggtgaacaccccgaccatattgttgtcatcaagtatgtaccgtatgtgggggacagcaagagagcaatggacgagtacacttcggagatattcatgggagggaaaagtaccatagttctgcacaacacgtgtgaggactctcttctggctgctcccatcatcctggatttggtcctcctagctgaactcagcactcgtattcagctcaaagccgagggagagggcaaattccattcgttccacccggtggcaaccatcctcagctacctaaccaaagcccctcttgtacctccaggcacaccggtcgtcaacgcactgtctaagcagcgtgccatgctcgagaacatcttgagggcttgtgttggattggctccagaaaacaatatgattttggaatacaagtga

SEQ ID NO: 149741 - protein, 510 aa, Sesamum indicum; identical to SEQ ID NO: 142872

SEQ ID NO: 149742 - DNA, 1533 bp, Spirodela polyrrhiza
  CDS (1)..(1533)
atgttcatcgagaagttccgggtggagagcccgaacgtgaagtatggggatggagagatcgagtctgtgtacagttacgagacgacggagctggtccacgaggtgaggaacggctcctaccagtgggtcgtcaagcccaagtccgtgcagtatcagttcaagaccgacacccgtgtccccaggctcggagtgatgctggttggatggggcgggaacaacgggtcgaccctgacggcgggagtcattgcgaatcgagaggggatctcgtgggtgaccaaggagaaggtccagcaggccaactacttcggctccctcacacaatcttcctccatccgggtgggctccttcaacggggaggagatctacgcccctttcaagagcctccttcccatggtgaacccagatgagatagtgttcggggggtgggacatcagtgacatgaacctggcagacgccatggggagggccaaggtgctggacatcgacctgcagaagcagctgcggccctacatggaaagcatggtgcccctcccaggcatctacaatccggacttcattgccgccaaccagggctcccgggccaacaacgtcatcaagggccccaagaagcagcaggtccagcgcatcatcgacgacatcagggagttcaaggagagggagaaggtggagaaggtggtggtgctgtggacggccaacacggagcgctacagcgacctggtcgtcggcctcaacgacaccatggagaacctcctggcggcggtggagagggacgaggcggagatctctccctcctcgctctacgccctcgcctgcatcatggagggcgtccccttcgtcaacggcagcccccagaacaccttcgtccccggtctgatcgagatggccatcaagaggaacagcctcatcggaggggacgacttcaagagcgggcagaccaagatgaagtccgtcctggtcgatttcctcgtcggcgcggggatcaagccgacgtcgatcgtcagctacaaccatctcggcaacaacgatgggatgaacctctccgctccgcagaccttccggtccaaggagatctccaagagcaacgtagttgacgacatggtctccagcaatggaatcctctacgagcccggcgagcaccctgatcacgtcatcgtgatcaagtacgtgccgtacgtcggggacagcaagagggctatggacgagtatacctctgagatctttatgggcgggaagagcaccatcatactccacaacacctgcgaggactcgctcttggcggcgcccatcatacttgatctcgtcctcctggcggagctgagcacaaggatccagctcaaagctgaaggggagagcaagttccactccttccacccagtagcctccattctgagctatctctccaaggcgccactggtgccaccagggacgccggtggtgaacgccttgtccaagcagagggcgatgctggagaacatcctgagggcctgcgtcggcctggccccggagaacaacatgatcttggagtacaagtga

SEQ ID NO: 149743 - protein, 510 aa, Spirodela polyrrhiza; identical to SEQ ID NO: 142874

SEQ ID NO: 149744 - DNA, 1533 bp, Nicotiana tabacum
  CDS (1)..(1533)
atgtttattgagaactttaaggttgagagccccaacgttaagtacaccgaaagtgagattcactctgtctatgattatcaaaccactgagttagttcatgaggagaaaaatgggacttaccaatggactgtcaagcctaagactgtcaaatatgagttcaagactgatgttcatgttcccaaattaggggttatgcttgttggatggggtggaaacaatggttcaaccttgaccggtggtgttattgctaacagagaaggaatttcatgggccaccaaagataaggtgcaacaagccaattactttggctctcttactcaggcttctactattcgagttgggtctttcaatggagaagagatctatgctccatttaaaagcctccttccaatggtcaatccagatgacgtagtgtttggaggatgggacatcagcggcatgaatttggcagatgccatggcaagggctaaggtatttgatattgatctacaaaagcagttgaggccctacatggaatctatggtcccactacctggtatctatgatcctgatttcattgctgctaaccaagggtcacgtgccaacaacgtgatcaaaggaaccaagaaagaacaaattgatcaaatcattaaggatattagggagtttaaggagaagaacaaagtggacaaggtggtagtcttgtggactgctaacactgaaagatacagtaatgtggttgttggacttaatgatactatggaaaatctctttgcttctgtggacagaaatgaagctgaaatatctccttccactttgtatgctattgcctgcattcttgaaaatgtgccttttattaatggaagcccacagaacacctttgtgccaggcctcattgatttggccatcaagaggaacacactgattggtggtgatgactttaagagtggtcaaaccaaaatgaagtcagtgctggttgatttccttgttggagctggtattaagccaacatcaattgtgagctacaaccatttgggtaacaatgatggaatgaatctgtctgcccctcaaactttccgctcaaaggagatctcgaaaagtaatgttgttgatgacatggtttcaagcaatgccattctttatgagcctggagagcaccctgaccatgttgttgtgattaagtatgtgccatatgtgggagacagcaaaagggcaatggatgagtacacatctgagattttcatgggaggaaagaacaccattgttttgcacaatacttgtgaggattctcttttggctgctccaattatcttggatttggtccttcttgctgaactcagtacccgcattcagctcaaagctgaaggagagggtaagttccactccttccaccccgtggctactatcctcagctaccttaccaaggctcctctggtaccaccaggtacaccagtggtgaatgcactctcaaagcagagggcaatgcttgagaacatattgagggcttgtgttggacttgcaccagagaacaacatgattctggaatacaaatga

SEQ ID NO: 149745 - protein, 510 aa, Nicotiana tabacum; identical to SEQ ID NO: 142876

SEQ ID NO: 149746 - DNA, 1533 bp, Triticum aestivum
  CDS (1)..(1533)
atgttcatcgagagcttcaaagttgagagcccaaacgtgaagtacacagagaacgagatccattctgtgtacgattacgaaaccacggaggtcgtccatgagaaccgtaacggcacttaccaatgggtcgtcaagcccaaaaccgtcaaatacgatttcaaaacagacactcgcgtccccaagctaggcgttatgctcgttggatggggaggaaacaatggatcaaccttaaccgctggagtgatcgccaacaaagaagggatctcgtgggcgactaaagacaaagtgcaacaagcaaactactttggctccctcactcaagcttcttcgatccgggtgggatcttacaatggtgaagagatctacgctcctttcaagagcctcctccccatggtgaaccctgacgatgttgtgtttggtggttgggacataagcgacatgaacttagcagacgctatggctagagcaagagtccttgacattgatctccagaaacagctcaggccgtacatggagcacatggtcccactccctggtatctacgaccctgacttcatcgctgcgaatcaagggtcacgtgctaatagcgtgatcaaaggtaccaagaaagaacaagtcgaccagatcatcaaagacatgagggagtttaaggagaagaacaaggtggataagctggttgttctgtggacagccaacacagagcgttacagcgatgtggtcgtagggcttaacgacacgatggagaatctattggcttctgttgagaagaacgagtctgagatctcgccttctacgctatatgcgattgcttgtgttcttgaaggcattcctttcattaatgggagtccgcagaacacgtttgttcctggactcatcgagctggctatatcgaagaactgtttgatcggtggggatgacttcaagagtggtcagactaagatgaagtctgttttggttgatttccttgtcggagctggcatcaagcctacttcgattgtgagctataatcatttgggaaacaatgacggcatgaacctctcagcgcctcagacttttagatctaaggagatctcaaagagcaatgttgttgacgacatggtggctagtaacggtatcctctttgagcctggtgaacatcctgaccatgttgtcgtcatcaagtatgttccttatgttggggatagtaagagagccatggacgagtacacctcggagatattcatgggagggaagaatacgattgttatgcataacacttgtgaggattctcttttggctgctccaatcatcttggatcttgttcttctcgctgagctcagcaccagaatccaattcaaagctgaaggggaggggaagtttcattctttccacccagtagcaaccatactcagttacctcacaaaggcacctcttgtaccagccgggacacctgtggtgaacgctctatctaagcagagggctatgctggagaacatcctcagggcctgcgttgggcttgcgccagagaacaacatgatcttggaatacaagtga

SEQ ID NO: 149747 - protein, 510 aa, Triticum aestivum; identical to SEQ ID NO: 142878

SEQ ID NO: 149748 - DNA, 1668 bp, Saccharomyces cerevisiae; identical to SEQ ID NO: 149632
  CDS (67)..(1668)

SEQ ID NO: 149749 - protein, 533 aa, Saccharomyces cerevisiae; identical to SEQ ID NO: 142880

SEQ ID NO: 149750 - DNA, 1533 bp, Arabidopsis thaliana; identical to SEQ ID NO: 142881
  CDS (1)..(1533)

SEQ ID NO: 149751 - protein, 510 aa, Arabidopsis thaliana; identical to SEQ ID NO: 142882

SEQ ID NO: 149752 - DNA, 1533 bp, Arabidopsis thaliana; identical to SEQ ID NO: 142753
  CDS (1)..(1533)

SEQ ID NO: 149753 - protein, 510 aa, Arabidopsis thaliana; identical to SEQ ID NO: 142754

SEQ ID NO: 149754 - DNA, 1533 bp, Oryza sativa
  CDS (1)..(1533)
atgttcatcgagagcttccgcgtggagagcccgcacgtgcggtacggcgcggcggagatcgagtcggactaccagtacgacacgacggagctggtgcacgagagccacgacggcgcctcccgctggatcgtccgccccaagtccgtccgctacaacttccggaccaccaccaccgtccccaagctcggggtgatgctcgtggggtggggcggcaacaacggctcaacgctgacggctggggtcatcgccaacagggagggaatctcatgggcgaccaaggacaaggtgcagcaagccaactactatggctcactcacccaggcgtccaccatcagggtcgggagctacaacggggaggagatctacgcgcccttcaagagcctcctgcccatggtgaaccctgatgaccttgtgttcgggggctgggacattagcaacatgaacctggctgatgctatgaccagggcaaaggtacttgacattgatctgcagaagcagctcagaccttacatggagtccatggtgcctctccccggcatctatgaccccgacttcatcgccgccaaccagggatcccgcgcgaacaatgtcatcaagggcaccaagaaggagcagatggagcagatcatcaaggacatcagggagttcaaggaaaagagcaaagtggacaaggtggtggtgttgtggactgcaaacactgaaaggtacagcaatgtctgtgttgggctcaatgacacaatggagaacctcctggcgtctgtggacaagaacgaggcggagatatcaccatcgacactgtatgccattgcctgcgtcatggagggtataccgttcattaacgggagtcctcagaacacctttgtgcctgggctgatcgatcttgctattaagaacaactgcctgattggtggtgatgatttcaagagtggacagacaaagatgaagtctgtcttggttgatttcctagttggtgctggaataaagcccacctcaattgtcagctacaaccacttggggaataatgatggcatgaacctttccgcacctcaaacattccgatccaaggagatctccaagagcaatgtggtcgatgacatggtctcaagcaatgccatcctctatgagcttggcgagcatcctgatcatgttgttgtgatcaagtatgtgccgtatgttggagacagcaagagggcaatggacgagtacacctcagagatcttcatggggggtaagagcaccatcgttctgcacaacacctgtgaggactcactccttgccgcgccgatcattcttgatctggtgctccttgccgagctcagcaccaggattcagctgaaagccgagggggaggagaagttccattccttccatccagtggctaccatcctgagctacctcaccaaggcaccccttgttcctcctggcacaccagtggtgaacgccctggcaaagcagagggcaatgcttgagaacatcatgagggcctgcgttgggctggcccccgagaacaacatgatcctggagtacaagtga

SEQ ID NO: 149755 - protein, 510 aa, Oryza sativa
MFIESFRVESPHVRYGAAEIESDYQYDTTELVHESHDGASRWIVRPKSVRYNFRTTTTVPKLGVMLVGWGGNNGSTLTAGVIANREGISWATKDKVQQANYYGSLTQASTIRVGSYNGEEIYAPFKSLLPMVNPDDLVFGGWDISNMNLADAMTRAKVLDIDLQKQLRPYMESMVPLPGIYDPDFIAANQGSRANNVIKGTKKEQMEQIIKDIREFKEKSKVDKVVVLWTANTERYSNVCVGLNDTMENLLASVDKNEAEISPSTLYAIACVMEGIPFINGSPQNTFVPGLIDLAIKNNCLIGGDDFKSGQTKMKSVLVDFLVGAGIKPTSIVSYNHLGNNDGMNLSAPQTFRSKEISKSNVVDDMVSSNAILYELGEHPDHVVVIKYVPYVGDSKRAMDEYTSEIFMGGKSTIVLHNTCEDSLLAAPIILDLVLLAELSTRIQLKAEGEEKFHSFHPVATILSYLTKAPLVPPGTPVVNALAKQRAMLENIMRACVGLAPENNMILEYK

SEQ ID NO: 149756 - DNA, 1530 bp, Oryza sativa; identical to SEQ ID NO: 142765
  CDS (1)..(1530)

SEQ ID NO: 149757 - protein, 509 aa, Oryza sativa; identical to SEQ ID NO: 142766

SEQ ID NO: 149758 - DNA, 1533 bp, Brassica napus; identical to SEQ ID NO: 142883
  CDS (1)..(1533)

SEQ ID NO: 149759 - protein, 510 aa, Brassica napus; identical to SEQ ID NO: 142884

SEQ ID NO: 149760 - DNA, 1533 bp, Brassica napus; identical to SEQ ID NO: 142885
  CDS (1)..(1533)

SEQ ID NO: 149761 - protein, 510 aa, Brassica napus; identical to SEQ ID NO: 142886

SEQ ID NO: 149762 - DNA, 1533 bp, Glycine max; identical to SEQ ID NO: 142887
  CDS (1)..(1533)

SEQ ID NO: 149763 - protein, 510 aa, Glycine max; identical to SEQ ID NO: 142888

SEQ ID NO: 149764 - DNA, 1533 bp, Glycine max; identical to SEQ ID NO: 142889
  CDS (1)..(1533)

SEQ ID NO: 149765 - protein, 510 aa, Glycine max; identical to SEQ ID NO: 142890

SEQ ID NO: 149766 - DNA, 1533 bp, Glycine max; identical to SEQ ID NO: 142891
  CDS (1)..(1533)

SEQ ID NO: 149767 - protein, 510 aa, Glycine max; identical to SEQ ID NO: 142892

SEQ ID NO: 149768 - DNA, 1533 bp, Zea mays; identical to SEQ ID NO: 142893
  CDS (1)..(1533)

SEQ ID NO: 149769 - protein, 510 aa, Zea mays; identical to SEQ ID NO: 142894

SEQ ID NO: 149770 - DNA, 1533 bp, Helianthus annuus; identical to SEQ ID NO: 142895
  CDS (1)..(1533)

SEQ ID NO: 149771 - protein, 510 aa, Helianthus annuus; identical to SEQ ID NO: 142896

SEQ ID NO: 149772 - DNA, 1533 bp, Brassica napus; identical to SEQ ID NO: 142897
  CDS (1)..(1533)

SEQ ID NO: 149773 - protein, 510 aa, Brassica napus; identical to SEQ ID NO: 142898

SEQ ID NO: 149774 - DNA, 1533 bp, Brassica napus; identical to SEQ ID NO: 142899
  CDS (1)..(1533)

SEQ ID NO: 149775 - protein, 510 aa, Brassica napus; identical to SEQ ID NO: 142900

SEQ ID NO: 149776 - DNA, 1533 bp, Brassica napus; identical to SEQ ID NO: 142901
  CDS (1)..(1533)

SEQ ID NO: 149777 - protein, 510 aa, Brassica napus; identical to SEQ ID NO: 142902

SEQ ID NO: 149778 - DNA, 1533 bp, Brassica napus; identical to SEQ ID NO: 142903
  CDS (1)..(1533)

SEQ ID NO: 149779 - protein, 510 aa, Brassica napus; identical to SEQ ID NO: 142904

SEQ ID NO: 149780 - DNA, 1533 bp, Glycine max; identical to SEQ ID NO: 142905
  CDS (1)..(1533)

SEQ ID NO: 149781 - protein, 510 aa, Glycine max; identical to SEQ ID NO: 142906

SEQ ID NO: 149782 - DNA, 1533 bp, Zea mays; identical to SEQ ID NO: 142907
  CDS (1)..(1533)

SEQ ID NO: 149783 - protein, 510 aa, Zea mays; identical to SEQ ID NO: 142908

SEQ ID NO: 149784 - DNA, 1533 bp, Zea mays
  CDS (1)..(1533)
atgttcttggagagcttccgggtggagagcccgcgggtgaagtacggcgacggcgagatccagtcggagtaccgctacgacaccaccgaagtcgtcccgccggggaatggcggcggcgcggggtgggtggtgcgcccaaagtccgtcacctacaacttcaagaccagcaccaacgtcccaaagctgggggtgatgctcgtcggatggggcggcaacaacgggacgacgctcacggccggggtgatcgccaacagggaagggatttcgtgggagacgaaagagaaggttcacaaggccaactacttcggctccctgacccaggcttccaccatcagggtcggctcccacaacggggaggaggtctacgcgcctttcaagagcctcgtgcctatggttgaccccaactctatcgtgtttggtggatgggacatcagcaagctgaacatggccgacgccatggccagggccaaggtcctagactttcacctccagaagcagctcaggccctacatggaatccatgctgccactccctggcattttcaacccagacttcgtcgccgcaaaccaaggtgcccgtgctgacaatgtcatcaagggcaccaagaaagagcaggtggagcagatcaagaaggacatcaaggagttcaaggaaaaaaacaaggtggacaaggtagtcgtgctgtggacggcgaacaccgagaggtacagcaacgtggttgcagggcttaacgacaccatggacaagctcctggcttcgttggacaagaacgaagcagagatctcgccatccaccttgtatgcgatagcctgtgtcctcgagggtgtcccgttcgtcaatggaagccctcagaacaccttcgtgcctgggctgatggagcttgccataaaaaagaattcggtgataggaggcgacgacttcaagagtgggcagaccaagatgaagtctgtgttggtcgatttcctcgtcggcgctgggattaagcccacctcaattgcaagctacaaccatctgggaaacaacgacggcatgaatctctctgccccacaagtcttccggtccaaagagatctccaagagcagcgtggtggacgacatggtcgctagcaatcccatcctctacaagcccggcgaacatccggatcacgtaatcgtgatcaagtacatcccctacgtgggtgacagcaagagggctatggacgagtatacctctgagatcttcatgggtggcaagaacaccatcgcgctgcacaacacctgcgaggactcgcttctcgccgcgcccatcatccttgacttggtgctcctagctgagctcagcactcggattcagctcaaggccgaagggcaggataagttccactccttccatcctgtcgccactattctgagctacctcagcaaggctcctcttgtacctcctggcacaccagtggtgaatgctctagccaagcagagggccatgctggaaaacatcttgcgggcctgcattggccttgcccctgagaacaacatgatgcttgagcacaagtga

SEQ ID NO: 149785 - protein, 510 aa, Zea mays; identical to SEQ ID NO: 142760

SEQ ID NO: 149786 - DNA, 1533 bp, Zea mays; identical to SEQ ID NO: 142909
  CDS (1)..(1533)

SEQ ID NO: 149787 - protein, 510 aa, Zea mays; identical to SEQ ID NO: 142910

SEQ ID NO: 149788 - DNA, 1533 bp, Zea mays; identical to SEQ ID NO: 142911
  CDS (1)..(1533)

SEQ ID NO: 149789 - protein, 510 aa, Zea mays; identical to SEQ ID NO: 142912

SEQ ID NO: 149790 - DNA, 28 bp, Artificial sequence
  primer
atgttagttttatccttgatttattctg

SEQ ID NO: 149791 - DNA, 26 bp, Artificial sequence
  primer
ttacaacaatctctcttcgaatctta

SEQ ID NO: 149792 - protein, 584 aa, Artificial sequence
  consensus sequence
  Variant (2)..(6): Xaa in position 2 to 6 is any amino acid
  Variant (7)..(35): Xaa in position 7 to 35 is any or no amino acid
  Variant (37)..(37): Xaa in position 37 is any amino acid
  Variant (40)..(40): Xaa in position 40 is any amino acid
  Variant (42)..(42): Xaa in position 42 is any amino acid
  Variant (44)..(46): Xaa in position 44 to 46 is any amino acid
  Variant (49)..(51): Xaa in position 49 to 51 is any amino acid
  Variant (53)..(53): Xaa in position 53 is any amino acid
  Variant (55)..(55): Xaa in position 55 is any amino acid
  Variant (58)..(67): Xaa in position 58 to 67 is any amino acid
  Variant (68)..(73): Xaa in position 68 to 73 is any or no amino acid
  Variant (75)..(75): Xaa in position 75 is any amino acid
  Variant (77)..(79): Xaa in position 77 to 79 is any amino acid
  Variant (80)..(80): Xaa in position 80 is any or no amino acid
  Variant (82)..(82): Xaa in position 82 is any amino acid
  Variant (84)..(88): Xaa in position 84 to 88 is any amino acid
  Variant (91)..(91): Xaa in position 91 is any amino acid
  Variant (95)..(95): Xaa in position 95 is any amino acid
  Variant (100)..(100): Xaa in position 100 is any amino acid
  Variant (106)..(106): Xaa in position 106 is any amino acid
  Variant (108)..(108): Xaa in position 108 is any amino acid
  Variant (110)..(111): Xaa in position 110 to 111 is any amino acid
  Variant (113)..(113): Xaa in position 113 is any amino acid
  Variant (116)..(120): Xaa in position 116 to 120 is any amino acid
  Variant (122)..(122): Xaa in position 122 is any amino acid
  Variant (124)..(125): Xaa in position 124 to 125 is any amino acid
  Variant (127)..(131): Xaa in position 127 to 131 is any amino acid
  Variant (135)..(135): Xaa in position 135 is any amino acid
  Variant (141)..(141): Xaa in position 141 is any amino acid
  Variant (143)..(146): Xaa in position 143 to 146 is any amino acid
  Variant (148)..(148): Xaa in position 148 is any amino acid
  Variant (149)..(152): Xaa in position 149 to 152 is any or no amino acid
  Variant (155)..(156): Xaa in position 155 to 156 is any amino acid
  Variant (158)..(158): Xaa in position 158 is any amino acid
  Variant (161)..(163): Xaa in position 161 to 163 is any amino acid
  Variant (168)..(168): Xaa in position 168 is any amino acid
  Variant (170)..(170): Xaa in position 170 is any amino acid
  Variant (172)..(172): Xaa in position 172 is any amino acid
  Variant (174)..(174): Xaa in position 174 is any amino acid
  Variant (181)..(182): Xaa in position 181 to 182 is any amino acid
  Variant (189)..(189): Xaa in position 189 is any amino acid
  Variant (192)..(192): Xaa in position 192 is any amino acid
  Variant (194)..(197): Xaa in position 194 to 197 is any amino acid
  Variant (200)..(200): Xaa in position 200 is any amino acid
  Variant (204)..(205): Xaa in position 204 to 205 is any amino acid
  Variant (207)..(210): Xaa in position 207 to 210 is any amino acid
  Variant (214)..(215): Xaa in position 214 to 215 is any amino acid
  Variant (217)..(217): Xaa in position 217 is any amino acid
  Variant (226)..(227): Xaa in position 226 to 227 is any amino acid
  Variant (230)..(232): Xaa in position 230 to 232 is any amino acid
  Variant (234)..(234): Xaa in position 234 is any amino acid
  Variant (236)..(236): Xaa in position 236 is any amino acid
  Variant (238)..(246): Xaa in position 238 to 246 is any amino acid
  Variant (247)..(256): Xaa in position 247 to 256 is any or no amino acid
  Variant (259)..(260): Xaa in position 259 to 260 is any amino acid
  Variant (263)..(267): Xaa in position 263 to 267 is any amino acid
  Variant (270)..(271): Xaa in position 270 to 271 is any amino acid
  Variant (282)..(285): Xaa in position 282 to 285 is any amino acid
  Variant (286)..(290): Xaa in position 286 to 290 is any or no amino acid
  Variant (292)..(292): Xaa in position 292 is any amino acid
  Variant (296)..(297): Xaa in position 296 to 297 is any amino acid
  Variant (300)..(308): Xaa in position 300 to 308 is any amino acid
  Variant (309)..(310): Xaa in position 309 to 310 is any or no amino acid
  Variant (312)..(312): Xaa in position 312 is any amino acid
  Variant (317)..(318): Xaa in position 317 to 318 is any amino acid
  Variant (320)..(320): Xaa in position 320 is any amino acid
  Variant (322)..(324): Xaa in position 322 to 324 is any amino acid
  Variant (325)..(325): Xaa in position 325 is any or no amino acid
  Variant (327)..(328): Xaa in position 327 to 328 is any amino acid
  Variant (330)..(330): Xaa in position 330 is any amino acid
  Variant (343)..(343): Xaa in position 343 is any amino acid
  Variant (345)..(345): Xaa in position 345 is any amino acid
  Variant (348)..(353): Xaa in position 348 to 353 is any amino acid
  Variant (354)..(354): Xaa in position 354 is any or no amino acid
  Variant (367)..(367): Xaa in position 367 is any amino acid
  Variant (377)..(377): Xaa in position 377 is any amino acid
  Variant (383)..(383): Xaa in position 383 is any amino acid
  Variant (386)..(386): Xaa in position 386 is any amino acid
  Variant (397)..(397): Xaa in position 397 is any amino acid
  Variant (404)..(404): Xaa in position 404 is any amino acid
  Variant (414)..(414): Xaa in position 414 is any amino acid
  Variant (421)..(421): Xaa in position 421 is any amino acid
  Variant (424)..(424): Xaa in position 424 is any amino acid
  Variant (427)..(427): Xaa in position 427 is any amino acid
  Variant (428)..(443): Xaa in position 428 to 443 is any or no amino acid
  Variant (446)..(446): Xaa in position 446 is any amino acid
  Variant (450)..(451): Xaa in position 450 to 451 is any amino acid
  Variant (456)..(456): Xaa in position 456 is any amino acid
  Variant (458)..(458): Xaa in position 458 is any amino acid
  Variant (470)..(470): Xaa in position 470 is any amino acid
  Variant (474)..(474): Xaa in position 474 is any amino acid
  Variant (478)..(479): Xaa in position 478 to 479 is any amino acid
  Variant (482)..(483): Xaa in position 482 to 483 is any amino acid
  Variant (486)..(486): Xaa in position 486 is any amino acid
  Variant (494)..(494): Xaa in position 494 is any amino acid
  Variant (496)..(496): Xaa in position 496 is any amino acid
  Variant (502)..(502): Xaa in position 502 is any amino acid
  Variant (506)..(507): Xaa in position 506 to 507 is any amino acid
  Variant (511)..(512): Xaa in position 511 to 512 is any amino acid
  Variant (514)..(514): Xaa in position 514 is any amino acid
  Variant (515)..(529): Xaa in position 515 to 529 is any or no amino acid
  Variant (532)..(532): Xaa in position 532 is any amino acid
  Variant (534)..(536): Xaa in position 534 to 536 is any amino acid
  Variant (540)..(541): Xaa in position 540 to 541 is any amino acid
  Variant (551)..(552): Xaa in position 551 to 552 is any amino acid
  Variant (553)..(554): Xaa in position 553 to 554 is any or no amino acid
  Variant (557)..(557): Xaa in position 557 is any amino acid
  Variant (559)..(559): Xaa in position 559 is any amino acid
  Variant (564)..(564): Xaa in position 564 is any amino acid
  Variant (568)..(569): Xaa in position 568 to 569 is any amino acid
  Variant (573)..(573): Xaa in position 573 is any amino acid
  Variant (576)..(576): Xaa in position 576 is any amino acid
  Variant (578)..(578): Xaa in position 578 is any amino acid
  Variant (580)..(580): Xaa in position 580 is any amino acid
  Variant (582)..(582): Xaa in position 582 is any amino acid
MXXXXXXXXXXXXXXXXXXXXXXXXXXXXXXXXXXVXSPXVXYXXXEIXXXYXYXTTXXXXXXXXXXXXXXXXVXPXXXXYXFXXXXXVPXKLGXMLVGXGGNNGXTXTXXVXANXXXXXWXTXXKXXXXXANYXGSLTQXSXXXXGXXXXXGEXXYXPFXXXLPMVXPXDXVXGGWDISXXNLADAMXRAXVXXXXLQXQLRXXMXXXXPLPXXYXPDFIAANQXXRAXXXIXGXKXXXXXXXXXXXXXXXXXXXDIXXFKXXXXXDKXXVLWTANTERYXXXXXXXXXGXNDTXXNLXXXXXXXXXXXEXSPSTXXAXAXXXXEXXPXINGSPQNTFVPGXIXLAXXXXXXXIGGDDFKSGQTKXKSVLVDFLVXAGIKPXSIXSYNHLGNNDGXNLSAPQXFRSKEISKSXVVDDMVXSNXILXXXXXXXXXXXXXXXXXGEXPDHXXVIKYXPXVGDSKRAMDEYXSEIXMGGXXTIXXHNXCEDSLLAXPXILDLVXLAEXXTRIXXKXXXXXXXXXXXXXXXXFHXVXXXLSYXXKAPLVPPGTXXXXVNXLXKQRAXLENXXRACXGLXPXNXMXLE

SEQ ID NO: 149793 - protein, 22 aa, Artificial sequence
  protein pattern
  Variant (11)..(11): Xaa in position 11 is any amino acid
  Variant (17)..(17): Xaa in position 17 is any or no amino acid
  Variant (19)..(19): Xaa in position 19 is any or no amino acid
SYNHLGNNDGXNLSAPXQXFRS

SEQ ID NO: 149794 - protein, 36 aa, Artificial sequence
  protein pattern
  Variant (2)..(2): Xaa in position 2 is any amino acid
  Variant (4)..(4): Xaa in position 4 is Asp, Glu or Asn
  Variant (5)..(5): Xaa in position 5 is Asp, Glu or Ser
  Variant (6)..(6): Xaa in position 6 is Phe, Ile, Leu or Val
  Variant (8)..(8): Xaa in position 8 is any amino acid
  Variant (9)..(9): Xaa in position 9 is any or no amino acid
  Variant (11)..(11): Xaa in position 11 is any or no amino acid
  Variant (15)..(15): Xaa in position 15 is Asn or Ser
  Variant (16)..(17): Xaa in position 16 to 17 is any amino acid
  Variant (18)..(18): Xaa in position 18 is Asp, Asn, Pro or Ser
  Variant (19)..(19): Xaa in position 19 is Leu or Met
  Variant (20)..(21): Xaa in position 20 to 21 is any amino acid
  Variant (22)..(22): Xaa in position 22 is Ala or Ser
  Variant (24)..(24): Xaa in position 24 is any amino acid
  Variant (26)..(26): Xaa in position 26 is Ala or Ser
  Variant (27)..(27): Xaa in position 27 is any amino acid
  Variant (29)..(29): Xaa in position 29 is Phe or Leu
  Variant (30)..(30): Xaa in position 30 is Asp or Glu
  Variant (31)..(32): Xaa in position 31 to 32 is any amino acid
  Variant (34)..(34): Xaa in position 34 is any amino acid
  Variant (35)..(35): Xaa in position 35 is any or no amino acid
VXPXXXVXXGXWDIXXXXXXXXMXRXXVXXXXLXXQ

SEQ ID NO: 149795 - protein, 17 aa, Artificial sequence
  protein pattern
  Variant (2)..(3): Xaa in position 2 to 3 is any amino acid
  Variant (4)..(4): Xaa in position 4 is Pro or Thr
  Variant (5)..(5): Xaa in position 5 is Phe or Tyr
  Variant (16)..(16): Xaa in position 16 is any amino acid
EXXXXINGSPQNTFVXG

SEQ ID NO: 149796 - protein, 24 aa, Artificial sequence
  protein pattern
  Variant (6)..(6): Xaa in position 6 is Cys, Ser or Thr
  Variant (8)..(8): Xaa in position 8 is Phe, Ile, Leu or Val
  Variant (9)..(9): Xaa in position 9 is any amino acid
  Variant (10)..(10): Xaa in position 10 is Ala, Gly or Thr
  Variant (11)..(11): Xaa in position 11 is Ala, Gly, Ser or Thr
  Variant (12)..(12): Xaa in position 12 is any amino acid
  Variant (13)..(13): Xaa in position 13 is Ala, Ile or Leu
  Variant (16)..(16): Xaa in position 16 is Lys or Arg
  Variant (17)..(18): Xaa in position 17 to 18 is any amino acid
  Variant (19)..(19): Xaa in position 19 is Ile, Leu or Val
  Variant (20)..(20): Xaa in position 20 is any amino acid
  Variant (21)..(21): Xaa in position 21 is Phe or Trp
  Variant (22)..(22): Xaa in position 22 is any amino acid
GGNNGXTXXXXXXANXXXXXXXTK

SEQ ID NO: 149797 - protein, 16 aa, Artificial sequence
  protein pattern
  Variant (3)..(3): Xaa in position 3 is any or no amino acid
  Variant (5)..(6): Xaa in position 5 to 6 is any amino acid
  Variant (7)..(7): Xaa in position 7 is any or no amino acid
  Variant (15)..(15): Xaa in position 15 is Phe or Tyr
  Variant (16)..(16): Xaa in position 16 is Ala, Ser, Thr or Val
DKXVXXXWTANTERXX

SEQ ID NO: 149798 - protein, 21 aa, Artificial sequence
  protein pattern
  Variant (4)..(4): Xaa in position 4 is Gly or Ser
  Variant (5)..(5): Xaa in position 5 is Ile or Val
  Variant (6)..(6): Xaa in position 6 is Phe or Tyr
  Variant (7)..(7): Xaa in position 7 is any amino acid
  Variant (13)..(13): Xaa in position 13 is Ala or Leu
  Variant (16)..(16): Xaa in position 16 is Ala, Asp, Glu, Gly or Asn
  Variant (17)..(17): Xaa in position 17 is Asp, Glu or Ser
  Variant (20)..(20): Xaa in position 20 is any or no amino acid
PLPXXXXPDFIAXNQXXRAXN

SEQ ID NO: 149799 - protein, 25 aa, Artificial sequence
  protein pattern
  Variant (2)..(2): Xaa in position 2 is Ala, Asn or Ser
  Variant (6)..(6): Xaa in position 6 is any or no amino acid
  Variant (8)..(8): Xaa in position 8 is any or no amino acid
  Variant (10)..(12): Xaa in position 10 to 12 is any amino acid
  Variant (13)..(13): Xaa in position 13 is any or no amino acid
  Variant (15)..(16): Xaa in position 15 to 16 is any amino acid
  Variant (17)..(17): Xaa in position 17 is Ile, Leu or Val
  Variant (20)..(20): Xaa in position 20 is any amino acid
  Variant (21)..(21): Xaa in position 21 is Ala, Pro, Ser or Thr
  Variant (22)..(22): Xaa in position 22 is any amino acid
  Variant (23)..(23): Xaa in position 23 is Asp, Asn or Ser
  Variant (24)..(24): Xaa in position 24 is Asp, Glu or Asn
  Variant (25)..(25): Xaa in position 25 is Leu or Met
LXKQRXAXLXXXXRXXXGLXXXXXX

SEQ ID NO: 149800 - protein, 15 aa, Artificial sequence
  protein pattern
  Variant (2)..(2): Xaa in position 2 is Trp or Tyr
  Variant (3)..(3): Xaa in position 3 is Phe or Tyr
  Variant (6)..(6): Xaa in position 6 is Ile, Leu, Met or Val
  Variant (9)..(9): Xaa in position 9 is Ala, Cys or Ser
  Variant (11)..(11): Xaa in position 11 is Ala, Ser or Thr
  Variant (12)..(12): Xaa in position 12 is Ile, Leu or Val
  Variant (13)..(13): Xaa in position 13 is any amino acid
  Variant (14)..(14): Xaa in position 14 is Ile, Leu or Val
NXXGSXTQXSXXXXG

SEQ ID NO: 149801 - DNA, 7413 bp, Saccharomyces cerevisiae
  CDS (1)..(7413)
atggaaccgcatgaggagcagatttggaagagtaaacttttgaaagcggctaacaacgatatggacatggatagaaatgtgccgttggcaccgaatctgaatgtgaatatgaacatgaaaatgaatgcgagcaggaacggggatgaattcggtctgacttctagtaggtttgatggagtggtgattggcagtaatggggatgtaaattttaagcccattttggagaaaattttccgcgaattaaccagtgattacaaggaggaacgaaaattggccagtatttcattatttgatctactagtatccttggaacatgaattgtcgatagaagagttccaagcagtttcaaatgacataaacaataagattttggagctggtccatacaaaaaaaacgagcactagggtaggggctgttctatccatagacactttgatttcattctacgcatatactgaaaggttgcctaacgaaacttcacgactggctggttaccttcgagggctaataccttctaatgatgtagaggtcatgagactcgctgcaaagactctgggcaagttagccgttccaggaggtacatatacctctgatttcgtggaatttgagataaagtcttgcttagaatggcttactgcctccacggaaaagaattcattctcgagttcgaagccagaccatgctaaacatgctgcgcttctgattataacagcgttggcagagaattgtccttatttactctaccaatacttgaattccatactagataacatttggagagcactaagagacccacatttggtgatcagaattgatgcgtccattacattggccaaatgtctttccaccctacgaaatagggatcctcagttaactagccagtgggtgcagagattggctacaagttgtgaatacggatttcaagtaaacacattagaatgcatccatgcaagtttgttggtttataaggaaatcttgtttttgaaggatccctttttgaatcaagtgttcgaccaaatgtgtctaaattgcatagcttatgaaaatcataaagcgaaaatgattagagaaaagatttaccagattgttcccctattagcatcgttcaatcctcaattatttgctggcaaatatttgcaccaaattatggacaactatttagagattttaaccaatgctccagcaaataaaataccacatctcaaagatgacaaaccacagattttaatatcgattggtgatattgcatatgaagtcgggcccgatatcgcaccttatgtgaaacaaattcttgattatattgaacatgatttacagacgaaattcaaattcagaaagaaatttgaaaatgaaattttctactgcatcggaagattggcagttcccttgggccccgttctaggtaaattattaaacagaaatatactggacctgatgttcaaatgccctctttccgactatatgcaggaaacgtttcaaattctgactgagagaataccatcactaggccccaaaataaatgacgagttgcttaacctagtctgttcaaccttatctggaacaccatttatccagccagggtcaccaatggagataccatcgttttcgagagaaagagcaagagaatggagaaataaaaacatcctacagaaaactggtgaaagtaacgatgataataatgatataaaaatcattatacaagcttttagaatgttaaaaaatatcaaaagcagattttcgttggtggaattcgtgagaattgttgcactttcttacattgagcatacagatcccagagtaaggaaactagctgcgttgacatcttgtgaaatttacgtcaaggataacatctgcaaacaaacatcactacactctctgaacactgtatctgaagtgttatcaaagcttctagccattacgattgcggaccctttacaagatatccgtttagaagttttaaagaatcttaatccatgtttcgatccccagttggcacaaccagataatttgagactcttgtttactgcactgcacgatgagtcgttcaatattcagtcagtagcaatggagcttgtcggtaggttgtcttccgtaaaccctgcatacgtcatcccatcgataagaaaaatactactggaactgctaacaaaattaaaattctcaacttcttctcgagaaaaggaagaaactgccagtttgttatgtactcttatcaggtcgagtaaagatgttgcgaaaccttatatcgaacctcttttaaatgttcttttaccaaaattccaagatacctcttcaacggttgcatcaactgcactgagaactataggtgagctatctgttgtagggggcgaagatatgaagatatatcttaaggatttgtttcctttaattatcaaaacatttcaggatcaatcaaactctttcaagagagaagctgcacttaaggcccttggtcaacttgcagcctcatctggttacgtgatagatcctttactcgactatcccgaattattgggtatattggtgaatatattgaagacagaaaactctcaaaatattaggagacaaacagtcactttgataggtatactgggagctatcgacccatatcgccaaaaagaacgtgaggttacctctactaccgatatatctacagaacagaacgccccgcctatcgacattgctcttctcatgcagggcatgtctccttcgaatgatgagtattataccactgttgtcattcactgcctgctaaaaatcctaaaagatccatccctatcatcttaccacactgccgtgatccaagcgattatgcatatttttcaaacccttggtctaaaatgtgtttcattcttggaccagatcatcccaactattttggacgtaatgcgtacatgctctcagtcactattagaattttacttccaacagctttgctctttgattattatcgtaaggcaacacataagacctcatgtcgattctatattccaggctatcaaagatttttcttcggttgctaagctacaaataacgcttgtaagtgttattgaagcaatatcaaaggctctggagggtgaattcaaaagattggtccctcttactctgaccttgttccttgtaattttggagaatgacaagtctagtgacaaggtcctctccagaagggtattgagactgttagaatcgtttggtcctaacttagaaggttattcgcatttgattacacccaagatagttcaaatggcagaattcaccagcgggaacctacaaaggtctgcaataattactattggcaaactggccaaggatgttgacctttttgagatgtcctcaagaattgttcactctttacttagggtactaagttcaacaacgagtgacgaactctcaaaagtcattatgaatactttaagtctactgctaatacaaatgggcacatcctttgctatcttcatccctgtcattaatgaagttttaatgaagaaacatattcaacacacaatatatgatgacttgacaaacagaatattaaacaatgatgttttacccacaaaaattcttgaagcaaatacaacggattataagcccgcggaacaaatggaggcagcagatgctggggtcgcaaaattacctataaaccaatcagttttgaaaagtgcatggaattctagccaacaaagaactaaagaagattggcaggaatggagcaaacgtctatccattcaattattaaaagagtcaccctcccatgctctaagagcttgttcaaatcttgcaagcatgtattatccactagccaaagaactttttaataccgcattcgcatgtgtttggaccgaactttatagccaatatcaagaagatttaattgggtcattatgtatagccttatcttctcccttaaatccaccagaaatacatcaaacattgttaaacctggtagaatttatggaacacgatgacaaggcattaccaataccaactcaaagcctgggcgagtatgctgaaagatgtcacgcctatgccaaagcgctacattataaagagattaaatttattaaagagcctgagaactcaactattgaatcattgatcagcattaacaaccagctgaatcaaacggatgctgcaattggtatattaaagcatgcccaacaacatcattcacttcaattaaaggagacatggtttgaaaaattagagcgttgggaagatgcactacatgcttataatgaacgtgaaaaggcaggtgatacttccgtgagcgttacactcggtaagatgagatcccttcatgcccttggcgaatgggaacagttgtcgcaattggcagctagaaagtggaaagtttcgaagctacaaactaagaagctaatagctcccttggcagctggtgctgcgtgggggttgggagagtgggatatgcttgagcaatatatcagcgttatgaaacctaaatctccagataaggaattttttgatgcaattttatacttgcacaagaatgattacgacaatgctagtaagcatatattaaacgccagagatttgcttgtgactgaaatttccgcgttgatcaatgaaagttataatagagcatatagcgttattgttagaactcaaataataacagagtttgaggaaatcatcaagtataaacaattgccacctaattccgagaaaaaacttcactatcaaaatctttggacaaaaagactgctgggctgccaaaaaaatgtcgatttatggcaaagagtgcttagagtaagatcattggtaataaagcccaagcaagacctgcaaatatggataaaatttgcaaatttgtgcagaaaatctggtagaatgaggctagcaaataaggcattgaatatgctactagaaggaggcaacgatcctagtttaccaaatacgttcaaagctcctcccccagttgtttacgcgcaactaaaatatatttgggctacaggagcttataaagaagcattaaaccacttgataggatttacatccaggttagcgcatgatcttggtttggatccgaataatatgatcgcgcaaagtgtcaaactctcaagtgcaagtactgctccgtatgttgaggaatacacaaaattattagctcgatgttttttaaagcaaggtgagtggagaatagcaacacaaccgaactggagaaacacaaatccggatgcaattcttggttcttatctattggctacacatttcgataaaaattggtacaaggcatggcataattgggccttagctaattttgaagtaatatccatggttcaggaagagactaagctcaacggaggtaagaatgatgatgatgatgacacggcagttaataatgataatgtgcggattgacggtagtatcctaggaagtggttctttgactattaatggcaacagatacccgctagagcttattcaaagacatgttgttccagcgatcaagggcttttttcattcaatatctctattagaaacaagttgtttgcaagacacgttgaggttattgactcttttatttaactttggtggtattaaagaagtctcacaagccatgtatgaaggcttcaatttgatgaaaatagagaactggcttgaagtcttaccacagttgatctctcgtatacatcagccagatcctacggtgagtaattcccttttgtcgttgctttctgatttagggaaagctcatccacaagctctcgtgtatcctttaactgtcgcgatcaagtctgaatctgtttcaagacaaaaagcggctctttcaataatagagaaaattaggattcatagtccagtcctggtaaaccaggcagaattagttagtcacgagttgatcagagtagccgttctatggcacgaattatggtatgaaggactggaagatgcgagccgccaatttttcgttgaacataacatagaaaaaatgttttctactttagaacctttacataaacacttaggcaatgagcctcaaacgttaagtgaggtatcgtttcagaaatcatttggtagagatttgaacgatgcctacgaatggttgaataactacaaaaagtcaaaagacatcaataatttgaaccaagcttgggatatttattataacgtcttcagaaaaataacacgtcaaataccacagttacaaaccttagacttacagcatgtttctccccagcttctggctactcatgatctcgaattggctgttcctgggacatatttcccaggaaaacctaccattagaatagcgaagtttgagccattattttctgtgatctcttcgaagcaaaggccaagaaaattctccatcaagggtagcgacggtaaagattataaatacgttttaaagggacatgaagatataagacaagatagccttgttatgcaattatttggtctagttaacactttgttgaagaatgattcagagtgtttcaagagacatttggatatccaacaatacccggctattccattgtcgcctaaatctggtttactaggatgggtaccaaatagtgacacattccacgttttgatcagagaacaccgtgatgccaaaaaaattccgttgaacattgaacattgggttatgttacaaatggcccccgattatgagaatttgactcttttacaaaaaattgaagtattcacgtacgctttagataatacaaaaggccaagacctttataaaatattatggttaaagagtaggtcgtcagagacatggctagaacgtagaacaacttatacgagatctttagcagttatgtccatgactggttatattctgggactaggtgatcgccatccaagcaacctgatgctagatagaatcaccggtaaagttatccacattgatttcggcgattgttttgaagctgccatcttaagagaaaagtatccagaaaaagtgccatttagactaactaggatgttaacatacgcaatggaagttagtggaattgaaggcagtttccgaattacttgtgaaaatgtcatgagagtcttaagagataataaagaatcattaatggcgatcttggaagcttttgcgcttgatcctttgatccattggggatttgatttaccgccacaaaaacttactgagcaaactggaattcctttgccgttgattaatcctagtgaattattaaggaagggggcaattactgtcgaagaagcggcaaatatggaagcagaacaacaaaatgagaccaaaaacgccagagcaatgcttgttttgagacgtattacagataaattaacgggcaatgatatcaagaggttcaatgaattagacgtccctgagcaggttgataaactgatccaacaagccacttctattgaaaggttatgtcaacattatattggatggtgcccattctggtga

SEQ ID NO: 149802 - protein, 2470 aa, Saccharomyces cerevisiae
MEPHEEQIWKSKLLKAANNDMDMDRNVPLAPNLNVNMNMKMNASRNGDEFGLTSSRFDGVVIGSNGDVNFKPILEKIFRELTSDYKEERKLASISLFDLLVSLEHELSIEEFQAVSNDINNKILELVHTKKTSTRVGAVLSIDTLISFYAYTERLPNETSRLAGYLRGLIPSNDVEVMRLAAKTLGKLAVPGGTYTSDFVEFEIKSCLEWLTASTEKNSFSSSKPDHAKHAALLIITALAENCPYLLYQYLNSILDNIWRALRDPHLVIRIDASITLAKCLSTLRNRDPQLTSQWVQRLATSCEYGFQVNTLECIHASLLVYKEILFLKDPFLNQVFDQMCLNCIAYENHKAKMIREKIYQIVPLLASFNPQLFAGKYLHQIMDNYLEILTNAPANKIPHLKDDKPQILISIGDIAYEVGPDIAPYVKQILDYIEHDLQTKFKFRKKFENEIFYCIGRLAVPLGPVLGKLLNRNILDLMFKCPLSDYMQETFQILTERIPSLGPKINDELLNLVCSTLSGTPFIQPGSPMEIPSFSRERAREWRNKNILQKTGESNDDNNDIKIIIQAFRMLKNIKSRFSLVEFVRIVALSYIEHTDPRVRKLAALTSCEIYVKDNICKQTSLHSLNTVSEVLSKLLAITIADPLQDIRLEVLKNLNPCFDPQLAQPDNLRLLFTALHDESFNIQSVAMELVGRLSSVNPAYVIPSIRKILLELLTKLKFSTSSREKEETASLLCTLIRSSKDVAKPYIEPLLNVLLPKFQDTSSTVASTALRTIGELSVVGGEDMKIYLKDLFPLIIKTFQDQSNSFKREAALKALGQLAASSGYVIDPLLDYPELLGILVNILKTENSQNIRRQTVTLIGILGAIDPYRQKEREVTSTTDISTEQNAPPIDIALLMQGMSPSNDEYYTTVVIHCLLKILKDPSLSSYHTAVIQAIMHIFQTLGLKCVSFLDQIIPTILDVMRTCSQSLLEFYFQQLCSLIIIVRQHIRPHVDSIFQAIKDFSSVAKLQITLVSVIEAISKALEGEFKRLVPLTLTLFLVILENDKSSDKVLSRRVLRLLESFGPNLEGYSHLITPKIVQMAEFTSGNLQRSAIITIGKLAKDVDLFEMSSRIVHSLLRVLSSTTSDELSKVIMNTLSLLLIQMGTSFAIFIPVINEVLMKKHIQHTIYDDLTNRILNNDVLPTKILEANTTDYKPAEQMEAADAGVAKLPINQSVLKSAWNSSQQRTKEDWQEWSKRLSIQLLKESPSHALRACSNLASMYYPLAKELFNTAFACVWTELYSQYQEDLIGSLCIALSSPLNPPEIHQTLLNLVEFMEHDDKALPIPTQSLGEYAERCHAYAKALHYKEIKFIKEPENSTIESLISINNQLNQTDAAIGILKHAQQHHSLQLKETWFEKLERWEDALHAYNEREKAGDTSVSVTLGKMRSLHALGEWEQLSQLAARKWKVSKLQTKKLIAPLAAGAAWGLGEWDMLEQYISVMKPKSPDKEFFDAILYLHKNDYDNASKHILNARDLLVTEISALINESYNRAYSVIVRTQIITEFEEIIKYKQLPPNSEKKLHYQNLWTKRLLGCQKNVDLWQRVLRVRSLVIKPKQDLQIWIKFANLCRKSGRMRLANKALNMLLEGGNDPSLPNTFKAPPPVVYAQLKYIWATGAYKEALNHLIGFTSRLAHDLGLDPNNMIAQSVKLSSASTAPYVEEYTKLLARCFLKQGEWRIATQPNWRNTNPDAILGSYLLATHFDKNWYKAWHNWALANFEVISMVQEETKLNGGKNDDDDDTAVNNDNVRIDGSILGSGSLTINGNRYPLELIQRHVVPAIKGFFHSISLLETSCLQDTLRLLTLLFNFGGIKEVSQAMYEGFNLMKIENWLEVLPQLISRIHQPDPTVSNSLLSLLSDLGKAHPQALVYPLTVAIKSESVSRQKAALSIIEKIRIHSPVLVNQAELVSHELIRVAVLWHELWYEGLEDASRQFFVEHNIEKMFSTLEPLHKHLGNEPQTLSEVSFQKSFGRDLNDAYEWLNNYKKSKDINNLNQAWDIYYNVFRKITRQIPQLQTLDLQHVSPQLLATHDLELAVPGTYFPGKPTIRIAKFEPLFSVISSKQRPRKFSIKGSDGKDYKYVLKGHEDIRQDSLVMQLFGLVNTLLKNDSECFKRHLDIQQYPAIPLSPKSGLLGWVPNSDTFHVLIREHRDAKKIPLNIEHWVMLQMAPDYENLTLLQKIEVFTYALDNTKGQDLYKILWLKSRSSETWLERRTTYTRSLAVMSMTGYILGLGDRHPSNLMLDRITGKVIHIDFGDCFEAAILREKYPEKVPFRLTRMLTYAMEVSGIEGSFRITCENVMRVLRDNKESLMAILEAFALDPLIHWGFDLPPQKLTEQTGIPLPLINPSELLRKGAITVEEAANMEAEQQNETKNARAMLVLRRITDKLTGNDIKRFNELDVPEQVDKLIQQATSIERLCQHYIGWCPFW

SEQ ID NO: 149803 - DNA, 7446 bp, Arabidopsis thaliana
  CDS (1)..(7446)
atgtctacctcgtcgcaatcttttgtggctggacggcctgcatccatggcttccccttcgcaatcgcaccgcttttgtggtccctcagccaccgcttctggtggcggaagctttgacactttgaatcgtgtcatcgctgacctttgcagccgtggtaatcctaaggagggagctcctttagcgtttaggaaacacgtagaggaagcagttcgtgatcttagtggtgaagcttcctctaggttcatggagcaattatatgacaggattgctaatttaattgagagcactgatgtggcggaaaacatgggtgcactcagagccattgatgagttgacggagattggatttggtgagaatgctactaaggtttctagatttgcgggttacatgaggactgtgttcgagttgaagcgtgatcctgaaatcttggtgcttgctagtagagttttggggcaccttgctcgggcaggtggagcaatgacttctgatgaagtggagtttcagatgaaaacagcttttgattggcttcgcgtagacagggtggaatatcgtcgtttcgccgccgttttaatattaaaggagatggccgaaaatgcttctactgtctttaacgttcatgtccctgaatttgtggatgctatctgggttgcacttagggacccccagttgcaagtgcgagaacgagctgttgaagctttgcgtgcatgccttcgtgttattgagaaaagggagactcgatggcgagtgcagtggtactatcgaatgtttgaagctacacaggatgggttgggcagaaatgctccggttcacagtattcatggttctttacttgccgtgggggagctgttgaggaatacaggtgagttcatgatgtctaggtatagagaagttgccgaaattgtcctcagataccttgaacatcgtgatcgccttgttcgccttagcatcacctcgttactgcctcgcattgctcactttctccgtgaccggtttgtgacaaactatttaacgatatgcatgaatcatattcttactgtgttaagaataccggctgaaagagccagtgggttcatcgcccttggggaaatggctggtgctttggatggtgagcttatccattatttgccgacaattatgtctcatctgcgggatgcgattgctccacgtaaaggcagacctttgcttgaagctgtggcttgtgttggtaacatcgcaaaggcaatgggatccacagtggaaactcatgttcgagatcttttagatgttatgttttcatctagtctctcttccacacttgttgacgctcttgaccagataaccatcagcattccttctttgctgccaacagtacaagatcggcttctagattgcatttcgttggttctttcaaaatcccattattctcaagcaaagcctcctgttaccattgtccgaggtagtacagtgggcatggcaccacagtcttctgaccctagttgttcagctcaagttcaactagccctgcagactcttgctcgtttcaatttcaagggacatgatcttcttgaatttgctcgggagtcagttgttgtttatttggatgatgaggatgcagccacaagaaaagatgctgctttgtgttgttgcagactaattgcaaattctctttctggcatcacacaatttggctcgagcaggtcaacacgagcaggggggagacgcaggcgccttgtggaagagattgtggaaaagcttctcaggacagccgttgcagatgctgatgtaactgttcgcaaatctatattcgttgctttatttggcaaccaatgtttcgatgattatctagcacaggctgatagtttgactgccatttttgcttccttaaatgatgaggaccttgatgttcgagaatatgccatctcagttgctggaaggttatcggaaaaaaatccagcatacgtacttccagcacttcgtcgccatcttatacagttgttgacctatcttgagctgagtgcagataacaagtgcagggaagagagtgcaaagctccttggttgtttagttcgaaattgtgaacggctcattcttccatacgtagcccctgtccaaaaggcacttgttgcgagacttagtgaaggaactggagtgaatgctaacaataatattgtcactggagttctcgtaactgttggggatcttgcaagagtgggtggcttggcaatgagacaatatattccggagctgatgcctttaattgttgaagctttaatggatggagctgctgtagcaaaacgtgaggtggctgtttctactcttggtcaagttgttcaaagtacagggtatgttgtgactccatacaaggaatacccattgttgcttgggttactcttgaaattgctgaagggtgacttagtgtggtctaccagacgagaagtgctcaaggttcttggaattatgggcgctttggatcctcatgtgcataaacgtaaccaacaaagtttatcaggatcacatggtgaagttcctcgcggcactggtgattctggtcaacctattccatcaattgatgagttacctgtcgaactccggccgtcatttgctacatctgaggattattactcaacggttgctatcaactcgcttatgcgaattcttagagatgcatcacttcttagttaccacaaaagggttgttagatctctgatgatcattttcaagtcaatgggattgggatgcgtgccttacttgccgaaggttttacctgagctttttcacactgttcgaacatctgatgagaacctgaaggacttcattacgtggggtcttgggactcttgtttccattgttcgccagcacatacgcaagtatctgccagagctgctttcattagtctctgaactatggtcatccttcaccttgcccggtcccatacgcccatcacgtggtcttccggttctgcatctactggaacatctttgcttggcacttaatgatgaattcagaacttatcttccagtcatccttccatgtttcatccaagtattaggtgacgccgagcggtttaatgattacacctatgttcctgatattctccacacactcgaagtgtttggcggaactcttgatgagcacatgcatttactccttccggcacttattcgattgtttaaagtagatgctcctgtagctataagacgcgatgccatcaaaactttgacaagagtaatcccgtgtgttcaggttactggtcatatctccgctctcgtgcatcacttgaagctagtattagatgggaagaatgatgagttgcggaaagatgctgtcgatgcactatgctgtttggctcatgcacttggagaggacttcaccatattcattgaatcaattcacaagcttttattgaagcatcgattgcggcataaagaatttgaggaaattcatgctcgctggcggagacgtgaaccattgattgtagctacaactgcaacccaacaattaagtaggcgactgccagttgaggttatcagggatcctgtaattgagaatgagatcgatcctttcgaagaaggaactgacagaaaccatcaggttaatgatggtagactacggacagctggagaagcttctcaacgcagcaccaaagaagattgggaggaatggatgagacattttagtattgaattacttaaggagtctccctctccagcattaagaacttgtgcaaaacttgctcagttgcagccatttgtcgggagagagttgtttgctgctggctttgtcagttgctgggcacagctaaacgagtctagccaaaagcagttagttaggagcttggaaatggccttttcatctccaaatatccctccagaaattttagctacactactcaatttggcagagtttatggaacatgatgagaagcctcttcccattgatattcgtcttctgggggctcttgctgaaaagtgccgtgtttttgccaaagctctgcattataaagagatggaatttgaaggtccacgatccaagaggatggatgccaacccagttgctgttgtcgaggctcttatacacataaataatcagttacaccagcatgaggctgctgtcggtatactaacctatgctcaacaacatcttgatgtgcaattaaaagaatcatggtatgagaagctgcagcgctgggacgatgcactcaaggcgtacactttgaaagcatctcaaacaacaaatcctcatcttgtattagaagccacattaggacaaatgagatgtcttgctgcacttgcacgatgggaagagctcaacaatctctgcaaagagtactggagtcctgctgagccatctgcgcgtctggaaatggcaccaatggctgcacaagctgcatggaacatgggagagtgggatcaaatggccgaatatgtgtctcggctagatgatggtgatgaaacaaagcttcggggtttagcaagcccggtttctagtggcgatgggagcagtaatggcacattcttcagggctgttctgttagttcgaagggcaaagtacgacgaggcacgcgaatatgtggaaagagctagaaaatgtcttgccacagaacttgcagcgctggttttggagagctatgagcgtgcgtacagcaatatggttcgtgttcagcagctgtcagaactagaggaggtaattgaatattatacgctgcctgtgggaaatactattgccgaagaacggagagctctaattcgtaatatgtggactcagcggattcagggatctaagcgtaatgtggaggtgtggcaagcacttttggctgtccgggcacttgtgctacctcctacagaagatgtggaaacttggctcaagtttgcctcgctttgtcgaaagagtgggaggatcagtcaggcgaaatctactctactcaagctcttaccgtttgatccagaagtatcaccagaaaacatgcaatatcacggacctccacaagtgatgcttggatacttaaaataccaatggtcacttggagaggaacgtaagcgcaaagaggcatttaccaagctgcagattctaacgagagagctctcaagtgtgccacattctcaatctgacatactggctagcatggtatctagcaagggcgcaaatgttccacttcttgcacgtgtaaatctcaaactgggaacgtggcagtgggcactttcttccggtttgaatgatgggtctattcaagaaattcgtgatgcgtttgacaaatctacttgctatgctcctaaatgggctaaagcatggcacacatgggcattattcaatacagcagtgatgtcgcattacatttcaagaggtcaaattgcttcccagtacgttgtttctgcagtcactggatatttttattctatagcatgtgcagcaaatgccaaaggagttgatgatagtttacaggacatactgcgtcttctgacattgtggttcaaccatggagctacagctgatgtccaaaccgcattgaagacaggattcagtcatgtcaacattaacacatggcttgttgtgctacctcaaatcattgctaggatacattctaataatcgtgctgtcagggaactgattcagtctcttctcatccgcataggcgaaaaccacccacaggctctgatgtatccccttctcgttgcatgtaaatcaataagcaatcttcggagagctgcggctcaagaggtggttgataaagttcgccagcacagtggtgcactcgtggatcaggcgcaacttgtatcacatgaacttatcagggttgccatactttggcatgaaatgtggcatgaagcactagaagaagctagtcgcttgtattttggtgaacataacattgaaggcatgctgaaagtacttgaacccttacatgacatgctcgacgaaggtgtaaaaaaggacagtacgaccatacaggaaagagcatttatagaggcataccgtcacgaactaaaagaggcacatgaatgctgttgcaattacaagataactgggaaagatgctgaacttacacaggcttgggatctttactatcacgttttcaaacggattgacaaacagctagccagtctcacgacattggatttggaatctgtttctcctgagttgctgctgtgccgtgacttggagctagcagttcctggaacatatcgtgcagatgcccccgtcgtgactatatcatctttttcacgccaacttgttgttataacctctaaacaaagaccaaggaaattgactattcacggaaatgacggtgaggactacgccttcttgttgaagggacatgaagatttaaggcaagatgagcgtgttatgcagctttttggtttggtgaacactttgcttgagaattccagaaaaacagccgaaaaagatctttccattcaacgctattctgtaataccactatctcccaatagtggactcatcggatgggttccgaactgcgatacccttcaccatcttattcgagagcacagagatgcaagaaagatcattcttaatcaagaaaataagcatatgttgagttttgctccagactatgacaatctaccgcttatagcaaaggttgaagtatttgagtatgctctagaaaacacagagggaaatgatctatccagggttctctggttaaaaagtcgctcgtcagaagtttggctagaaagaagaacaaactatactagaagtttagcagttatgagtatggttggttatattcttgggttaggtgatcgacacccaagtaaccttatgcttcatagatacagtggaaagatcttgcatattgattttggagattgttttgaggcttctatgaatagagagaagtttcctgaaaaggttccattccgcctgacaagaatgcttgtcaaagcaatggaagtcagtggcattgaaggaaacttccgctcaacctgcgaaaacgttatgcaagttctcagaaccaataaagatagtgtaatggcaatgatggaagcgtttgtacatgatcctttaatcaattggcgtcttttcaatttcaatgaagtcccccaattagcactgctcggtaacaacaaccccaatgctcctgctgatgttgagcctgacgaagaagatgaagatcccgctgatatagatcttcctcagcctcaaaggagtactcgagagaaggagattcttcaggctgtaaatatgcttggagatgctaatgaagttttaaatgagcgtgccgtagttgttatggcacgtatgagtcataagcttacagggcgtgatttttcttcgtctgcaattccgagcaatcccattgctgatcataataacttgctcggaggagattctcatgaagtcgaacatggtttgtctgtgaaagttcaggttcaaaaactaatcaatcaagccacttcccatgagaatctctgtcaaaactatgttgggtggtgccctttctggtga

SEQ ID NO: 149804 - protein, 2481 aa, Arabidopsis thaliana
MSTSSQSFVAGRPASMASPSQSHRFCGPSATASGGGSFDTLNRVIADLCSRGNPKEGAPLAFRKHVEEAVRDLSGEASSRFMEQLYDRIANLIESTDVAENMGALRAIDELTEIGFGENATKVSRFAGYMRTVFELKRDPEILVLASRVLGHLARAGGAMTSDEVEFQMKTAFDWLRVDRVEYRRFAAVLILKEMAENASTVFNVHVPEFVDAIWVALRDPQLQVRERAVEALRACLRVIEKRETRWRVQWYYRMFEATQDGLGRNAPVHSIHGSLLAVGELLRNTGEFMMSRYREVAEIVLRYLEHRDRLVRLSITSLLPRIAHFLRDRFVTNYLTICMNHILTVLRIPAERASGFIALGEMAGALDGELIHYLPTIMSHLRDAIAPRKGRPLLEAVACVGNIAKAMGSTVETHVRDLLDVMFSSSLSSTLVDALDQITISIPSLLPTVQDRLLDCISLVLSKSHYSQAKPPVTIVRGSTVGMAPQSSDPSCSAQVQLALQTLARFNFKGHDLLEFARESVVVYLDDEDAATRKDAALCCCRLIANSLSGITQFGSSRSTRAGGRRRRLVEEIVEKLLRTAVADADVTVRKSIFVALFGNQCFDDYLAQADSLTAIFASLNDEDLDVREYAISVAGRLSEKNPAYVLPALRRHLIQLLTYLELSADNKCREESAKLLGCLVRNCERLILPYVAPVQKALVARLSEGTGVNANNNIVTGVLVTVGDLARVGGLAMRQYIPELMPLIVEALMDGAAVAKREVAVSTLGQVVQSTGYVVTPYKEYPLLLGLLLKLLKGDLVWSTRREVLKVLGIMGALDPHVHKRNQQSLSGSHGEVPRGTGDSGQPIPSIDELPVELRPSFATSEDYYSTVAINSLMRILRDASLLSYHKRVVRSLMIIFKSMGLGCVPYLPKVLPELFHTVRTSDENLKDFITWGLGTLVSIVRQHIRKYLPELLSLVSELWSSFTLPGPIRPSRGLPVLHLLEHLCLALNDEFRTYLPVILPCFIQVLGDAERFNDYTYVPDILHTLEVFGGTLDEHMHLLLPALIRLFKVDAPVAIRRDAIKTLTRVIPCVQVTGHISALVHHLKLVLDGKNDELRKDAVDALCCLAHALGEDFTIFIESIHKLLLKHRLRHKEFEEIHARWRRREPLIVATTATQQLSRRLPVEVIRDPVIENEIDPFEEGTDRNHQVNDGRLRTAGEASQRSTKEDWEEWMRHFSIELLKESPSPALRTCAKLAQLQPFVGRELFAAGFVSCWAQLNESSQKQLVRSLEMAFSSPNIPPEILATLLNLAEFMEHDEKPLPIDIRLLGALAEKCRVFAKALHYKEMEFEGPRSKRMDANPVAVVEALIHINNQLHQHEAAVGILTYAQQHLDVQLKESWYEKLQRWDDALKAYTLKASQTTNPHLVLEATLGQMRCLAALARWEELNNLCKEYWSPAEPSARLEMAPMAAQAAWNMGEWDQMAEYVSRLDDGDETKLRGLASPVSSGDGSSNGTFFRAVLLVRRAKYDEAREYVERARKCLATELAALVLESYERAYSNMVRVQQLSELEEVIEYYTLPVGNTIAEERRALIRNMWTQRIQGSKRNVEVWQALLAVRALVLPPTEDVETWLKFASLCRKSGRISQAKSTLLKLLPFDPEVSPENMQYHGPPQVMLGYLKYQWSLGEERKRKEAFTKLQILTRELSSVPHSQSDILASMVSSKGANVPLLARVNLKLGTWQWALSSGLNDGSIQEIRDAFDKSTCYAPKWAKAWHTWALFNTAVMSHYISRGQIASQYVVSAVTGYFYSIACAANAKGVDDSLQDILRLLTLWFNHGATADVQTALKTGFSHVNINTWLVVLPQIIARIHSNNRAVRELIQSLLIRIGENHPQALMYPLLVACKSISNLRRAAAQEVVDKVRQHSGALVDQAQLVSHELIRVAILWHEMWHEALEEASRLYFGEHNIEGMLKVLEPLHDMLDEGVKKDSTTIQERAFIEAYRHELKEAHECCCNYKITGKDAELTQAWDLYYHVFKRIDKQLASLTTLDLESVSPELLLCRDLELAVPGTYRADAPVVTISSFSRQLVVITSKQRPRKLTIHGNDGEDYAFLLKGHEDLRQDERVMQLFGLVNTLLENSRKTAEKDLSIQRYSVIPLSPNSGLIGWVPNCDTLHHLIREHRDARKIILNQENKHMLSFAPDYDNLPLIAKVEVFEYALENTEGNDLSRVLWLKSRSSEVWLERRTNYTRSLAVMSMVGYILGLGDRHPSNLMLHRYSGKILHIDFGDCFEASMNREKFPEKVPFRLTRMLVKAMEVSGIEGNFRSTCENVMQVLRTNKDSVMAMMEAFVHDPLINWRLFNFNEVPQLALLGNNNPNAPADVEPDEEDEDPADIDLPQPQRSTREKEILQAVNMLGDANEVLNERAVVVMARMSHKLTGRDFSSSAIPSNPIADHNNLLGGDSHEVEHGLSVKVQVQKLINQATSHENLCQNYVGWCPFW

SEQ ID NO: 149805 - DNA, 7413 bp, Drosophila melanogaster
  CDS (1)..(7413)
atgtcgacgacgtcggtggtgcagcagttcgtcaacgggcttaagtcccgcaaccggaatgtacagaacaaggcaacccaggatctgctcttctatgtgaagaccgagctacgcgaaatgtcccaggaggagctggcccaatttttcgacgagttcgaccatcacattttcacgatggtgaatgcgacagatatcaacgagaaaaaaggcggtgccctggccatgaagtgcctgattaactgcgagggcagtcttactgccaggaagggcatttcgccctatctcaaccgcctgcgcgatcttctgctaatcaacgatgtgtccgtcatggagattgccgcccgctccctggtcaaattggccaacatgcccacctccaagggcgccgattccttcgactttgatattaagaaggcttttgaggtgctcagaggcgagagacaagagtaccgccgccattcagccgtctttatcctccgtgagctggctatcgccttgcccacatacttctaccagcacatcctgaccttcttcgaggttatctttaacgccatcttcgatcccaaacctgctatacgagagtcagctggcgaggctttgagggcggctttgattgtcaccgctcagcgagagagcaccaagcagtccagtgaaccacagtggtacagaatctgctatgacgaggcgaatggaagcttcaatgcagacttgggctctagcaaggatcagaaaggcgtgacccgagacgatcgcattcacggtggcctcgtcgtcttcaacgagctctttcgctgtgccaatgccacctgggagcggcgctacacgtctctgaagacgctgttccccaagacccaacacaataagttcctggaggccagcagttcgtcgagtatgggttcccagctgaatactctagtgccgcggctaaaggtgcccttcattgacaagctcggcagcacccaaacgcatttgggtgagggagagcatcacaaaggagttgccaagttcgcgagccacaacgtactggagtccgcatatgctcaggagatccttcaggagcactacacctccatttgcgacaatgttttggagcagcgaacttcgaagtctccgtatgtacagcaggcactccttcaaatacttcctcgattggctgcctttaaccgcgcggtgtttgtggaaaaatacctgcagacatgcgtgtcgcatttaatgcagatcctgcgaggcaaggagaaggatcgcacggtggcgtacataaccattggttacatggctgtagcggtgcagagtgcgatcgaagttcatttatccagtataatgactagcgtgaaggtcgccttgccgtcaaaggatttgaccagcaaacgaaaggtaccagtggatcctgcggtctttgcctgcataacgcttcttgctcatgccgttaagtcggagatcgccgacgatgttaaggatatccttgagcagatgttctacacgggtctctcgccagctctgactgtttgcctgagggaactctccgagaatgtgccgcagcttaagtcggccattacagaaggattgatcggaatcctatcccaggtgctgatgaacaaggcggcaattttaccatacactgctttgccaacgatcgccatcgatggctcgctaatgcagaatggtgacggagcaaccacagtgctggcactcaaaacgctgggtaccttcaactttgaggagcaaaacatgctggactttgtgcaacgatgtgctgactacttcatcgttcacgagcagcaggagattcgtctggaggcagtgcaaacatgcacacgactccttaaactggcagtgcaatcctctgaaagtatggagaactccaagaccctcagcgacaccgtttcccacgtgattgagcgcctgcttatggtagccattactgatatggactgtaatgtgcgaatacgaattctacgttcgctggacgagacctttgatgggaagcttgctcagccagagtctctaaattcgctatttattacgctgcacgatgaaatctttgagatccgggagctggcaatggttaccattggaagattgtcgtccataaacccggcttatgtgatgcccaagctaagaaccaccatgatcgaattgatcacggatctaaagtactcgggaatgagtcgaaacaaggagcagagcgcaaagatgcttgaccatttggtgataagcacgcccaggctaatatcctcttacatgaatccgatcctcaaagccttagtgcccaagttgcatgagccggaatcgaatccaggagttattttaaatgtgcttcgcacaattggtgatttagcagaggttaatggaggctccgatgaaatggaattgtgggcagatgaccttctgtccattttactcgaaatgctgggcgacgctggcagtccggataagcgaggagtggctctgtggacgttgggacagttaatcagtgcaacaggcagggtggttaccccatatcacaagtaccccgtgctcatagatattttgattaatttccttaaaacggaacaacgtcgatccattcgaagggaaacgatacgagtgctgggcttgttgggagccatggatccttacaagcacaagatgaacaagggcttgattgatagccaaaaggataatgttttaatagcatactccgatggcaaagtcgatgaaagtcaggacatctccaccgctgagttgctagttaacatgggtaacgcattggatgagtattatcccgctgtggccatagctgcattgatgaggattctacgggatcccacgttaagtacacgtcacaccagcgtggtgcaggcggttacttttatcttccagagcctgggcatcaaatgtgtgccgtacttggcccaagtgcttcccaatttgctggacaatgtacgcactgcagataataatctaagggagtttctcttccagcagctcgccattctggtggcttttgtcaagctgcatatcatcagctacatgggagatatttttaagctgatcaaagaattttggaccattaatacgcctctgcaaaacactctaatcaatttgattgaacagatcgccgtggctttgggatgcgagtttagggattatttggcggagctgatcccacaaattctgcgagtgttgcagcacgataactccaaggatagaatggtcacgagaaggttgctccaagctcttcaaaagtttggcagcactttgggttactatctgccgctgattttgcctccgatcgtgaaactcttcgattctccgtacgtaccacaacaggtgtcaatggtagccctggaaacgatcaacaatctagcctgtcagctggacttcaccgacttctcctcgcgcatcatacatccgttggttcgagtgctggacgctgagccagagcttcgggaccaagctatgacaacccttcgctcactggcaaagcaactgggcaagaagtacctcgtgttcgtgcctatggtccagcgcactctcaacaaacatcgcattgtggatcccgagtacgaggagctactgagtaagattaagtcctgcagcacactggcggattcctatggggccggggagtcagaactgcggccgtccaggttcaaaaacaacgagccatttgtgaccgacagaaatagcaataataaaaatctgcaggtcaccacaaacgaactacgaacggcgtggcaggtgacgcggcgggtgtccaaggacgactgggtggagtggctaaagcggttgtccattggcctgctgaaggaatcgccttcgcacgcactgagagcctgtcgttcgttggcccaagagtacgatacgctgttgagagatctttttaacgccgcatttatctcctgttggacggaactatcgccggatttgaaaaacgagctaacacagtcactgattcaagccctgcaagttaccgacatgccggaaatcactcagacaatcctcaacttggccgagtttatggagcattgcgatcgcgatccaataccaatagaaactaagctattgggtactcgagcgatggcttgcagagcgtatgccaaggcattgcgctacaaggaggaggagttccttctgcgagaagattcccaagtttttgagtccttgattctaatcaacaacaagctgcagcaaagagaagcagcggaaggtctgctcacaaggtatcgtaatgcagccaacgaactaaatgttcaaggaagatggtatgaaaaacttcacaattgggatgaggcgctggaacactatgaaaggaatctaaagacggattcctcggacttggaggcgcgactcggtcacatgcgctgcttggaggccctcggagattggtcggagctgagcaacgtgaccaagcacgagtgggaaaacttcggtacagaggccaaatcaagagcaggacccttggccgcagtggccgcctggggtctccaggattgggaggcgatgcgggagtacgtaaggtgtataccagaggatacccaagatggaagctactatcgtgctgtcctcgccgtgcatcatgacgactttgagaccgcacagcgccttattgacgaaacaagggacctcctcgacacggagctcacatcaatggcgggcgagtcctatgaaagagcctacggagccatggtatgtgtacaaatgctggcggagctggaggaggtcatccaatacaagctcattcccgagaggcgagagccgttaaagaccatgtggtggaagcgtcttcaaggaggccagcgactagtagaagactggcgaaggatcatccaggtgcactcgctggtggtaaaaccgcacgaggacatacatacctggctgaagtacgctagtctgtgcaggaagagcggctccctgcacttgtcccataaaactctggtgatgctgctaggcaccgatcccaagcttaatccgaaccagccactgccttgtaatcaaccacaggtgacctatgcgtacaccaagtacatggctgccaataatcagctgcaggaagcctacgagcagttgacgcacttcgtcagcacctatagtcaggagctaagctgtttacctccggaagcactaaagcaacaagatcagcgactcatggcccgctgctatctgcgcatggccacctggcagaacaagctgcaggacagcatcagaccggatgccattcaaggcgcactcgaatgctttgaaaaggccaccagctatgatcccaactggtacaaggcctggcacctgtgggcgtacatgaactttaaggtggtgcaggcccaaaaatcggcgctggacaaacaacagcctccgggagccagcatgggaatgacaatgggctctggcctcgacagtgatctaatgatcatacagcgatacgccgttccggcagttcagggattcttccgttcaatcagccttataaaagggaattcgctgcaggatacgctacgtttgttaactctttggtttgactatggcaaccatgcagaggtgtacgaggcgctgctctctggaatgaagctgatcgagatcaacacctggcttcaggttatcccgcagcttattgcccgcatcgatacccaccgtcagttggtgggtcaattaatccaccaactcctaatggacataggaaagaatcacccgcaggctctggtctatcctctaacagtcgcttccaagtcagcatcattggcgcgcaggaacgccgcctttaagatcctcgactcgatgaggaaacactcgcccaccttggtagagcaggcggtcatgtgtagtgaggagctcatccgtgtggcgattctgtggcacgaacagtggcacgaaggtttggaggaagcctcgcgtctttactttggagatcgcaacgtaaagggcatgtttgagatcttggagccactgcatgctatgctggagaggggaccacaaacactcaaggagacatccttctcgcaggcctatggacgcgagctgacagaggcgtacgagtggtcgcaacggtacaagacatcggcggtggtgatggatctggatcgagcgtgggacatttactatcacgtcttccaaaagatctcgcgccagctgccacaacttacctcgctggagctgccgtatgtctcgcccaaactgatgacgtgcaaagatctcgaactggcagtgcccgggtcctacaatcctggccaggagctcatccggattagtatcattaaaaccaaccttcaggtgattacttccaagcagcggccgcgaaaactgtgcatacgcggctccaatggcaaggactatatgtaccttctaaagggacacgaggaccttcgtcaggacgaacgcgtgatgcagctattctccctggtgaacacattgctgttggatgaccccgacactttccgtcgtaacttggccatccagcggtatgcggttatcccgctcagtaccaactcgggtcttattggttgggtgccacattgtgacacccttcatacgctaatccgggactaccgcgacaagaagaaggtgccactgaatcaggagcatcgcaccatgctcaattttgcgccagactatgatcacctcacgctgatgcagaaggtggaagtgttcgagcatgcgttgggtcagacgcaaggcgacgacttggccaagttgctgtggctcaagtctccgtcctctgaattgtggtttgaacggagaaacaactatacccgctcactggcagtcatgtcaatggttggatatatcctaggtctgggcgatcgtcatccatcgaaccttatgctggatcgtatgagcggcaagatactgcacatagactttggcgactgcttcgaggtggccatgacccgcgaaaagtttcccgaaaagatacccttccgtctcacccggatgctaataaaggcaatggaggtcactggcatcgagggcacctacagacgcacctgcgaaagcgtgatgctggtgcttcgccgcaacaaggattccctgatggcggtgctggaggcctttgtctatgatccgctgctcaactggagactgttggatgtggacaagaagggtaacgatgcggtggctggggcgggtgctccaggtggacgtggcggttccggaatgcaggatagcctcagtaactccgtagaggactccctgcccatggccaagtcgaagccctacgatccgacgctacagcaaggcggcctgcacaacaacgtggccgacgagacgaacagcaaagccagccaggtaatcaagcgggtcaagtgcaagctaacaggcaccgacttccagacggaaaagagcgtaaacgagcagtcgcaggtggagctgctcatccagcaggcgaccaataacgagaacctctgccagtgctacattggctggtgtccgttttggtag

SEQ ID NO: 149806 - protein, 2470 aa, Drosophila melanogaster
MSTTSVVQQFVNGLKSRNRNVQNKATQDLLFYVKTELREMSQEELAQFFDEFDHHIFTMVNATDINEKKGGALAMKCLINCEGSLTARKGISPYLNRLRDLLLINDVSVMEIAARSLVKLANMPTSKGADSFDFDIKKAFEVLRGERQEYRRHSAVFILRELAIALPTYFYQHILTFFEVIFNAIFDPKPAIRESAGEALRAALIVTAQRESTKQSSEPQWYRICYDEANGSFNADLGSSKDQKGVTRDDRIHGGLVVFNELFRCANATWERRYTSLKTLFPKTQHNKFLEASSSSSMGSQLNTLVPRLKVPFIDKLGSTQTHLGEGEHHKGVAKFASHNVLESAYAQEILQEHYTSICDNVLEQRTSKSPYVQQALLQILPRLAAFNRAVFVEKYLQTCVSHLMQILRGKEKDRTVAYITIGYMAVAVQSAIEVHLSSIMTSVKVALPSKDLTSKRKVPVDPAVFACITLLAHAVKSEIADDVKDILEQMFYTGLSPALTVCLRELSENVPQLKSAITEGLIGILSQVLMNKAAILPYTALPTIAIDGSLMQNGDGATTVLALKTLGTFNFEEQNMLDFVQRCADYFIVHEQQEIRLEAVQTCTRLLKLAVQSSESMENSKTLSDTVSHVIERLLMVAITDMDCNVRIRILRSLDETFDGKLAQPESLNSLFITLHDEIFEIRELAMVTIGRLSSINPAYVMPKLRTTMIELITDLKYSGMSRNKEQSAKMLDHLVISTPRLISSYMNPILKALVPKLHEPESNPGVILNVLRTIGDLAEVNGGSDEMELWADDLLSILLEMLGDAGSPDKRGVALWTLGQLISATGRVVTPYHKYPVLIDILINFLKTEQRRSIRRETIRVLGLLGAMDPYKHKMNKGLIDSQKDNVLIAYSDGKVDESQDISTAELLVNMGNALDEYYPAVAIAALMRILRDPTLSTRHTSVVQAVTFIFQSLGIKCVPYLAQVLPNLLDNVRTADNNLREFLFQQLAILVAFVKLHIISYMGDIFKLIKEFWTINTPLQNTLINLIEQIAVALGCEFRDYLAELIPQILRVLQHDNSKDRMVTRRLLQALQKFGSTLGYYLPLILPPIVKLFDSPYVPQQVSMVALETINNLACQLDFTDFSSRIIHPLVRVLDAEPELRDQAMTTLRSLAKQLGKKYLVFVPMVQRTLNKHRIVDPEYEELLSKIKSCSTLADSYGAGESELRPSRFKNNEPFVTDRNSNNKNLQVTTNELRTAWQVTRRVSKDDWVEWLKRLSIGLLKESPSHALRACRSLAQEYDTLLRDLFNAAFISCWTELSPDLKNELTQSLIQALQVTDMPEITQTILNLAEFMEHCDRDPIPIETKLLGTRAMACRAYAKALRYKEEEFLLREDSQVFESLILINNKLQQREAAEGLLTRYRNAANELNVQGRWYEKLHNWDEALEHYERNLKTDSSDLEARLGHMRCLEALGDWSELSNVTKHEWENFGTEAKSRAGPLAAVAAWGLQDWEAMREYVRCIPEDTQDGSYYRAVLAVHHDDFETAQRLIDETRDLLDTELTSMAGESYERAYGAMVCVQMLAELEEVIQYKLIPERREPLKTMWWKRLQGGQRLVEDWRRIIQVHSLVVKPHEDIHTWLKYASLCRKSGSLHLSHKTLVMLLGTDPKLNPNQPLPCNQPQVTYAYTKYMAANNQLQEAYEQLTHFVSTYSQELSCLPPEALKQQDQRLMARCYLRMATWQNKLQDSIRPDAIQGALECFEKATSYDPNWYKAWHLWAYMNFKVVQAQKSALDKQQPPGASMGMTMGSGLDSDLMIIQRYAVPAVQGFFRSISLIKGNSLQDTLRLLTLWFDYGNHAEVYEALLSGMKLIEINTWLQVIPQLIARIDTHRQLVGQLIHQLLMDIGKNHPQALVYPLTVASKSASLARRNAAFKILDSMRKHSPTLVEQAVMCSEELIRVAILWHEQWHEGLEEASRLYFGDRNVKGMFEILEPLHAMLERGPQTLKETSFSQAYGRELTEAYEWSQRYKTSAVVMDLDRAWDIYYHVFQKISRQLPQLTSLELPYVSPKLMTCKDLELAVPGSYNPGQELIRISIIKTNLQVITSKQRPRKLCIRGSNGKDYMYLLKGHEDLRQDERVMQLFSLVNTLLLDDPDTFRRNLAIQRYAVIPLSTNSGLIGWVPHCDTLHTLIRDYRDKKKVPLNQEHRTMLNFAPDYDHLTLMQKVEVFEHALGQTQGDDLAKLLWLKSPSSELWFERRNNYTRSLAVMSMVGYILGLGDRHPSNLMLDRMSGKILHIDFGDCFEVAMTREKFPEKIPFRLTRMLIKAMEVTGIEGTYRRTCESVMLVLRRNKDSLMAVLEAFVYDPLLNWRLLDVDKKGNDAVAGAGAPGGRGGSGMQDSLSNSVEDSLPMAKSKPYDPTLQQGGLHNNVADETNSKASQVIKRVKCKLTGTDFQTEKSVNEQSQVELLIQQATNNENLCQCYIGWCPFW

SEQ ID NO: 149807 - DNA, 7404 bp, Nasonia vitripennis
  CDS (1)..(7404)
atgacaagtacgcttgttttacaattcgtccagcggctcaagtcaaagcatgaggatgtcagaaataaagcagcccgtgagctctgtctctatgtcaagacagagctacgcgaggccacacaagaggaaattacagcttttatggatgagttcaatcaccacatatttgagatggtttctggctcagacatcaacgagaaaaaaggtggtatcctggcaatagtatgcctcattggtgcagatgtaggcaacatcaatactcgcaccattcgatttgccaactatctgcgaaaccttctgccttccagtgacattggagttatggagttggctgccaaaacagttggcaaactagctctggtttctggcacctttactgctgagtatgttgaattcgaagtcaagagggcctttgaatggcttagtggtgatagaaatgagaacaagagacacgcagcagttttggttctcaaagagctagcagtctctatgcccacatattttttccagcatattacccagttctttgaattgatctttaaagcagtctgtgaccctaagccagccattcgtgaaggtgctgtagaagccctccgcgcagctctagtcttgacagcacaacgtgaaactgccaagcagacacagaaacccacatggtacaagttgtgctatgaagagatagttgcaggctttgaggaggtttatgtccgggagaagagcttcaatcgggatgatcgaatgcacggctcattgctaattctcaatgagctgttgcgctgtagtaatctacaatgggagcggctttatgaagacctcatggagcggctcagctgttccagccagccgaccgacaatgatatcctgtcattgatgccgagattaaagacgagcctcatgtcaaagtggacggcctcagctcctcagagttcgttgcagagtgttcaacacaatctccatccagttcacgagtcgaacgcctgtcggagtttgatgctggagaaactcgatgaaatcaacgcagacgtgatgaaccagcgccactgccgcaactcgcacatacagaacgcgctcatgactctgctaccaagattagcggccttcaacaaggaaaaatttgttcaggacaatctacgcgagtgcatgcattatctaattgtcagcctgaggggcagagagaaggacagagcagctgcctttaccacgatcgggttgatagctgtagccgttgacgaggccatcaagccttacttacccaagattatggacgtgattaaaagctcgctaccgtccaaagagacacccaacaaaaagaggagctctgctctcgaacctgcggtttttgtttgcattacactgctgggacatgctgtgaaacagaccatcacgtcggatgtgagggatttgctggagccgatgctggctaccgggttgtcgccgattctcaccacctccttgagagaactggcgcatagcgtgccttccttgaagcctgatatatctcagggcctactcaggatgttgtcacaggtgctgatgtacaagcctcttcgtcatccaggtgcaccttggacagccacaagtcccgtttctgccccacctactgagatcgatgtagcttccacggtcttaggtcttcgcacccttggtaccttcaacttcgatggaaatccattattacagttcgtgcgtcgttgtgccgactacttcctcacatgggaagaaccggaggtacgtctcgaggccgtcaaaacgtgctcgagactgctgagattagcgcttggtcaacccggacctactgttactagtaccgtatctactgtgcttgggaaattgttagtcgtgggaatcacggataccgattcggatgttagatactgggtgctggcgtcgctggatgagccatttgatattcatctagcacaagcagagagtctctcatgtttgtttgtcgctatgaatgacgaggtttttgaaattcgggaattagctattcgtacaatcggtcggctgagcggcatgaatccagcctacgtgatgccatcccttcgtaaagctctcatacagttcctcaccgagctcgaacactcgggtatgggtcgcaacaaggagcaggcagcccgtatgctggatcatctagtcgtctcagcaccgagactcatccgaccctacatggaaccggtgctcaaagttttggtacccaagctaaaggaaaccgaaactaatccaggagttgtgctggcagttttgagagcagttggagatttggcagaggttagcggcgctgagatgcagccctggatgcctgagctgctcgcaatattgctagagatgctagtggacgcgtcgtcgccggaaaagagaggtgttgcactgtgggtcttgggtcagcttgttggtagtacgggtcatgtagtgcgaccgtatacacagtacccatcgctgctcgatgttcttctgaacttcctcaagaccgagcaacagcccgtcgttcgtcgtgaaactatccgtgtacttggtcttttaggcgcgctcgacccctacaagcacaaaatgaaccttggacagatatcatctccacagctcgaagctctgagctctcgaccgtctgccgatgctcgccctgaagctggtgacgagcttagcaccagtgagatgctggtcaatatgccctcggctaccctggaggagtactatccagccgtagccatcgcaaccctcatgcgcattatccgcgagccaactctcgcgcagcatcacactatggttgtccaagccgtcactttcattttcaagagtcttggtattaaatgcgtgccatatatatcccaagtgatgccgagttttcttaacgtgcttcggactgcagatgtcggattccgggagtatctcttccagcagctcgctattctcattgctatcgtcaagcatcatattcgcaactacctcgatgacatattcgcgcttgtgcaagagttctggacgtggaacagtccgcttcaaggcacgctcattcatctagtcgaacacatcgctgtggctttaggagccgaatttaagatatatcttcctcgcctgatgcctcaaatactgcgagtcctgagtcatgacacaagcaaagaacgccaggtcacggtgaaactgttactcgctttgcaaaagttcgccggaaacctcgacaattacctgcacttggtcttaccacctgtagtccgactcttccagacgagtccggattgcccggtcgctgtcagtcggtgtgctctggaaacagtcgaacaactagccgaaagccttgactttacagactttgcctcccgcatcgtacagccgctcgttcgaacgctggatcagtgttccgagcttcgagctccggcctgcgagactctgtgcgccttattgctgcaattggggcccaagttccacatcttcttgccacttgttcagcgtgtcatggtacggcataggatcgtccatccacgatttgagagtttagtagacaaagtgcaaagcgcatctagattaggaggcccaggacgttttgaagtacgccaggccagaagtaagagtcagcgcgcggaattgggcctagctagtgctgcagatacaaccgtcatcaagaagctcaacgtttctgcatcgaatcttcaaaaagcctggacagctactagacgcgtgtccaaggacgactggctcgagtggcttcgcagcctctccattggtctcttaaaagaatccccgtcgccggccttacgttcctgctgggctctggcccaaacctattcacagctaccgcgagacctcttcaacgcggcttttgtctcctgctggagcgaactcgacgagtcccaccgcaccgagctcgtggctactcttcaacaagctctcatggttcccgatatacccgagatcagtcagacaatcctaaatctcgccgagtttatggaacattgtgataagggaccgttacctttggatagtaaagtcttgggtgaacgagcgatgcattgtcgggcatacgctaaggcgctccactacaaagaggacgaataccacaagggccgcagcggtgctgtattcgagtcactcatcagcattaacaacaaattacagcagaaagaggctgcggaaggtctactcgagtacgttatgaatcagcagcaagagaacaacaagcaagagctgaaggtgcaggttcgctggtacgagaaactccataactgggacaaggctttgcatctgtatagggagaggttggaggttgatgcgcaagacgttgagtcgactttgggagagatgcggtgtttggaagctttgggagaatggggacaactgcacgaggtggcgatgagacaatggagttcgcatacccaagagactaaacagcgcatggccagaatggcagcggcggctgcctgggggttgaaccagtgggagagcatggaaaagcacgtggcgctgattcccaaagaaactcaagacggagctttctacagagctgtgttggcaattcacgacgagcaatatgacctggcgcacaagttgatagacaatgcgagagacttactggacaccgaattgacagccatggctggcgagagttatcagagagcttacaacgcaatggtcgaggtacagaagctcgcggagctcgaggaggtgatacagtacaagctcgtaccggaaagacgagcgaccatcaagtccatgtggtgggagcgattgcagggtggtcaacggatcgtagaggactggcagaagatcatacaggtgcacacgctcgttatttctccacaggacgatatgtacacatggctcaagtatgcgagtctttgtcggaaaagtggaaaccttgcgttgtgtcacaagacactggttatgctgctaggagtcgacccatccacagcgagacccgaccaagctcttcccattcaacatccacaggtaacattcgcttactgcaagcacatgtgggtggatggcaagcgtgacgcagcttatggtcaactccagcgcttcgtgcgtaccttcctaccaggccagcaacaacagcagcagcaaccagccgaagacgaacgtcaactcgaagctcgcaagcgcctactcgctcgttgttatctcaaactcggagagtggctggaagctctgcaaggtatcaacgaggactcgattcccaatgtcttgtcttactacgcgcacgcgacaaagcacgatccgagttggtacaaagcctggcacgcgttcgcctacaccaacttcgaagcggtattgttctataaacaccaacaaacggaaacggcattcaacgagcagcaacagcaacaacaaaatggaggtccaaacggagcgaatgttttggcaaacggagctgcaaagagtcaattgtcgtcccagtttataacgaggttcacggtaccagcgctggaaggtttcatcagatcgatcaatctgtcaaatgggaactctctgcaggatacgctcaggttgctgacgttgtggttcgagtatggacagtggcctgaagtttacgaggctattatagagggcattcgactcattgaaatcaacacttggctacaggttataccgcagctcatagccagaattgacacaccgcgagctttggtcggacgttgcattcataatcttctcgttgacatcggcaagactcatcctcaggctctggtatatccattgaccgtggcatcgaagagtgcgagtcacgcgcgtaagacggccgctaacaagatcttgaacagcatgagcgagcatagtccgacattggtacaacaggcgaagatggtgagtgacgagctcatccgcgtagccatactctggcacgagttgtggcacgagggtctcgaggaagcgagtagactgtatttcggtgaacgaaatgtcaaaggcatgtttgacacactagaacctttacacgcgatgctggagcgcggacctcagacgctcaaagaaacgtctttcaatcaagcctatggtcgcgacttaatggaagcacaagactggtgtcacaggtacaaggtgtcaggaaacgtacgcgatctcaatcaagcctgggacctttactaccacgtgttccggcgaatatcgagacaattaccacagctgacgagtctcgaattgcagtacgtcagtcctaagctgctgttgtgcagagatttggaactggctgtaccgggaagctatcaacccgggcagcctgttatcaggatcggtagtataaatagttcgctgcaagtcataacgagcaaacagcgaccgagaaagttatgcgtcaagggtagtaacggaaaggattacatgttcttgctcaaaggtcacgaagatcttcgtcaggacgagcgtgttatgcagctattcggtctagtcaatactttgttgctgcacgatccagatacgtttaggagaaatttgacgattcagagatacgccgttattcctttatctacaaatagtggccttattggatgggtacctcactgtgatactttgcacactttaatcagggattaccgagagaaaaagaagatacttctcaacatcgaacatagaattatgctgagaatggcaccggactacgatcacctgatgctcatgcaaaaagtcgaagtttttgaacacgccttagaacacacgtgcggtgacgatttggcccgtttgctctggttgaaatcaccatcgagcgaggtctggtttgatcgacgcaccaactacactcgctcactggccgttatgtcgatggttggatacatcctcggtttgggcgatcgacatccctcgaatcttatgttggacaggcttagcggcaaaatacttcacattgactttggcgattgcttcgaggtcgctatgactcgcgagaagttccctgaaaagatacccttccgtctcacccgaatgttaattaacgcgatggaggtgacgggtatagagggcacatacagacgcacctgcgaatcggttatgtcggtgctacatcgcaacaaggacagcttgatggccgtactcgaggccttcgtttacgatcctttgttgaactggaggctgatggacaacgccgctcctaagggcaagaggagcgacgcacagggcatgagcactagtagtagtcaggaacatggtgacatgctggattcgttgacagctacgttcccgaagaagggcgtaccttgtagcattgaaaacggaggtatgtgtgacagtaatcagccagaagctttgaacaaaaaggctcttcagatcataaacagagtccgtgataagctcactggccgcgacttttcacacgaagagacgctaagtgtgcagcgacaagtggatcttttgatacaacaagcaactaataatgaaaacctctgtcaatgttatataggatggtgtccattttggtaa

SEQ ID NO: 149808 - protein, 2467 aa, Nasonia vitripennis
MTSTLVLQFVQRLKSKHEDVRNKAARELCLYVKTELREATQEEITAFMDEFNHHIFEMVSGSDINEKKGGILAIVCLIGADVGNINTRTIRFANYLRNLLPSSDIGVMELAAKTVGKLALVSGTFTAEYVEFEVKRAFEWLSGDRNENKRHAAVLVLKELAVSMPTYFFQHITQFFELIFKAVCDPKPAIREGAVEALRAALVLTAQRETAKQTQKPTWYKLCYEEIVAGFEEVYVREKSFNRDDRMHGSLLILNELLRCSNLQWERLYEDLMERLSCSSQPTDNDILSLMPRLKTSLMSKWTASAPQSSLQSVQHNLHPVHESNACRSLMLEKLDEINADVMNQRHCRNSHIQNALMTLLPRLAAFNKEKFVQDNLRECMHYLIVSLRGREKDRAAAFTTIGLIAVAVDEAIKPYLPKIMDVIKSSLPSKETPNKKRSSALEPAVFVCITLLGHAVKQTITSDVRDLLEPMLATGLSPILTTSLRELAHSVPSLKPDISQGLLRMLSQVLMYKPLRHPGAPWTATSPVSAPPTEIDVASTVLGLRTLGTFNFDGNPLLQFVRRCADYFLTWEEPEVRLEAVKTCSRLLRLALGQPGPTVTSTVSTVLGKLLVVGITDTDSDVRYWVLASLDEPFDIHLAQAESLSCLFVAMNDEVFEIRELAIRTIGRLSGMNPAYVMPSLRKALIQFLTELEHSGMGRNKEQAARMLDHLVVSAPRLIRPYMEPVLKVLVPKLKETETNPGVVLAVLRAVGDLAEVSGAEMQPWMPELLAILLEMLVDASSPEKRGVALWVLGQLVGSTGHVVRPYTQYPSLLDVLLNFLKTEQQPVVRRETIRVLGLLGALDPYKHKMNLGQISSPQLEALSSRPSADARPEAGDELSTSEMLVNMPSATLEEYYPAVAIATLMRIIREPTLAQHHTMVVQAVTFIFKSLGIKCVPYISQVMPSFLNVLRTADVGFREYLFQQLAILIAIVKHHIRNYLDDIFALVQEFWTWNSPLQGTLIHLVEHIAVALGAEFKIYLPRLMPQILRVLSHDTSKERQVTVKLLLALQKFAGNLDNYLHLVLPPVVRLFQTSPDCPVAVSRCALETVEQLAESLDFTDFASRIVQPLVRTLDQCSELRAPACETLCALLLQLGPKFHIFLPLVQRVMVRHRIVHPRFESLVDKVQSASRLGGPGRFEVRQARSKSQRAELGLASAADTTVIKKLNVSASNLQKAWTATRRVSKDDWLEWLRSLSIGLLKESPSPALRSCWALAQTYSQLPRDLFNAAFVSCWSELDESHRTELVATLQQALMVPDIPEISQTILNLAEFMEHCDKGPLPLDSKVLGERAMHCRAYAKALHYKEDEYHKGRSGAVFESLISINNKLQQKEAAEGLLEYVMNQQQENNKQELKVQVRWYEKLHNWDKALHLYRERLEVDAQDVESTLGEMRCLEALGEWGQLHEVAMRQWSSHTQETKQRMARMAAAAAWGLNQWESMEKHVALIPKETQDGAFYRAVLAIHDEQYDLAHKLIDNARDLLDTELTAMAGESYQRAYNAMVEVQKLAELEEVIQYKLVPERRATIKSMWWERLQGGQRIVEDWQKIIQVHTLVISPQDDMYTWLKYASLCRKSGNLALCHKTLVMLLGVDPSTARPDQALPIQHPQVTFAYCKHMWVDGKRDAAYGQLQRFVRTFLPGQQQQQQQPAEDERQLEARKRLLARCYLKLGEWLEALQGINEDSIPNVLSYYAHATKHDPSWYKAWHAFAYTNFEAVLFYKHQQTETAFNEQQQQQQNGGPNGANVLANGAAKSQLSSQFITRFTVPALEGFIRSINLSNGNSLQDTLRLLTLWFEYGQWPEVYEAIIEGIRLIEINTWLQVIPQLIARIDTPRALVGRCIHNLLVDIGKTHPQALVYPLTVASKSASHARKTAANKILNSMSEHSPTLVQQAKMVSDELIRVAILWHELWHEGLEEASRLYFGERNVKGMFDTLEPLHAMLERGPQTLKETSFNQAYGRDLMEAQDWCHRYKVSGNVRDLNQAWDLYYHVFRRISRQLPQLTSLELQYVSPKLLLCRDLELAVPGSYQPGQPVIRIGSINSSLQVITSKQRPRKLCVKGSNGKDYMFLLKGHEDLRQDERVMQLFGLVNTLLLHDPDTFRRNLTIQRYAVIPLSTNSGLIGWVPHCDTLHTLIRDYREKKKILLNIEHRIMLRMAPDYDHLMLMQKVEVFEHALEHTCGDDLARLLWLKSPSSEVWFDRRTNYTRSLAVMSMVGYILGLGDRHPSNLMLDRLSGKILHIDFGDCFEVAMTREKFPEKIPFRLTRMLINAMEVTGIEGTYRRTCESVMSVLHRNKDSLMAVLEAFVYDPLLNWRLMDNAAPKGKRSDAQGMSTSSSQEHGDMLDSLTATFPKKGVPCSIENGGMCDSNQPEALNKKALQIINRVRDKLTGRDFSHEETLSVQRQVDLLIQQATNNENLCQCYIGWCPFW

SEQ ID NO: 149809 - DNA, 7371 bp, Anopheles gambiae str. PEST
  CDS (1)..(7371)
atgtcgatggtaaaggtgctgcagttcgtgaacgggctcaagtcccgcaacaaggatgtgcagaacaaggccatcaaggacctgtcgctgtacgtcaagacggagctgcgcgaaactccggacgacatgtttttcgaagactttaaccaccacatcttcgagatgctcaccagcacagacaataacgagaaaaagggcggaatactggccatcgattgtctcatcaacggcgatgtcgtgaacacgaccaacaagatttcccgctactcgaacaatctgcgaaatttgttgccgatgagcgacgtttgtgtgatgcagctggccgccaacgtgttggtcaagctggcgctgctgcccggctcgaacggtgccagctcgttcgagttcgacatcaaacgtgccttcgagtggctgtcggaggaccgggtcgagaacaagcggcacgccgcggtgctggtactgcgcgagctggccgtcgcaatgcccacgtttttctaccagcaggtcggaagcttcttcgatcacatatttgtcgcgatcaaggacccgaaggcggccatccgggagggtgccgggcaggcgctgcgggccgtactgatcgtgacgtcgcagcgcgaaggaaccaagcaaaacaataacacccagtggcacatgaactgctacgatcaggcattcgagtgcttgcgcgatacggtggggcgcgagaagaatttaaatcgcgacgatcgcgtccacggtgcgctgatcgtgttcaacgaaatactgcgctgttcgcacgcagcgtgggagaagaagtacatgcagctggacagtttgccggtggaccagaagcgatcgttgcgttcgcagcgggaagaggaagggcggggattcttcccacgcatccgtgtgccttttatggagaagtttggaaaccattcgggacaaagctcggtcagctacagctcgcgctactacgacgtcgtaacggatatgaagttcttccgccagaacagcagcgtgcaggagtcggcactgtaccgagcgctggtgaaggagaagtacgacaccatctgccaggcggtgctggatcagcgtagctccaagtcaccgtacgttatccagacgctgttggcgatctttccgcggctggcagccttcaatagggaggagtttgtgcggctgcatctgcgcacggtcgccaactacctgctgacgctgctacgaagcaaagagaaggaacgcaatgccgccttcgtatcgctcggctatattgcggtcgcggtggaaaaggaaattgaaccgtacaccaaacgcatcatggagttgatcggaagtgcactgccgctgaaggatacacccagcaagcggaaagcgccggtggatccttccgtgttcatgtgcgtcatgctgctggggcatgcgctgaaaggaggcataactcacgagatcaaggagataatagcaccgatgctatcgaccggtctaagtccggcactgatcgtttgcttgcgggagctctgcgaaacggtgccccaggcgcaacaggagataacggcgggcctgctgaagatactgtcgtacgtgctgatgaaccgacctttgccacaatttattgtgccaaagtcacactcgcagccacagtcgcaaccgccgcagcagcaggtccacgatacagccacgatagtgctggcgctgcaaacgcttggcaagtttagcttcgaaggatgcagcttgctacagtttgtgcagcgctgtgccgatcactttctcaacagcgagcagcaggagatccgcatagaagcagtccatacctgtacgtttttgctaaagctagcgctccaggcggcggaaagtaacgggaacgatgtgtcggaaacgcttacgcaaacgctcagctcggtgctggagaaaatcctcgtcgttggcatcacggacgtggatccggcggtgcgcttgcgagtgctgaaatcgctggacgaaagcttcgacacgcagctagcgcagccgtggtttctcagctcgctgctagtgacgatccacgacgaggtgtttgagatacgcgagctggcgatcatcatcattggccggctgtcgacgatcaatccggcctatgtgatgccaagcttgcgcaaaacgatggttcagttgctgaccgagctggagcattcgggcgtcagccgcaacaaggagcaaagtgcgagaatgctggatcatctgatcgtcagcacgccccggctggtggcgtcgtacatgcgcccgatactgaccattctcgtgccaaagctgaaggaaccggaccagaacccgagtgtggtgctgaacgtgctccgtgcgatcggcgatctggcggaggtgattggcggccaccatgtgctgcagaagtggtcggacgagctgctacagctgctgctggacatgctcagtgacgctggcagcacggaaaagcgagctgtggcactgtggacctttgggcagctagtcagtgcgaccgggcaggtagtggtaccgtacaacaagtacccgaatctgatcgatatactgataaacttcctgaaaacggagcagcaactgtacgtccgtcgggaaacgatccgagtgctgggtttgttgggagcgctcgacccgtacaagcacaagatgaatcgcgggctgatcgacagccagacgagtgcaaacattcttatttctgtcgacacgaaaaccgacgaacatacggacctgtccacgtcggaaatgctgatcaacatgagcacccagctggacgagtactatccggcggtggtcatatcgacgttgatgaaaattttgcgcgatcccaccctgtccaaccatcatctcagcgtggtgcaggccatcacgttcaccttcaccagtctgggcatcaaaggggtcccgtacctctcgcaggtgttgccctgtctgctgcgcaacatcgtcacagccgagatgagccttaaggagtacctgtttcagcagctgtccacgctgatatcgatcgtgaagcagcacattatcgggttcatggacgacattttcgagctgatcaagacctcgaccgcatcggccgcctcgctgcaaccgaccatcatcaatctggtggagaagattgcgattgcgctcggttgcgagttcaaagtgtatctacctcagctgatgccgcaaatattgcgcgtgctgctgcacgacacgtctaaggaccgggcggtgacggtgaagctactcggcgcgatgcgcaacttcggcaacaatttagacgactatctgcacctgattataccggcgatcgtgaagctgttcgagccgctcgacataccactgaacgtttccattaccgcactgcaaacgatcaactatctcgccgaggtgctagatttcactgatttttcttcgcgcatcgtgcacccgctggtgcgcgtgctcgatttctatcccgagctgcgtcccgtagcactcacgacgctctgctcgatcatgatccagctcggtcggaagtacctcgtgtttgtgccgcttgtgaatcgggtgatgatcaagcacaagatcccgtcggtggagtacacgaagctgctgacgaagctgcagaacaacagcacactggcgatggatgacgagttccgcatacgacaggcccggaatcggaatcgcgaaatttccctcccgagcgacagcacgatcaagaagttccccgtttcgatgtccgatctggaggcaatgtttaaggcgaatcgacgcgtctccaaggacgattggttggagtggctgcgccggctgagcatcattctgctgaaggagtccaaaaatccggcccttcgatcgtgcgccacactggcccaaaactacccacagctactgaaagacctgttcaacgctgcgttcgtatcgtgctggtcggatttgtcggaaaagctgaagcaggatcttgctcacagcctcacgcaggcgctgacggtgcaggatctgcccgaaattacccaaacggtgttgaatttggcggaatttatggagcactgcgaaagctacccgctgaagatcgactcgaagatactgggcgaacgagccatggagtgccgtgcttacgcgaaagcgctgcactacaaagaggacgaatttcaccggacagacgatccgccccagtcgctgttcgagtcgctgatcctgatcaacaacaagctgcagcagaaggaagcggcggaagggctgctggagtatgccggccgccatcggtccagcgccgaggagatgaaggtgcaagtgcgctggtacgaaaagctgcacagctgggaacaggcgcggtcactgtactcggaaaagctgaagagcaatccgaacgatttggagtcccggctcggtgagatgcgctgcctggaagcgttgggcgagtggtcggcattgaatgctgtcaccacgcagaactgggatgctctcggctcggagggacagagcaaggctggtcggctggcagcagccgccgcctggggtctgcaggactgggatgggatgcatcggttcgtgcgctgcattccggaggacacgcaggacggagcattctatcgcgccgtgctggccgtacataatgagcaatacgcgttggcgcaaagtttgatcgattcgacgcgtgatctgctggacacggagctgacagcgatggcgggcgagtcgtacgagcgtgcgtacggtgcgatggtatgcgtgcagatgcttgccgagctggaggaagtgatccagtacaagctgatcccggaacggcgcgagacgatcaaatcgatgtggtgggaccgcctgctcggtggccagcggctggtcgaggactggcagcgcgtcatacaggtgcactcgctggtgctgtcgcccaaggaggacattcgtacgtggctgaagtttgcgtcgctctgtcgcaagaatggatccttgaagttgtccgagaagacactcaccatgctgctcgagtacgatccgatggagaatctgagcgaaccgcttccaattgacaaaccgcacgtcaccttcgcctacacaaagcacctgcatatggcggggtacacgaaagaggcttacgaccacctgaaccggtttgtcgcgtccagtggtgcgggcgggcaggatgacttgaaggatgaaaatagacgcctgttggcgcgatgcttcctgaagctgggcatgtggcagagtagttccaccggcggaaacctggtaaaggaccacctcatcaatggcatcctggtgtgctacagccgggcaacgaagcacgatccgaactggtacaaagcgtggcacaactgggcgtacatgaactttgaagtggtgcaggcgaagaagcagcaggaagaatacaccaaaaatccgggaagcgcggcggagcgaaacttgataaagcattacgccgtgccggccgtccggggcttcttccagtcgatcaacctctcgcagggcaattcgctgcaggacacactgcgcctgctaacgctctggttcgatcatgcccagtacgaggaggtgtacgaagcgctcgtcgaaggaatgcgtgtgatcgacaaaaacacgtggctgcaggtgatcccgcagctgatcgcacgcatcgatacgccgcgcaatcttgtcggccagctgatcaactatctgctgacggagatcggtaaaactcacccgcaagcgctcgtgtatccgcttacggtggcctcgaagtcggcgccgggcacgcgtaagcaggcggcgcacaaaatcctcaacaacatgtgcgaacattcgaacacgctggtcaatcaggtactgctgatcagtgaggagctgattcgggtggccatcctttggcacgagcagtggcacgagggtttggaggaagcgtcccggctgtactttggcgagcagaatgtggaaggcatgttcgcgacgctggaaccgttgcacgccatgctgcagcggggaccgcaaacgttaaaggaatcatccttcaaccaggcgtacggacgtgacttgaccgaggcacaggaatggtgcaaacattataagaactctaaaaatacgcgagatttgaatcaagcatgggacctatactaccacgtgttccggcgcatttcgcgccagctcgtacagctcacctccctggagctgcagtatgtcagtccgaagctgctggcatgtcgcaaccttgagctggcagtcccaggcagctacacgcccggtcaacagctgatctgcatcgccagcatcgagacgaacctgacgatcatcagctcgaagcaacggcctaggaagctgtgcatccgcgggtcgaatggtaaaaactacatgttcctgctgaaaggccacgaagatttgcgccaagatgagcgagtgatgcagctgttcgggctggtcaacacactgctgctgaatgatcgtgacacgttccggcgcaatctaaccattcaacggtatgcggtgatcccgctgagcaccaactcgggtctgatcggttgggtgccccactgtgacacgctgcacaagctgatccgggactatcgcgattcgaagaaaacgatgctaaacatcgagcataggatcatgctgcgaatggcaccggactacgaccatctcacggtgatgcagaaggtggaggtgtttgagcatgcgcttgatcaaacgaaaggagacgatctggcgaagctgctctggctgaaaagcccttcgtcggagcagtggtttgatcggcgcacgaactacatccgctcccttgcggtcatgtcgatggtgggctacatcttgggtctcggcgatcgccatccttccaatctgatgctggataggttgagtggaaaaattcttcacatcgatttcggcgattgcttcgaggttgcaatgacgcgagaaaagttcccggagaaaatacccttccgcttgacgcgcatgctgatcaacgcgatggaggtgaccggcatcgaaggaacgtatcggcgcacgtgcgagagcgtaatgaacgtgctgcgccgtaacaaggacagtcttatggcggtactggaagcgttcgtgtacgatccgctgctcaactggcgcctgctagattcggaccgattgcgtcgttcaaagaacgccggtgacatggacagcgtgtcgggcagcatgcacgaagactctctgctgagctacaatgccagacgcgatgctcggttgaatgagctgaatgcaacgacgggaccggccgccggaggtcaaccgtcggctaccaatcccgtcgacgtaaccaataagaaggcacgtgcaattgtcgatcgagtgaaggacaagctgaccggcaaagatttcggcaaagcagaaccagtggccgtcaatagacagatcgacctgctgatccagcaggcaaccagcaacgaaaatctgtgccagtgctatatcggctggtgtccgttttggtaa

SEQ ID NO: 149810 - protein, 2456 aa, Anopheles gambiae str. PEST
MSMVKVLQFVNGLKSRNKDVQNKAIKDLSLYVKTELRETPDDMFFEDFNHHIFEMLTSTDNNEKKGGILAIDCLINGDVVNTTNKISRYSNNLRNLLPMSDVCVMQLAANVLVKLALLPGSNGASSFEFDIKRAFEWLSEDRVENKRHAAVLVLRELAVAMPTFFYQQVGSFFDHIFVAIKDPKAAIREGAGQALRAVLIVTSQREGTKQNNNTQWHMNCYDQAFECLRDTVGREKNLNRDDRVHGALIVFNEILRCSHAAWEKKYMQLDSLPVDQKRSLRSQREEEGRGFFPRIRVPFMEKFGNHSGQSSVSYSSRYYDVVTDMKFFRQNSSVQESALYRALVKEKYDTICQAVLDQRSSKSPYVIQTLLAIFPRLAAFNREEFVRLHLRTVANYLLTLLRSKEKERNAAFVSLGYIAVAVEKEIEPYTKRIMELIGSALPLKDTPSKRKAPVDPSVFMCVMLLGHALKGGITHEIKEIIAPMLSTGLSPALIVCLRELCETVPQAQQEITAGLLKILSYVLMNRPLPQFIVPKSHSQPQSQPPQQQVHDTATIVLALQTLGKFSFEGCSLLQFVQRCADHFLNSEQQEIRIEAVHTCTFLLKLALQAAESNGNDVSETLTQTLSSVLEKILVVGITDVDPAVRLRVLKSLDESFDTQLAQPWFLSSLLVTIHDEVFEIRELAIIIIGRLSTINPAYVMPSLRKTMVQLLTELEHSGVSRNKEQSARMLDHLIVSTPRLVASYMRPILTILVPKLKEPDQNPSVVLNVLRAIGDLAEVIGGHHVLQKWSDELLQLLLDMLSDAGSTEKRAVALWTFGQLVSATGQVVVPYNKYPNLIDILINFLKTEQQLYVRRETIRVLGLLGALDPYKHKMNRGLIDSQTSANILISVDTKTDEHTDLSTSEMLINMSTQLDEYYPAVVISTLMKILRDPTLSNHHLSVVQAITFTFTSLGIKGVPYLSQVLPCLLRNIVTAEMSLKEYLFQQLSTLISIVKQHIIGFMDDIFELIKTSTASAASLQPTIINLVEKIAIALGCEFKVYLPQLMPQILRVLLHDTSKDRAVTVKLLGAMRNFGNNLDDYLHLIIPAIVKLFEPLDIPLNVSITALQTINYLAEVLDFTDFSSRIVHPLVRVLDFYPELRPVALTTLCSIMIQLGRKYLVFVPLVNRVMIKHKIPSVEYTKLLTKLQNNSTLAMDDEFRIRQARNRNREISLPSDSTIKKFPVSMSDLEAMFKANRRVSKDDWLEWLRRLSIILLKESKNPALRSCATLAQNYPQLLKDLFNAAFVSCWSDLSEKLKQDLAHSLTQALTVQDLPEITQTVLNLAEFMEHCESYPLKIDSKILGERAMECRAYAKALHYKEDEFHRTDDPPQSLFESLILINNKLQQKEAAEGLLEYAGRHRSSAEEMKVQVRWYEKLHSWEQARSLYSEKLKSNPNDLESRLGEMRCLEALGEWSALNAVTTQNWDALGSEGQSKAGRLAAAAAWGLQDWDGMHRFVRCIPEDTQDGAFYRAVLAVHNEQYALAQSLIDSTRDLLDTELTAMAGESYERAYGAMVCVQMLAELEEVIQYKLIPERRETIKSMWWDRLLGGQRLVEDWQRVIQVHSLVLSPKEDIRTWLKFASLCRKNGSLKLSEKTLTMLLEYDPMENLSEPLPIDKPHVTFAYTKHLHMAGYTKEAYDHLNRFVASSGAGGQDDLKDENRRLLARCFLKLGMWQSSSTGGNLVKDHLINGILVCYSRATKHDPNWYKAWHNWAYMNFEVVQAKKQQEEYTKNPGSAAERNLIKHYAVPAVRGFFQSINLSQGNSLQDTLRLLTLWFDHAQYEEVYEALVEGMRVIDKNTWLQVIPQLIARIDTPRNLVGQLINYLLTEIGKTHPQALVYPLTVASKSAPGTRKQAAHKILNNMCEHSNTLVNQVLLISEELIRVAILWHEQWHEGLEEASRLYFGEQNVEGMFATLEPLHAMLQRGPQTLKESSFNQAYGRDLTEAQEWCKHYKNSKNTRDLNQAWDLYYHVFRRISRQLVQLTSLELQYVSPKLLACRNLELAVPGSYTPGQQLICIASIETNLTIISSKQRPRKLCIRGSNGKNYMFLLKGHEDLRQDERVMQLFGLVNTLLLNDRDTFRRNLTIQRYAVIPLSTNSGLIGWVPHCDTLHKLIRDYRDSKKTMLNIEHRIMLRMAPDYDHLTVMQKVEVFEHALDQTKGDDLAKLLWLKSPSSEQWFDRRTNYIRSLAVMSMVGYILGLGDRHPSNLMLDRLSGKILHIDFGDCFEVAMTREKFPEKIPFRLTRMLINAMEVTGIEGTYRRTCESVMNVLRRNKDSLMAVLEAFVYDPLLNWRLLDSDRLRRSKNAGDMDSVSGSMHEDSLLSYNARRDARLNELNATTGPAAGGQPSATNPVDVTNKKARAIVDRVKDKLTGKDFGKAEPVAVNRQIDLLIQQATSNENLCQCYIGWCPFW

SEQ ID NO: 149811 - DNA, 7272 bp, Gibberella zeae PH-1
  CDS (1)..(7272)
atggcgcaagcacagcagatcgccttggagcgactggagcaagtctcccgcggcctcaagtcaaaggttagcgacgatttgcgaaagcgatccgccgttcagcttcgcgagctcgtagttatttgccatcgagaccttagccccgaattgttccagtccttctacaacgcagtcaacaacaggattacacagctcatcacacatggaagcgactcttccgagcgactcggcggtatctacgctctcgatgcgctcatcgacttcgaaggcgtcgatgtcgccgttaaatacacgcgtttcacccagaatctaaagacgatcctccgtggaaaagacattaaccctatgcaaccagccgcaatcgcgcttggaaagttatgtcgacccggcggatcgatgatatcggaggtggtggattcagaggtcaacacagcactcgaatggctacagaacgaccgcgtggaagagcgacgatatagtgccgtcctcgtcctgcgtgaattggcccgcagcgccccaacgctcatgtatcaatacatcccgacaatttttgactggatctggattggtcttcgagactccagacagctcatccgggcgacatctgcggaaacagttagcgcctgcttccgaatccttcgcgaacgagaccaagagatgaagcagcggtggatgagcaatatttacaacgaagcgaagcagggtctcaaggtcaacaccgttgaatccatccacggttcattactcgtcttgaaagagcttctcgagcagggcgccatgtacatgcaggagcattaccaacaagcgtgtgagattgtctttaagcacaaggaccacagagacccgaccattcgaaagacagtggtcctcttgatccccgaccttgctagttattctccggccgatttcgcgcacacatggctacacaagtttatggtgtacctgtcgggcatgctcaagaaggacaaggagagaaacgatgctttcctggcaatcggtaacattgccaattcggtcaagagcgccattgctccttatcttgacggtgttttgatctacgtacgcgaaggtctcagcgtgcagtcccgtaagaggggatcagtcgatccggtattcgactgtatcagtcgtctcgccgtggctgtaggccagacgctcagcaagtatatggaggcactgttggatcccatctttgcatgcgaccttacccctaaactgacacaggcccttgttgatatggctttctacatccctccagtcaaacccacaatccaagaacgattactcgatatgctcagtgtggtgctctgcggcgaacccttcaagccgctcggtgcgcctcaccccaacactcttacctccgttccaattattcccaaggacgccaaggatcctctcgcttatgagcatcgaagggccgaggtcaagctggcgctcaacactcttggcagcttcgatttctccggacatgttttgaacgagttcgtccgggatgtcgcaatcaagtacgtcgaagatgaagacccagaaattcgggaggcggctgctttgacatgctgtcaactctacgtccgcgatcctattgtcaaccagaccagttatcatgcactccaggtagtcggggatgttatagaaaaacttctcactgtcggagtctcagatcctgaaccaaacataagaagaacggtcctggcagctctcgacgaacgattcgatcgacacttggccaaggccgagaacatccgcattcttttcttcgcgctcaacgatgaggtcttttccattagggaagtcgccatctctatcattggccgtttggctagatacaatccagcctatgttattccttcgctacgaaagacgctcatccaactactcactgagctggaattctccgacgtggcccgcaacaaagaggagagcgctaagctattgagtctcttggtccagaatgcgcagtctctcatcaagccatacgtcgagcccatgatctcggttctcttacccaaagcgaaagaccccaacccgtcggtggctgccaccatcctcaaggctatcggtgagctcgcgactgttggtggcgaggacatgatgccatacaaagaccgattgatgcctctcattcttgatgcgctacaagaccaaagctccaatgcgaagagagaggccgccttgcacgcacttggacagcttgcaagcaactccggatacgtcattttaccatatatcgagtaccctcaacttctagaaatcttgcagagcatcatcagaaccgaagggcaacgagtgccattgcgacaagaaaccatcaaacttatgggtattctcggtgcgctggatccttacaaacaccaggccgaagaacgaactcctgattcacgaaatggcgaggccactcaattgaccgacatctctctcatgatgaccggcctgacaccatcgaacaaggagtacttccctaccgtcgtcattaatgccctcctccaaatcttgaaggattcatccctcgtccagcaccacgccgctgtgattgaagcaattatgaacatcttccgcactctgggcttggagtgtgtgtctttcctcgaccgaattatcccggcattccttcaagtcattcgatcggccacctccacaaggctcgaatcgtacttcaaccaactcgctactcttgtcagcattgtcagacaacacatccgaaactacctgccatcaattgtcgagatccttcaagaatactggcacacctctccatcgctgcagactactattctgtcgctcgttgaggctatctccaggtcgcttgagggtgaattcaagatttacctcgctggtctcttgccgttgatgcttggagtcttggacaaggataactctgctaagcgcacgccatctgagagggttatgcacgctttcttagtgtttggtgccagcgcggaggagtacatgcatctcatcatcccagttatagtccgcacattcgagaaacagggtcagcctacatttattagaaagcaggccatcgacaccattggcaaaatctctcgacaagtcaaccttaatgactacgccgcaaagatcatccaccctctcacacgtgtgttggacatgggtgagcctgtgctacgaaccgcggctctggataccctctgtgctctcattcagcaattaggtaaggactacctgcacttcatgggcaccgtcaacaagaccatcaaccagcaccaaatccagcactccaactacgagctgcttgtgagcaagctccagaagggagaagttttgccacaggacctcagctcgggggctggttttggcgatggagccgacgaggctacctttgccgaccaaggcacgaagaagctagagatgaatgccattcacctcaaggctgcctgggatacaaagggcaagtcgaccaaggaggattggcaagagtggctacgacgcttcagtactactctacttacagaatcaccgaaccacgcccttcgagcttgcgccagtcttgcgagcgtataccttcctcttgctcgcgagctgttcaattctgcgtttgtgtcttgttggagtgaactatatgagcagttccaagacgagctcatccagaatattgagagcgcaatcaagtccgagaacgttccaccggatctgttgggtcttttgctcaacctcgctgagttcatggagcatgacgacaaggctttgccgatcgacatcagagtcctgggtagggaggctgctcgttgtcacgcgtacgcaaaggctttgcactacaaggaactcgagttcctgcaggatcagagcagtggtgctgtcgaggctttgatcgttatcaacaatcagctccaacagtctgatgctgccattggtattcttcgcaaagctcaactgtataaggaaggcattcagcttcgagagacctggttcgagaagttggagcgttgggaagaagcgcttgcgttttacaacaagcgtgaggaggaagtgcccgaggatcaagcaattcccgtcgacattgttatgggaaagatgcgttgtttgcatgccttgggagagtgggaggcactggcttcgctgactggcagcacctgggccaactctacaccagaagtccaaaggatgattgcacctttggcaacagctgccgcttggggtctcaacaagtgggattccatggacaactacctttcatcgctcaagaggtactcacctgatcgttcattctttggtgccattctggctctccaccgaaaccagttccgcgaggccatagcgtgtgtcacgcaagctcgtgaaggtctggataccgagttgagtgccctggttagtgagtcgtacaaccgagcataccaagtcgtcgttcgcgtccaaatgcttgccgaattggaagaactcatcgtgtataagcaatgcgatgagaagaagcaggccattatgagacgaacctgggaaacacgacttaagggttgtcaaaggaacgtcgaggtttggcagcgcatgctcaggctacgtgctatagtgattgcaccaactgagaacatgcacatgtggatcaagttcgccaacctttgccgcaagtctggtcgaatgggtctcgccgaaaagtcactcaaacaacttatcggaacagacgctcctttggagtctatgattccctactggaacgatcagcgacaacccggacctggtcctagaagcgcgccggcagcacaggtcatctacgctgtgctcaagtaccaatgggagactggacaacaagctgccaagaagacaaacatccccgaaaagacactgtactgcttgcgcaagtttactaatgatgctgcgcagagattggatatcaccagggcccatctcaatgctcaagtgggcagtgaagtcaacatcacgggcgactacggcttccagaaccctatggatcctacgattatgagccctcagacccagcgggcgttgtatgaacaaacggtcctgttggccaagtgctacttgagacagggagaatggctgattgcactcaacaaggacgactggcaatacactcaggtccaagacatcctcacctcttactctcaggcgaccaagtacaaccctcgttggtacaaggcttggcacgcttgggcactggcaaactttgagatcgtgcagactcttacagcccagaacgaaggaaccttatcgagggcggatcaatccatggtgattgaacacgtggtaccagctgtcaagggcttcttcaagtcgatcgcgctgtctgaaggaagctcgctgcaggacactcttcgtctgctcactctctggttcactcatggaggcagcgcggatgtcacttcagctgtcacagaaggctttgctaatgtcagcgtcgacacgtggctggaggtcattccccagttgattgcacgaatcaaccagcctaacaagcgcgttcagcaatcggtgcataacttgcttgccgatgttggacgagctcatcctcaagctttggtgtatcctctcaccgtcgccatgaagtcctggcagaacaccaggcgatctcgttccgcagctcaaattatggatagcatgcgacaacatagcgcaaacttggtcgctcaggcagacattgtcagccacgaactcattcgcgtggccgtcttgtggcacgagctttggcatgagggactcgaagaagcctcgcgcttgtactttggcgatcacaacattgaaggcatgtttgccactctggagcctctacacgagcttcttgagcgtggacccgagactcttcgtgagatttcgttcgcgcaagcatttggtcgcgaccttaaggaggctcaagactggtgcagacaatacgagacaagccaagacgtcaacgacctgaaccaggcatgggatttgtactaccaggtattccgcagaataagcaggcagttacctcaggttacaactctcgagttgacgtactgttcacccaaattgctcaacgcaaagaacctcgacctcgctgtgccgggaacatacaagagcgggcagcctattgtccgtatcatgtctttcgacacgacgtttagcgttatcaactctaagcagcgcccgcgaaagcttaatgtcaatggcagcgacggaaagtcgtacgccttccttctcaagggtcacgaagatattcgtcaggatgaaagagtcatgcagctgtttggtctctgcaataccctcctatcgcacgactcggaatgcttcaagcgtcacctcaacatccagcgctacccagctattcctctgtcgcaaaacagtggtctgctcggatgggttcccaacagtgacaccctccacgtccttatcagggagtaccgagagagtcgcaagattttgctgaatatcgaacatcgaatcatgctccagatggctcccgattacgacaacctgaccctgatgcaaaaggtcgaggtctttggttacgccttggacaacaccaccggccaagatctctaccgtgtattatggctcaagtcaaagtcgtccgaggcttggctcgagaggcgaacaaactacactcgctcgctcggtgtcatgtccatggtcggctacattctcggattgggtgatcgtcacccgtccaacttgatgcttgaccgtgtcaccggaaagattatccacatcgatttcggtgattgttttgaggttgcgatgaagcgtgaaaagtaccccgagcgggttcctttccgtctgacccgaatgttgacctatgccatggaggtcagcaacattgagggtagtttcagaatcacatgtgagaacgtaatgagggtattgagagacaacaaggaaagcgtcatggctgttctcgaagcgttcatccatgaccctctcctcacatggcgtctaacaaacgccccctccccagcaggccccaacttccgcaacgacagagacaccgccatgcccgtgcccggcggcgtccgcgcccgtcgccaatccatcctcgacagcgacgtcgccccctccgaactcctcaacgctcccgaaccatccatccaaacacgcgcgcgcgcccgcacaaacagctccgccggcgtccccgagaccaacggcggcgctccagaagtcgaaagccaaaacgcgcgagccgtcgaggttctcgatcgcgtgcagcagaagctcacaggtcgtgattttaagaataacgaggagctggatgttattaaccaggttaataagttgatcatggaggcgacgaagctggagaatctgtgtcagcattatatcggatggtgtagtttctggtag

SEQ ID NO: 149812 - protein, 2423 aa, Gibberella zeae PH-1
MAQAQQIALERLEQVSRGLKSKVSDDLRKRSAVQLRELVVICHRDLSPELFQSFYNAVNNRITQLITHGSDSSERLGGIYALDALIDFEGVDVAVKYTRFTQNLKTILRGKDINPMQPAAIALGKLCRPGGSMISEVVDSEVNTALEWLQNDRVEERRYSAVLVLRELARSAPTLMYQYIPTIFDWIWIGLRDSRQLIRATSAETVSACFRILRERDQEMKQRWMSNIYNEAKQGLKVNTVESIHGSLLVLKELLEQGAMYMQEHYQQACEIVFKHKDHRDPTIRKTVVLLIPDLASYSPADFAHTWLHKFMVYLSGMLKKDKERNDAFLAIGNIANSVKSAIAPYLDGVLIYVREGLSVQSRKRGSVDPVFDCISRLAVAVGQTLSKYMEALLDPIFACDLTPKLTQALVDMAFYIPPVKPTIQERLLDMLSVVLCGEPFKPLGAPHPNTLTSVPIIPKDAKDPLAYEHRRAEVKLALNTLGSFDFSGHVLNEFVRDVAIKYVEDEDPEIREAAALTCCQLYVRDPIVNQTSYHALQVVGDVIEKLLTVGVSDPEPNIRRTVLAALDERFDRHLAKAENIRILFFALNDEVFSIREVAISIIGRLARYNPAYVIPSLRKTLIQLLTELEFSDVARNKEESAKLLSLLVQNAQSLIKPYVEPMISVLLPKAKDPNPSVAATILKAIGELATVGGEDMMPYKDRLMPLILDALQDQSSNAKREAALHALGQLASNSGYVILPYIEYPQLLEILQSIIRTEGQRVPLRQETIKLMGILGALDPYKHQAEERTPDSRNGEATQLTDISLMMTGLTPSNKEYFPTVVINALLQILKDSSLVQHHAAVIEAIMNIFRTLGLECVSFLDRIIPAFLQVIRSATSTRLESYFNQLATLVSIVRQHIRNYLPSIVEILQEYWHTSPSLQTTILSLVEAISRSLEGEFKIYLAGLLPLMLGVLDKDNSAKRTPSERVMHAFLVFGASAEEYMHLIIPVIVRTFEKQGQPTFIRKQAIDTIGKISRQVNLNDYAAKIIHPLTRVLDMGEPVLRTAALDTLCALIQQLGKDYLHFMGTVNKTINQHQIQHSNYELLVSKLQKGEVLPQDLSSGAGFGDGADEATFADQGTKKLEMNAIHLKAAWDTKGKSTKEDWQEWLRRFSTTLLTESPNHALRACASLASVYLPLARELFNSAFVSCWSELYEQFQDELIQNIESAIKSENVPPDLLGLLLNLAEFMEHDDKALPIDIRVLGREAARCHAYAKALHYKELEFLQDQSSGAVEALIVINNQLQQSDAAIGILRKAQLYKEGIQLRETWFEKLERWEEALAFYNKREEEVPEDQAIPVDIVMGKMRCLHALGEWEALASLTGSTWANSTPEVQRMIAPLATAAAWGLNKWDSMDNYLSSLKRYSPDRSFFGAILALHRNQFREAIACVTQAREGLDTELSALVSESYNRAYQVVVRVQMLAELEELIVYKQCDEKKQAIMRRTWETRLKGCQRNVEVWQRMLRLRAIVIAPTENMHMWIKFANLCRKSGRMGLAEKSLKQLIGTDAPLESMIPYWNDQRQPGPGPRSAPAAQVIYAVLKYQWETGQQAAKKTNIPEKTLYCLRKFTNDAAQRLDITRAHLNAQVGSEVNITGDYGFQNPMDPTIMSPQTQRALYEQTVLLAKCYLRQGEWLIALNKDDWQYTQVQDILTSYSQATKYNPRWYKAWHAWALANFEIVQTLTAQNEGTLSRADQSMVIEHVVPAVKGFFKSIALSEGSSLQDTLRLLTLWFTHGGSADVTSAVTEGFANVSVDTWLEVIPQLIARINQPNKRVQQSVHNLLADVGRAHPQALVYPLTVAMKSWQNTRRSRSAAQIMDSMRQHSANLVAQADIVSHELIRVAVLWHELWHEGLEEASRLYFGDHNIEGMFATLEPLHELLERGPETLREISFAQAFGRDLKEAQDWCRQYETSQDVNDLNQAWDLYYQVFRRISRQLPQVTTLELTYCSPKLLNAKNLDLAVPGTYKSGQPIVRIMSFDTTFSVINSKQRPRKLNVNGSDGKSYAFLLKGHEDIRQDERVMQLFGLCNTLLSHDSECFKRHLNIQRYPAIPLSQNSGLLGWVPNSDTLHVLIREYRESRKILLNIEHRIMLQMAPDYDNLTLMQKVEVFGYALDNTTGQDLYRVLWLKSKSSEAWLERRTNYTRSLGVMSMVGYILGLGDRHPSNLMLDRVTGKIIHIDFGDCFEVAMKREKYPERVPFRLTRMLTYAMEVSNIEGSFRITCENVMRVLRDNKESVMAVLEAFIHDPLLTWRLTNAPSPAGPNFRNDRDTAMPVPGGVRARRQSILDSDVAPSELLNAPEPSIQTRARARTNSSAGVPETNGGAPEVESQNARAVEVLDRVQQKLTGRDFKNNEELDVINQVNKLIMEATKLENLCQHYIGWCSFW

SEQ ID NO: 149813 - DNA, 7371 bp, Candida glabrata CBS 138
  CDS (1)..(7371)
atgtcaagtttgaaactagaagatagggatagcagtgaaagtgccgcgttactccgatctgctgtaattggtaccccgaatgagcagagcatgtcaccggttcctatactcgactatgactctggttctgctagtaattttacaaagggggaatcaactatgttggaaagtgatgtgcttcccgatttggaatcattgcccatgctcatggactacattttagaattattgaaaagtccgaacgttagactaagactatcggctacaaataagctaaagaccgtcttaatatcattggctcatgagatatcaatagagcagtttcagagcttcaatcataagttggacaataagatttaccagatggttcacagtaaggatgtgagaagtcaaattgcaggtgtgctatccgttgactgtttaatatggtattattcacaaaccgaagaacttccaaattatactactaaacttgctggatatttaaaggtacttataccttccaaaaacttggatttaatgaagcaagcaattgagatactaggcaagttagctattccaacgagctcaataacttctgaatttttacagcacgaggttaaaaactgtatagagtggctaacaacatcacctgaaagcaaattctcaacccaaacccaagaactaaggaagcacgcgtcattacaaataattactgtattgagtaaaaactctcctactgtgttatacccatacatcaattctattcttgacaatatatggcgagcactacgagatccagataatttgatgcgttttgatgccgctaaagtagttggctgttgtttgagaatcatttcgaagagagatgaaagtgcatgtaaggaatggataatacaccttatgcaaggttgtgcgtttggactgactttaaaaacaacagatgctattcatgcaactttgttggtttatcatgagcttctcgaactggatagcgaatgcttaaatgacttttttgatgatatctactacgttactatgtcatttaaggatcataggtcaccattaattcgggaagaaatatgtagtattgtatcactgttggcatcacttaatccggtaatgttttctaatctttatttggacaaggtcatgaaccatttcctagatttacttcaaaatattacaacttacaacatttctaacaaagaaagatcgcatatctttatctctattggtgatattgctgataatgttggtgaaatgatgtttgaatttttagaacctacattaattacattgaaggaaagcctgagaacaaggtacaggacaagaaaagattacgaggagggtgtattctattgtattggaaaactatcttctgctatcagagaagatctacaaaaatatttggagggcggtctattaaaattaattctagaatgtcctttatcagatcatatgcaaaaaacactttctattttgagtgctaacacacctgactatgcaaagcatattgataaggaattgctagatctgttatgtatccatctttctggtgatcattttatagaacctggcacgcccataaaaggtaaaccgttttcaccaaatgcggcaagagtatggagaaatcaaaacgtttatcatcaaatcggaatagcaaatgatgacctaaatgacgctcaaattctgatacagactttgaagatattccgcgaaactaaatttaaggtagtattaactgagtttgttaagaatgtgataatatactatatcgaacatgaaaaccaacttgtgcgaaaactagctgctttaacaagttgtgaaatttttattaatgatagcatatgtaaagaaacttctctcaattctttgaatactgtatctgaagtactagagaaattgttaacagttgcggtgactgacttgaatcctgaaattagactagaaatattaaaacatctctcatccccatttgactcacatttggcaaaaccagagaatcttcagctgctgttcacagctctaaatgacgaactgattgctatccaaattgaggctatgaaaataattggtagactagtcacggttaatcctgcatatgttattccttccttaagaaactacttattgtctcttattactgaattgaagtatccaaatttttcaactagaaaagatgaggcagccacattgctatgtactttaatccaatcaagcaaaaatgttacgaaaccttatattgagcccattttaaacgttttattaccaaagttagatgacaactcctcaaccgtagcatccattgcacttaaagcaattggtgcactagcggtggttgggggtgaagatatgaagcagaataactcgacactatttccgttgatgataaaaacactccaggatcaatcaaactccttcaaaagagatgcagcattgaaatcattgggacaattggcagcctcttcaggatatgttatacgtccatttttagactatcctgatctgttaagtgtgttaattggtatcttaagggcagaaagtgcacaaaatattagaagggaaactgttagattaatcggtattttaggtgcgcttgacccacacaaacaaagagatgttgaagttaacctaaaaacaaagcttgcagtagaacagaatcaacctccaattgatgtggcattattaatgcaaggtaattctccatctaatgatgactattatcccacagtcgtgattgtttccctcatgaaaattctgaaggatccgtcattatcatcctatcatacatctgcagtgcaggccataatgcagatattccaaattatgggattgaaatgtatttcattccttgacaagattatacctgggataatttcagtcatgcatatgtgtcccagtaatcttttggatttttatttccaacagctatgtcaattgacagttataatgaaacaacatatacggccttatgttgacgaaatatatgatgcaattattgagttttttcgatttgagaacttacaggtcacaatattatctgttataaattctctatgttatgcactaaaaggtgagtttaaaagatttatccctttaactttaaatttattgttaggagttctagaaaaagatcgttcagctggaagagaaaactcaattagagttcttcagtcttttgtgatatttgacacaaatctagagttgtatgctcatactatattaccatcaatattaaaacttactgaattttctaccggccatcttagaaaggctgccatcataacggttggtaaactttcaaaatgtattaatttatcagagatggcgtcacgaatagttcactcattggcaagggtattgtatgttaatgatgacgaacttagggaagtgactctgaatacactatctttgttgttactacgtttgaaaagaaactatatcatatttgtcccagtagtcaatagaattttagttgattgctctataaagcacgccatatatgatgatttggttacaaaattacttaatggagaggctcttccgaatactatcatattggaagatgatactgagcagaaacaattatccttgtctaatatagctgaaactactgataaaaaacttccgataaaccaaaatggtttgaaatctgtttgggactgttctcagcttagaaccaaagaagactggcaagattggataaggcgtttatctatccagttcttaaaggagtcaccatctccagcgctacgcacatgtgctaatttggcaagcatttatcaccctctagcaagggaactattcaatgcctctttctccagcctttggtctgaattatacactcaataccaagaaagtttgatcggatctctatgtagtgcattatcatcaccacaaaaccccccagaaatacatcaagttttattgaacttaatagaattcatggaacatgatgataaaccgttgccaatcccaataaacactttaggacaatatgctgaaagatgtcacgcgtatgctaaagcactacattataaagaagtaaaatttataaaggagccggtaagctctacgattgagtccttgattagtattaacaatcaattacatcaaactgatgcagctataggtattctaaaacatgcacagcaacatcattcttatcagttgaaggaaacatggtatgaaaagctccaaagatgggatgatgcactagactcttataccaaaagggcggaagcaggagataactcaattgaagttactgtaggtagaatgaggtcattacatgctttgggtgaatatgaaaccttgtctcaactggcagaaaacaaatggaagacatctaatttgcaagtacgaaagaaaattgcacctctagctgctggggcggcttggggtttaggtgaatgggatgagattgaaaagtatattagcgtaatgaaagaaaattcgcctgataaggaattctttgatgcagttctgtgtttacacagaaacagatttgatgaggctgagaaacatatatttgctgctcgcgacttattggttacagaaatatcagcactaattaatgaaagttatactagagcttatggtgttgttgttcgtacgcaaatcatagctgaactcgaagaaataattgactataagaaggcatctcataactcggcaaaaagaacacattaccgcaatttatgggatcaacgtctactgggttgtcagaaaaatgttgacatttggcaaagaattctacgagtgcgctctttggtcgttaagccaaaacaggatatgcatatttggataaagtttgctaatttatgtcgtaagtctggcagaatgagtttggctcaaaaagctctttactcattactagaggatggtagtgatccaaatcaaccaaatactgcgaaggcaccaccaccagtagtttacgctcaattaaaatatctgtgggcgacatcttcccatgaagaggtcttgcatcatttaatcggattcacttcaagaatggctcatgatttgggtttggaccctagtaatatgatagcgcagagcgtaccgcaaaatgcgacggttgctccgcagcacattgagacatacacaaaattgctagcaaggtgctttttgaaacagggagaatggagagttgcaatacaacccaattggagagtgcaaaatcctgatgcgattttgggttcttacttattagcaacacactttgataagaattggtataaggcatggcacaactgggctttagccaattttgaggttattagtatgctaacgtcaaaaaataaaaatgaggacacgaacggcgctcaagttaatggggattggaggatcgaaaatagtataatgggaacagattattttagtaacgatgaaagtaagttctcccctgaaattatacagcgtcacgttgttcctgctatcaaaggtttctttcattcaatatccctccttaaggcaagttcacttcaagataatttacgtcttctgacattatggttcaccttcggtggagtagaagaagctaataaagcgatgcatgatggatttggtatgattaaaattgacaattggttagaagtcctaccacaattgatatctagaatacatcaacctaatcctgttgtgagtaaagcgttgctttcacttctttctgatttggggaaagcgcatccacaagcactaatttatcctttaactgttgcaattaaatccgagtctgtttcgaggcagaaagctgctttgtccataattgagaagatgaggatacatagtcctatcttagttgaccaagcggagttagtaagtcatgaactgatcaggttggctgttctatggcacgaattatggtatgaaggactggaggatgcaagtagacaatttttcggagagcataataccgaaaaaatgtttgcaacgttagaacctcttcatgagttactgaactgcgaacccgagactttacgagaggccacatttaagaaatccttcggcagagatctaaatgatgcttatgagtgggttctcaactacaagcgcacaaaagatgtaagcaacttaaatcaagcttgggatatatattataacgtctttagaaggattagcaggcaattgccacaattgcaatcattggaacttcaatacgtttctccaaaactattagcagcacatgatttggaattagctgtccctggaacatactcagccactaagaatgtgatcaagatatcttattttgaaccgacattaacagtcatatcgtcaaaacagagacctagaaagatatggattcatggtagtgacggtgttgaataccagtatgtcttaaaaggtcacgaggatattcgacaagacaacttagtaatgcagttatttggattggtaaataccctcctaagaaatgattctgaatgtttccaaagacatttggacatacagcaatatccagctattccattatctcctaaatctggtttattgggctgggttcctaacagtgacacttttcatgtacttattagcgaacaccgtgatgcaaagaaaattcctctcaacattgagcattgggttatgttgcagatggcaccagactttgacaatcttactctgcttcaaaagattgaagtatttacttatgctttagatagtacaaaaggtcaagacctgtataaaattttgtggctgaaaagtagatcatcagaggcatggctggatagaagaacaacatacacaagatcactagctgttatgtctatggttggttatattcttggtctaggtgatcgtcacccaagtaatttaatgttagacagaacaacaggtaaggtaattcatatcgacttcggtgattgttttgaagctgctatacttagggagaaattcccagagaaagtaccattcagattgactagaatgcttacattcgcaatggaggttagcggcatagaaggaagcttcagaataacttgtgagcacgtaatgagagttttgagggcaaacaaagaatctttaatggccatgttagaagcatttgcatttgatccattaatccattggggctttgatttaccaccgcagaaaataacagaaatgactggcattcagttgcaattaagtaacaccaacgaattgctacgtagaggagcaattactttagagcaagctaataaaatggaaaaagagcagcaagcggagatcaagaatgctagagcattgttggttcttcggagaatcatcaacaagttaactggtaacgattttaaaaggtgtaaggacctcggaattaatgaacaagttgataagttaatccagcaagctacttctgtggaaaatttatgtcaacattatatcggttggtgtccattttggtaa

SEQ ID NO: 149814 - protein, 2456 aa, Candida glabrata CBS 138
MSSLKLEDRDSSESAALLRSAVIGTPNEQSMSPVPILDYDSGSASNFTKGESTMLESDVLPDLESLPMLMDYILELLKSPNVRLRLSATNKLKTVLISLAHEISIEQFQSFNHKLDNKIYQMVHSKDVRSQIAGVLSVDCLIWYYSQTEELPNYTTKLAGYLKVLIPSKNLDLMKQAIEILGKLAIPTSSITSEFLQHEVKNCIEWLTTSPESKFSTQTQELRKHASLQIITVLSKNSPTVLYPYINSILDNIWRALRDPDNLMRFDAAKVVGCCLRIISKRDESACKEWIIHLMQGCAFGLTLKTTDAIHATLLVYHELLELDSECLNDFFDDIYYVTMSFKDHRSPLIREEICSIVSLLASLNPVMFSNLYLDKVMNHFLDLLQNITTYNISNKERSHIFISIGDIADNVGEMMFEFLEPTLITLKESLRTRYRTRKDYEEGVFYCIGKLSSAIREDLQKYLEGGLLKLILECPLSDHMQKTLSILSANTPDYAKHIDKELLDLLCIHLSGDHFIEPGTPIKGKPFSPNAARVWRNQNVYHQIGIANDDLNDAQILIQTLKIFRETKFKVVLTEFVKNVIIYYIEHENQLVRKLAALTSCEIFINDSICKETSLNSLNTVSEVLEKLLTVAVTDLNPEIRLEILKHLSSPFDSHLAKPENLQLLFTALNDELIAIQIEAMKIIGRLVTVNPAYVIPSLRNYLLSLITELKYPNFSTRKDEAATLLCTLIQSSKNVTKPYIEPILNVLLPKLDDNSSTVASIALKAIGALAVVGGEDMKQNNSTLFPLMIKTLQDQSNSFKRDAALKSLGQLAASSGYVIRPFLDYPDLLSVLIGILRAESAQNIRRETVRLIGILGALDPHKQRDVEVNLKTKLAVEQNQPPIDVALLMQGNSPSNDDYYPTVVIVSLMKILKDPSLSSYHTSAVQAIMQIFQIMGLKCISFLDKIIPGIISVMHMCPSNLLDFYFQQLCQLTVIMKQHIRPYVDEIYDAIIEFFRFENLQVTILSVINSLCYALKGEFKRFIPLTLNLLLGVLEKDRSAGRENSIRVLQSFVIFDTNLELYAHTILPSILKLTEFSTGHLRKAAIITVGKLSKCINLSEMASRIVHSLARVLYVNDDELREVTLNTLSLLLLRLKRNYIIFVPVVNRILVDCSIKHAIYDDLVTKLLNGEALPNTIILEDDTEQKQLSLSNIAETTDKKLPINQNGLKSVWDCSQLRTKEDWQDWIRRLSIQFLKESPSPALRTCANLASIYHPLARELFNASFSSLWSELYTQYQESLIGSLCSALSSPQNPPEIHQVLLNLIEFMEHDDKPLPIPINTLGQYAERCHAYAKALHYKEVKFIKEPVSSTIESLISINNQLHQTDAAIGILKHAQQHHSYQLKETWYEKLQRWDDALDSYTKRAEAGDNSIEVTVGRMRSLHALGEYETLSQLAENKWKTSNLQVRKKIAPLAAGAAWGLGEWDEIEKYISVMKENSPDKEFFDAVLCLHRNRFDEAEKHIFAARDLLVTEISALINESYTRAYGVVVRTQIIAELEEIIDYKKASHNSAKRTHYRNLWDQRLLGCQKNVDIWQRILRVRSLVVKPKQDMHIWIKFANLCRKSGRMSLAQKALYSLLEDGSDPNQPNTAKAPPPVVYAQLKYLWATSSHEEVLHHLIGFTSRMAHDLGLDPSNMIAQSVPQNATVAPQHIETYTKLLARCFLKQGEWRVAIQPNWRVQNPDAILGSYLLATHFDKNWYKAWHNWALANFEVISMLTSKNKNEDTNGAQVNGDWRIENSIMGTDYFSNDESKFSPEIIQRHVVPAIKGFFHSISLLKASSLQDNLRLLTLWFTFGGVEEANKAMHDGFGMIKIDNWLEVLPQLISRIHQPNPVVSKALLSLLSDLGKAHPQALIYPLTVAIKSESVSRQKAALSIIEKMRIHSPILVDQAELVSHELIRLAVLWHELWYEGLEDASRQFFGEHNTEKMFATLEPLHELLNCEPETLREATFKKSFGRDLNDAYEWVLNYKRTKDVSNLNQAWDIYYNVFRRISRQLPQLQSLELQYVSPKLLAAHDLELAVPGTYSATKNVIKISYFEPTLTVISSKQRPRKIWIHGSDGVEYQYVLKGHEDIRQDNLVMQLFGLVNTLLRNDSECFQRHLDIQQYPAIPLSPKSGLLGWVPNSDTFHVLISEHRDAKKIPLNIEHWVMLQMAPDFDNLTLLQKIEVFTYALDSTKGQDLYKILWLKSRSSEAWLDRRTTYTRSLAVMSMVGYILGLGDRHPSNLMLDRTTGKVIHIDFGDCFEAAILREKFPEKVPFRLTRMLTFAMEVSGIEGSFRITCEHVMRVLRANKESLMAMLEAFAFDPLIHWGFDLPPQKITEMTGIQLQLSNTNELLRRGAITLEQANKMEKEQQAEIKNARALLVLRRIINKLTGNDFKRCKDLGINEQVDKLIQQATSVENLCQHYIGWCPFW

SEQ ID NO: 149815 - DNA, 7416 bp, Candida glabrata CBS 138
  CDS (1)..(7416)
atgcaggccattttaagaaaaggagcagataagcgaataaaaacgggcaataaaagcaataaattgactgtacgaaagcatcgtaaatcagaggaagaactatcaaatgtttcggctccaggtggagacccaactgacaactcaacggcaagaagagctgcatcctcggctaatggggaagaaaatgcaaagtttattgatctcgaaaatggttgggatgattcggacatttcaccttcaaatttatatgatctatttgaaagactgaaaagtgatgaccagatggtgagaacaaatactgctatggaacttagaacatccatcatatcgattgccagagaaatacctactgatcaattccagagattcatcaacacactaaacaataaaatatttgaactgattcatggttccagttctaatgaaaagatgggaggaatcttagctgtcgattctcttatagacttttatttagaaatcggtgaactatcaaaccagacaacacgtctagcgaattaccttagagtactaatcccttctaatgatatagacgttatgcgtttggccacacaaactcttggaaagctggcacttcctcgagggacagtaacttctgaatttgttgactttgaagtcaaaacctgtttggaatggctaacagcatcgacagataacccaccattaaactttaaacaggaatataggagacatgcagcaatacttatactttactctcttatagaaaactctccatatttgctatttccttacatcaacccgatattggataatatatggggttcattaaaagatacaaagctaattataagaagagatgccgctgaaactatgagaaaatgcatggaaactttacaatccagagatccacaaaatgcaagagaatggtatcaaagatcgttttctacagcgactcaaggactgaattcaaataacatcgaaagcatacatgctacattattaacattcaaggaactacttaatctgaaggattcatacatcaaagataagtattctcagatatttcaggttgtgataaagtttagagatcataaaaatgacattgtgagacgagaagtctacgcaatactaccactacttgcaatgaatgattccgatatatttgccagtaaatatttggatcccacgatgtctttttatctcaaagtactgaaagatatggacagcagtacagccaacaatgcagataaagaagcgatatttatctctattggagatttatcagaaaatgtgagatcaaaaatgcactcctacattcaccaactggagataaatttgagagaaggactacaaacaaagtataaaattagaaaacactacgaaaaggcattattctattgcattatcaaattaactgccgctcttggtccagcaatcgctacaaatatcaataaaggatttttagatctaatattgtcatgccctttatcgtctcatcttttggaggttatggctaccataaaaaaatctattccagcactatcaacaagcattgataaaaggctaatagaaattgttcacgcatatttatctggggaaagatacaacgatggaaccaattctcaaataatgaaaacggtatcattaccgttggccaggaaatggagagatagggattactgttggaaaaccggtgaccaaaattccgataataacgacgacttcttacttgttcaaactctgaaaatggttgacataattgacccgaaacacttggtttcagaacacacaaaaatgtctataattgcttacattgaacatactcatgaaacagtaaggaaacttgctgcattgaagtctgtcgaactatacaagcttacagaggccaacctaccagatgatgaacatgcccttgatacatctgctacagttctaggcaaacttcttgttctggcaataactgatccaaactcaaatatacggttaagtatactacaatcttttgactatcattttagctctcaattagcacagccagataaccttagactactattttgctcagtgaacgatgaggtatatacaatcagactggaagctataagagtaataggtgctcttacagaattcaaccccatatatgttgtgccagaaatgcaaaaaatatttcttagctttttgacagaattgaaatattctgctacaaatagaaaaaaagaaaatatgctaactttgatccatgctgttataaattctcatcctgatactttagtaccgtttataaaagattgtcttgatagtctaatacaaagattagaagataattcatctgctgtagctacaatagccatgaaaactatcggtgcattggcggaagcagtgggacctgatataaccaattatgttcatcaactaatgccaataatcatatcgacattacacaatcaactaaattcaataaaaagagcgacagctataaaaacattgattcagatatcaagctcgactgcttatgtgatagacccactaattgagtaccctgaactccttggactattaatgaatattctaaaaaccgaatcaaatatggaaataaaacgtgatatcatccaattgatcggtacacttggtgctatcgatccatacaaataccgagcagttgagactaactctaaaggcgttcagaaaattgacacaacccagcattctacagccattgatttactgataaaaggaatgtcaccatctaatgaagagttttatccttctgtagtgatgcatagtcttgtgaaaatattgaatgacaattcattatcttcgtatcatactaatacccttcagacgatcatgcgtatctttcaggatatgggagtccaatcaatcatatttctgaaaatattggtcccagcaataaaatcagtggtgaaaacatgtccaccatctcatttggagttttatttccagcagttatcagttctagttaatactgttaatcaccatattgaacctttcaccgaagatatatttgaaatcattgctgatcatttctcaatcactaagttacaagtcgtcattatctctcttatcgagtcgatgtcacatttagtgaaaaataacctaaagagattccttcctaagacagtaaatttatttttgaacgtgttagaaaatgatcgctcaaatcaaaaaatggcttccgtttccattatgaaagcattaatagcgttcggaaaaaatttagaggattattcacatttaattattcctaccatcgtccgaatatgcgagtattcacaaaatcatttgagaaaaatctccattgttacatttggaaaattggcaaaatgtatcaatcttacagaactatcttcaatgattatcaatgcccttgtaagagtgttgacaaatggcgataagtctctaataaaggtcactatgaatactctctgcctgttattactgcagctcgggaatgattttgtcgtgtatataccaaccattcattctgttttaatcaaaaatagaatccaacactctatttatgatcaattagttaacaaactattgaatggtgaagttttgaacactaatatcttacttgataaagattctgaggaaaagaacaagaatataaacttacaaaacaatcccagaactgaaaaatttgtcgtcgatcaacaaatattaaaatcggcatgggattgctctcagcagaaatccaaagaagattggcaggaatggtttcgaaggttatctgttcacactattcgggagtccgcttcaccatcactgagggcgtgttctaatcttgtcagtgtttataacccattggcacgagatctattcaatgtttcattttcaagttgctggaatgaacttaatataggctcacgggagcatatactgaactcattatgtagcgctttatcctcgccgcaaaatccaactgaaatatacctaatcttgattaatcttattgagtttatggaacatgacatgaatcctttgccgattccagcaacaattacaggagaatacgctcaaaaatgcaatgcttttgcaaaagcactgcactataaagaaactgaattcattgaaaacgaaaaaccatgtatcatagagtctttgattgacataaataaccagttacatcaaccagatgcttcaataggtatcctaaagtatgcccaacagcattataatctccaattgaaggagacgtggtatgagaaacttcaaagatgggatgatgccttacaggcatacactgatcgtgaaaaaaatggggaagacacaccagaagtccttatgggtaaaatgagatccctgtacgcgttaggaaattggagtgaaattgctgatcttgcaaatgacaaatggaacactgttcctctacatattcaggaaaaactttcacccatagctgcaggatcttcatgggcgctacataattgggatgatatcgaaaaatattgttccatattacaggataattctattgataaagaatttttctcaactgtcatgtgcttgcaccacaacaattttgaagaagctgaacaacatgccgataatgtaaacagtttacttgttggtgaaatgtctgccttgattaatgaaagctatagtagaatatataattctgttgcaaaatgccaaacagttgcagaattaaaggaaattataaaatacaaacgtcttccgcgtatgtcgcccaaacgtaaagcgatgagagaaacctggaacaaaaggctgctaggttgccaacaaaatatcgatgtttggcaagtaatcctaaagactagatctttggttgttaatcctgaagatgatgaggaaatttggataaaatttgccaatctctgtagaagaaacggaagaatgaatatgactagagatgtactaaattctcttctgaaattcaatgagatgtctgagaacccagatattttacaggctagtcccgaggtcgtttattcctatttgaagtacaaatgggatacaggagaaaaaaactctgccttgaatcagttggctatatttataggcaaagttatcagagacttgggcctacaccctgaacacattatctctaataagacgttccaatcaaagactaacatatctcccaatgaaagaccaaaatatcagaaattacttgccacatgttttgcgaaacagggtgattggactatcgcccttgatcctaactggagcaatacagatccggggtcagttttaagttcctatcttctggcaactcattttgatccgcaatggtacaaagcttggcataactgggctttagccaattttgaagtaatatccatgatgtcatccacaaacaaggataccaattaccaaaaaagtaatgctccaataacaagcttctaccaaataagaaataatattttcgaaaagaacggcgaaactccttattacaatcaatttccatcaagactcataaataatcatgtcgtttctgctataaaagggtttttccattcaatcgcactgtccgattcaagtctattgcaagatgcattacgtcttttaactctatggtttacttttggaagtacttctgaaacgacacaggcgatgcaggagggttttaatatggttaagatcagtacttggcttgaggttttaccccaattaatttcgcatatacatcagccaaaccctctcattagtcgtgcacttcttactttactctcagatttgggtaaagaacatccgcaagcgcttgtataccctttaacagttgcaataaaatcagaatctttatctcgacaaaaagcagctatttcaattatcgataatgttcgctctcatagcccagtacttgttgaccaagctgaactattaagtcgtgagttgattagagtagtggccttatggaacgagatgtggtatgagggtttagaagacgcgagtcgacatttctttggagagaatgacaacacgaaaatgcttgagacactcgaaccactatatgagctcttgaataaaggcccagagaccatacgcgaaatatccttcaagtacgcttttggaaaagatctcacctatgcatatgaatgggtaaaaaaatacaaagaaacaggtgaggtaagtaacctaaaccaagcatgggacatttattatagcattttcaagaagataaacaaacagctaccacaaatggaaacattagaattgcaacatgtttcacctaaacttttagctgcgaagaatcttgagttagctatgcctggaacttatatccctggtactgaaatagttacaatagagagtgtgaatggtacatgtgaagttatatcttctaaacaaagacctagaaaaatagccttaaaaggaagtgatggtaaagagtacttatatgttctgaaaggtcatgaagatatcagacaagatagccttgtaatgcaattatttggtttggttaatacactactacagaacgatatcgaatgtttccagaggcatttggatatccaacagtacgcggcaataccattatcccctaaaacaggtcttcttgggtgggtaactgagagtgataccattcacgtgctgattaaagattatagagatgcaaagaaaatgccactgaatattgaacatctagttatgcttcaaatggcaccggattatgacagtctcactctattacaaaaagttgaggtctttaagtacgttctagataatactcaagggtttgatctttataacatattgtggttaaaaagcaaatcatctgaaacgtggttagagagacgtactacatacacccgatctttagcggttatgtctatgactggatatattttaggactgggtgaccgtcatccaagcaacttaatgcttaataggaatacagggaaagtagtacatattgactttggtgattgtttcgaagctgcaattttgagagaaaaatttccagaaaaagtaccttttagattaactagaatgttaatcaaggccatggaggtaagtggtgttgaaggtagtttcagaataacatgcgagaatgtaatgagagtgttacgtgataataaagattccctaatggcaatactagaagcatttgcatttgatcctcttattcggtggggatttgacctacccacagaacaaattaaaaaagagaatgacaagcacttcaaggcaactgaatctatatatggtattgacgaagcttcatcaatgagcaacataactactacgtcagtgaaggacaagaaaagagagtatatcaacactagggcagttttagttttgaagagaatatcaagcaagctcacaggtaatgacattccaaaacacgaagatctggatgttgcagaacaggtagatcatctaatcgaacaagctaagtctgttgaaaatttatgccaacactacattggatggtgcccattctggtaa

SEQ ID NO: 149816 - protein, 2471 aa, Candida glabrata CBS 138
MQAILRKGADKRIKTGNKSNKLTVRKHRKSEEELSNVSAPGGDPTDNSTARRAASSANGEENAKFIDLENGWDDSDISPSNLYDLFERLKSDDQMVRTNTAMELRTSIISIAREIPTDQFQRFINTLNNKIFELIHGSSSNEKMGGILAVDSLIDFYLEIGELSNQTTRLANYLRVLIPSNDIDVMRLATQTLGKLALPRGTVTSEFVDFEVKTCLEWLTASTDNPPLNFKQEYRRHAAILILYSLIENSPYLLFPYINPILDNIWGSLKDTKLIIRRDAAETMRKCMETLQSRDPQNAREWYQRSFSTATQGLNSNNIESIHATLLTFKELLNLKDSYIKDKYSQIFQVVIKFRDHKNDIVRREVYAILPLLAMNDSDIFASKYLDPTMSFYLKVLKDMDSSTANNADKEAIFISIGDLSENVRSKMHSYIHQLEINLREGLQTKYKIRKHYEKALFYCIIKLTAALGPAIATNINKGFLDLILSCPLSSHLLEVMATIKKSIPALSTSIDKRLIEIVHAYLSGERYNDGTNSQIMKTVSLPLARKWRDRDYCWKTGDQNSDNNDDFLLVQTLKMVDIIDPKHLVSEHTKMSIIAYIEHTHETVRKLAALKSVELYKLTEANLPDDEHALDTSATVLGKLLVLAITDPNSNIRLSILQSFDYHFSSQLAQPDNLRLLFCSVNDEVYTIRLEAIRVIGALTEFNPIYVVPEMQKIFLSFLTELKYSATNRKKENMLTLIHAVINSHPDTLVPFIKDCLDSLIQRLEDNSSAVATIAMKTIGALAEAVGPDITNYVHQLMPIIISTLHNQLNSIKRATAIKTLIQISSSTAYVIDPLIEYPELLGLLMNILKTESNMEIKRDIIQLIGTLGAIDPYKYRAVETNSKGVQKIDTTQHSTAIDLLIKGMSPSNEEFYPSVVMHSLVKILNDNSLSSYHTNTLQTIMRIFQDMGVQSIIFLKILVPAIKSVVKTCPPSHLEFYFQQLSVLVNTVNHHIEPFTEDIFEIIADHFSITKLQVVIISLIESMSHLVKNNLKRFLPKTVNLFLNVLENDRSNQKMASVSIMKALIAFGKNLEDYSHLIIPTIVRICEYSQNHLRKISIVTFGKLAKCINLTELSSMIINALVRVLTNGDKSLIKVTMNTLCLLLLQLGNDFVVYIPTIHSVLIKNRIQHSIYDQLVNKLLNGEVLNTNILLDKDSEEKNKNINLQNNPRTEKFVVDQQILKSAWDCSQQKSKEDWQEWFRRLSVHTIRESASPSLRACSNLVSVYNPLARDLFNVSFSSCWNELNIGSREHILNSLCSALSSPQNPTEIYLILINLIEFMEHDMNPLPIPATITGEYAQKCNAFAKALHYKETEFIENEKPCIIESLIDINNQLHQPDASIGILKYAQQHYNLQLKETWYEKLQRWDDALQAYTDREKNGEDTPEVLMGKMRSLYALGNWSEIADLANDKWNTVPLHIQEKLSPIAAGSSWALHNWDDIEKYCSILQDNSIDKEFFSTVMCLHHNNFEEAEQHADNVNSLLVGEMSALINESYSRIYNSVAKCQTVAELKEIIKYKRLPRMSPKRKAMRETWNKRLLGCQQNIDVWQVILKTRSLVVNPEDDEEIWIKFANLCRRNGRMNMTRDVLNSLLKFNEMSENPDILQASPEVVYSYLKYKWDTGEKNSALNQLAIFIGKVIRDLGLHPEHIISNKTFQSKTNISPNERPKYQKLLATCFAKQGDWTIALDPNWSNTDPGSVLSSYLLATHFDPQWYKAWHNWALANFEVISMMSSTNKDTNYQKSNAPITSFYQIRNNIFEKNGETPYYNQFPSRLINNHVVSAIKGFFHSIALSDSSLLQDALRLLTLWFTFGSTSETTQAMQEGFNMVKISTWLEVLPQLISHIHQPNPLISRALLTLLSDLGKEHPQALVYPLTVAIKSESLSRQKAAISIIDNVRSHSPVLVDQAELLSRELIRVVALWNEMWYEGLEDASRHFFGENDNTKMLETLEPLYELLNKGPETIREISFKYAFGKDLTYAYEWVKKYKETGEVSNLNQAWDIYYSIFKKINKQLPQMETLELQHVSPKLLAAKNLELAMPGTYIPGTEIVTIESVNGTCEVISSKQRPRKIALKGSDGKEYLYVLKGHEDIRQDSLVMQLFGLVNTLLQNDIECFQRHLDIQQYAAIPLSPKTGLLGWVTESDTIHVLIKDYRDAKKMPLNIEHLVMLQMAPDYDSLTLLQKVEVFKYVLDNTQGFDLYNILWLKSKSSETWLERRTTYTRSLAVMSMTGYILGLGDRHPSNLMLNRNTGKVVHIDFGDCFEAAILREKFPEKVPFRLTRMLIKAMEVSGVEGSFRITCENVMRVLRDNKDSLMAILEAFAFDPLIRWGFDLPTEQIKKENDKHFKATESIYGIDEASSMSNITTTSVKDKKREYINTRAVLVLKRISSKLTGNDIPKHEDLDVAEQVDHLIEQAKSVENLCQHYIGWCPFW

SEQ ID NO: 149817 - DNA, 7353 bp, Kluyveromyces lactis NRRL Y-1140
  CDS (1)..(7353)
atgctcagaagaaagggagagtccgccaagaaaaggttggtgtcaggaacagcagcctccttacaagagcttagtttgaagcccaattccaatggtatacaatcatctggtaaaaccgaggacacagatgtacctggggatagcatttccggcgaatttggtgcagcattatccgattctaatgttgaaaatagtgttaaagcgttcaatttgatctttaccaaacttaaaagtaccagtgagatggaacgtacagctgcctcattcgagttgagatcatcgttgatttcattggcaagggaagtttctacggaacattttcaacggttcagtaatgatattaataataaagtatttgaattgattcacgggaacgactctaacgaaaagctaggtggtgttttagctgttgatactttgattgatttctattctcgtactgacgaactaccaaatcaaacatcaagattggcaaactatttacgtgttctaataccatccaatgatattgaagtaatgagagcagcagcaggaaccttaggtaaactagcagttcccggtggaacattgacatcggaatttgtggaattcgaagttaaaacatgcattgagtggttgaccacatctccagaaaactcctcatcgaattcaaaacaagaatataggaaacatgcatctttattaattatcagtgcaattgctgataattctccatatctactatatccatttgtgaattcaatcttggataacatttggagagcgttgagagatacaaaacttgtaattagaacagatgcatctgtcacattgggaaaatgtttgactatcattaataaccgtgattcctctctgacgaagaaatgggttcaaagactatttaatggatgcatatatggattacaactcaatagtactgtttccatacatggtacattgttggtttatagacagttggtatcattggaaggtggatatttgaaggacaaattcgaagagatatatgagactactatgagatacagagaaaacaaaaacattataattagaaaggaaatctacgctatcattccggtacttgctgcgtttgatcctaagctatttacacaaaaatatttggattcaacaatgatccattacttgactttactaaagaatatgaactcgcatccggttacaaattctgacaagggtcctatcttaatttctgttggtgatattgcatattacgttggtccagatattggaccatatcttgacgccattgtcgaaaacctacgggatggcctaacgacaaaatacaaattcagaaaggattatgaacaggaaattttctattgcatcggcaaactcgcatgcgcagttcgtccattattagcaaaatatctaaacagaggactacttgaatatatgttagcatgccctttaagtgatcacatgcaagagaccttactgattgtatgcgagaaaatcccttcgttggagggaacaatcaatgaaaagctactcaatataatatgtcttgtactatctggtgagaagttcagaccaccgggatcccctacccctatgaaaccattctccgcagagaccgcaagaaattatagagatcaatcactcttcaagaaaactggtgaagccaataacgatatttttgatgctgttatacttacgaaggctttaaggatgctttccgacataaaacccaaatattctctcacagagttcattaggcgtgtcatcatatcatatatggaacatgacaatttgcaagtgaggaagcttgcagctttgacgtcatgcgatctattcgtagaggactccatctgtaagcaaacttcactttacgctttgaatgttgtttccgaggtattgagcaaactattgactgtagcaattacagatccagttgccgagattagacttgagatcttgagacacttagatactaattttgaccctcaattatcacaaccagataacactaaactactatttatggccctgaacgacgaagtctttgcaatccaaatggaagcaatgaggatatgtggtcggttagccctcgtgaatcctgcatatgtcattccatctttgaggaaaactcttattcagttattgactgaattgaaacactcaaagctaactagaaagaaagaagagtgtgcttctctattatgtacattgatcagctccagtagtgatgttacaaagccatatctagagcctgtaattgaaatactactaccgaagtcacaagactcttcctctgcggtggcatcaacagctcttaaagcaatcggtgagctatcggtggtcggaggtgaagatatggttcctttcttggatgaattgatgccattaataattgatactttccaagatcagtctaactcattcaaaagaaatgcagctttgaaagcattaggccaattatctgcctcttcgggatatgttattgatccgctattagattatcctgaattacttggcgttcttctcaatattttaaaatctgaaagttcacagaacattcgtagagaaaccgtcaggctgataggtattcttggtgctttagatccgtataaacacagagaagtggaacgtacatctagtacaaatattacggtagaacaaaatgcccctccaattgatgtggctttgttaatgcaaggtatgtctccatctaacgaggagtattatcctaccgtagtaattggagtcctcatgaagattttgaaagatccttcgttatctattcaccattcaactgttattcaagcgatcatgcacattttccagacaatggggcttcgctgtgtcatatttttgaaacagatcattcctggatttatactggttatgcacacatgtccaccttcacttcttgagctctacttccaacagctcagtgttttgatttcaattgtgaaacaacacatcagactacatgtgtctgaaattgtggaagtaatctcagaattcttccctatcgtaaagctacaattaactatcatctcggttatcgaatcactatcaagagccttagaaggagaattcaatccttatttacctaatatactatctttgtttttggatgttttggaaaaagaccagtcgaataagaaggttgtctcaattagaatattgaagtcattggtagtttttggaccacatctagaggaatatgctcacctcgtactgccaactatcataaaactatcggagtttagctcaggaaatttgaagaaggccgcaatcattactataggacgtctatcgaaaaatgtcaatccactagaaatgtcgtctaggattgtgcaagccctagtaagagtcttaaatacatcagaactcgagtacgtgaaagcaacaatgaacacattaagtttacttcttttacaactcaatattgattttactgtattcattccagttatcaataaaactttagtcaaacagaacattcagcacacaatatacgaccgtttggttgccaaacttttgaataatgagccactaccgaccaaaattattattgataaagatttcgatttacctaataaagaaatggacgatgtaaaggtagcttccaagaagcttcctgtcaaccaacttgtgctaaaaaatgcctgggattgtagtcaacaaagaacaaaggaggactggcaagagtggattagacggctatcaatttctttactcaaagaatcatcttctcatgctttacgtgcctgctccggattggctggtatctactatccattagctagagaattattcaacgcctcatttgcaagttgttggggtgaactttacacgcaatatcaagaggatttggttcagtctttgtgctctgctttatcctcaccaaacaatcctcctgaaatccaccagacattattaaatttggttgaattcatggagcatgacgacaaaccgctaccaatttctatatcaactcttggcgaatacgctcagcgttgtcatgcatatgcaaaagctttacattataaagaactggagttcattgaagagccaacaacttcaactatcgagtccttaatcagtatcaataatcaattacaccaaacagatgcagcaatcggtattttgaagcatgcgcagcaacaccacgatctacaattgaaggaaacttggtacgaaaagttacaaagatgggatgacgctttgactgcgtataataagcgtgaggctgctggtgaagattcgatagaagttacaattggtaaaatgagatcattacacgccttaggtgactgggatcaattgtctgaacttgcagcagacaagtgggcttcgtcaaagatagacattaagagagcaatcgctcctctggctgcgggtgctgcgtggggtttagctcaatgggatcgaatcgagcagtacattgaggtgatgaaaccacaatctccagataaggccttctttgctgccgttctttgtctacatcgcaacaatttcgataaagcacaagaacaaatctttgctgccagagatcttcttgttactgaaatgtctgccttggtgaacgaaagttacaaccgtgcttatggtgttgtggtaagaactcaaatggtcgcggaattagaagaaataattcagtataaaaatttaccacagggttccgatagacgggctatgatacggaagacatggaacaaaagattgttaggttgtcaaaagaatgttgatgtctggcaaagaattctaaaggtacggtcactagttataaagcctaaacaagatatgaaagtatggattaaatttgctaatctttgtaggaagtccggacggttaggtctagctcagaagacattgaacactcttctggaagagagtagtgatccaaagaatccaaatactgctcgtgcacctccaccagttgtctacgcccaattgaaatacatgtgggctacaggttctcaaaaggaagcactcaaccatttaataagctttacttctcgtatggcacacgatctaggcctcgatcccagtaacatgatagctcaaagtgtcccacagaatagcagcgtatctcagcatcacattgaagactatacgaagttacttgctcgttgtttcttaaagcaaggtgaatggagagtctcactacagccaaattggcgcctggaaaatcctgatgctatcctaggttcctatttactagctactcactttgataagtcgtggtataaagcttggcataattgggcattggcaaacttcgaggtcacttcgtcgcttacccagcgaatcaaagatgacaaagttctaacacttgaagacgcctctacggagtttaccaatggtgccgtggcagggcttggcgcgaatgaaaatttccctccagaactggtccaacgtcatgtcgtgccagccatcaaaggttttttccgttctattgctctttcccaatcgagttctttacaggatacgttaagattactcactttgtggttcaaattcggtggtattccagaagctgcacaagctatgcatgaaggctttggattgatcaagatcgataactggttagaagttatcccacaattgatctcccgaattcatcaaccaaatcaaaccgttagtagatctttactatctttgctagctgatttgggtaaagcccatccacaggcattagtgtatccattgacagttgccattaaatctgattcggtctcaagacagagggcagctttgtccatcatagataagatgagaatgcacagtcctaaacttgtcgatcaagcagaattagtaagtgacgaattgatcagagtcgctgttttgtggcacgaactttggtacgaaggtcttgaagatgctagtagacaattctttggtgaacataacacggaaaagatgtttgccactttggagccattgcatgagatgctaaaacgtggtcctgaaaccttgcgtgagatttcgttccaaaattcgtttggtagggatttgaacgatgcccacgagtgggtaatgaactacaagagaacaaaagatatcaacaaccttaaccaagcttgggatatctattataatgtcttccgtcgtattagcaggaaactccctcaattacagacgttggatctccaacatgtttcaccaaaactagctgctgcgaaagatttagaacttgctgttccaggtacatatcatgccggaaaacctgtcattagaattacccatttcgagccaatatttactgttatttcatccaaacagcgtcctcgtaggctatctatcaagggtagcgatggtaaagactatcaatatattgtcaagggccatgaagatatcagacaagataatttggtcatgcaattgtttggtttggttaatactttattacagaataaccccgagagtttccaaaggcatttgaacattcaacaataccctgctatcccattatcacctaaatccggtcttttgggatgggttccaaatagtgatacattccatgtcttgatcagagaacatcgtgaagcaagcaaagttccactaaatatagaacacagaataatgctccaaatggctcctgattatgataacctaactctattgcaaaaagtggaagttttcacttatgctcttgataacaccaagggccaggacttgtataaggttctatggttaaagagtcgttcatcagaatcatggctcgaacgtcgtacaacttacacaagatcgttagccgtcatgtcaatggtaggatatattttaggtttaggtgatcgtcatccaagtaatttgatgttggaccgtgttactggtaaagttgtccacattgatttcggtgactgtttcgaagctgcaattctcagagagaaatacccagaaaaggtaccattcagattaacaagaatgttaacgtacgcaatggaagtcagtggtattgaaggtagtttccgtatcacctgtgagaacgtaatgatggtcctaagggataataaggagtccttgatggctattttggaagcctttgcatacgatccattaatcaactggggtttcgatctaccgactcaagccgtgatggaacagacgggaatagatctacctcttgcaaatccaagtgagttactaagaaagggcgtcatcaccgttgaagatgcggccaagatggaactacaacaaaaggcagaagtccgcaacgcaagagccactcttgttctcaaaagaatcgctgataaacttactggtaacgatttcccaaggtatcaagaactatctgtgcctgatcaagtcgacaagttgatccagcaagctacatcagtagaaaacctatgtcaacattacatcggctggtgttcgttctggtga

SEQ ID NO: 149818 - protein, 2450 aa, Kluyveromyces lactis NRRL Y-1140
MLRRKGESAKKRLVSGTAASLQELSLKPNSNGIQSSGKTEDTDVPGDSISGEFGAALSDSNVENSVKAFNLIFTKLKSTSEMERTAASFELRSSLISLAREVSTEHFQRFSNDINNKVFELIHGNDSNEKLGGVLAVDTLIDFYSRTDELPNQTSRLANYLRVLIPSNDIEVMRAAAGTLGKLAVPGGTLTSEFVEFEVKTCIEWLTTSPENSSSNSKQEYRKHASLLIISAIADNSPYLLYPFVNSILDNIWRALRDTKLVIRTDASVTLGKCLTIINNRDSSLTKKWVQRLFNGCIYGLQLNSTVSIHGTLLVYRQLVSLEGGYLKDKFEEIYETTMRYRENKNIIIRKEIYAIIPVLAAFDPKLFTQKYLDSTMIHYLTLLKNMNSHPVTNSDKGPILISVGDIAYYVGPDIGPYLDAIVENLRDGLTTKYKFRKDYEQEIFYCIGKLACAVRPLLAKYLNRGLLEYMLACPLSDHMQETLLIVCEKIPSLEGTINEKLLNIICLVLSGEKFRPPGSPTPMKPFSAETARNYRDQSLFKKTGEANNDIFDAVILTKALRMLSDIKPKYSLTEFIRRVIISYMEHDNLQVRKLAALTSCDLFVEDSICKQTSLYALNVVSEVLSKLLTVAITDPVAEIRLEILRHLDTNFDPQLSQPDNTKLLFMALNDEVFAIQMEAMRICGRLALVNPAYVIPSLRKTLIQLLTELKHSKLTRKKEECASLLCTLISSSSDVTKPYLEPVIEILLPKSQDSSSAVASTALKAIGELSVVGGEDMVPFLDELMPLIIDTFQDQSNSFKRNAALKALGQLSASSGYVIDPLLDYPELLGVLLNILKSESSQNIRRETVRLIGILGALDPYKHREVERTSSTNITVEQNAPPIDVALLMQGMSPSNEEYYPTVVIGVLMKILKDPSLSIHHSTVIQAIMHIFQTMGLRCVIFLKQIIPGFILVMHTCPPSLLELYFQQLSVLISIVKQHIRLHVSEIVEVISEFFPIVKLQLTIISVIESLSRALEGEFNPYLPNILSLFLDVLEKDQSNKKVVSIRILKSLVVFGPHLEEYAHLVLPTIIKLSEFSSGNLKKAAIITIGRLSKNVNPLEMSSRIVQALVRVLNTSELEYVKATMNTLSLLLLQLNIDFTVFIPVINKTLVKQNIQHTIYDRLVAKLLNNEPLPTKIIIDKDFDLPNKEMDDVKVASKKLPVNQLVLKNAWDCSQQRTKEDWQEWIRRLSISLLKESSSHALRACSGLAGIYYPLARELFNASFASCWGELYTQYQEDLVQSLCSALSSPNNPPEIHQTLLNLVEFMEHDDKPLPISISTLGEYAQRCHAYAKALHYKELEFIEEPTTSTIESLISINNQLHQTDAAIGILKHAQQHHDLQLKETWYEKLQRWDDALTAYNKREAAGEDSIEVTIGKMRSLHALGDWDQLSELAADKWASSKIDIKRAIAPLAAGAAWGLAQWDRIEQYIEVMKPQSPDKAFFAAVLCLHRNNFDKAQEQIFAARDLLVTEMSALVNESYNRAYGVVVRTQMVAELEEIIQYKNLPQGSDRRAMIRKTWNKRLLGCQKNVDVWQRILKVRSLVIKPKQDMKVWIKFANLCRKSGRLGLAQKTLNTLLEESSDPKNPNTARAPPPVVYAQLKYMWATGSQKEALNHLISFTSRMAHDLGLDPSNMIAQSVPQNSSVSQHHIEDYTKLLARCFLKQGEWRVSLQPNWRLENPDAILGSYLLATHFDKSWYKAWHNWALANFEVTSSLTQRIKDDKVLTLEDASTEFTNGAVAGLGANENFPPELVQRHVVPAIKGFFRSIALSQSSSLQDTLRLLTLWFKFGGIPEAAQAMHEGFGLIKIDNWLEVIPQLISRIHQPNQTVSRSLLSLLADLGKAHPQALVYPLTVAIKSDSVSRQRAALSIIDKMRMHSPKLVDQAELVSDELIRVAVLWHELWYEGLEDASRQFFGEHNTEKMFATLEPLHEMLKRGPETLREISFQNSFGRDLNDAHEWVMNYKRTKDINNLNQAWDIYYNVFRRISRKLPQLQTLDLQHVSPKLAAAKDLELAVPGTYHAGKPVIRITHFEPIFTVISSKQRPRRLSIKGSDGKDYQYIVKGHEDIRQDNLVMQLFGLVNTLLQNNPESFQRHLNIQQYPAIPLSPKSGLLGWVPNSDTFHVLIREHREASKVPLNIEHRIMLQMAPDYDNLTLLQKVEVFTYALDNTKGQDLYKVLWLKSRSSESWLERRTTYTRSLAVMSMVGYILGLGDRHPSNLMLDRVTGKVVHIDFGDCFEAAILREKYPEKVPFRLTRMLTYAMEVSGIEGSFRITCENVMMVLRDNKESLMAILEAFAYDPLINWGFDLPTQAVMEQTGIDLPLANPSELLRKGVITVEDAAKMELQQKAEVRNARATLVLKRIADKLTGNDFPRYQELSVPDQVDKLIQQATSVENLCQHYIGWCSFW

SEQ ID NO: 149819 - DNA, 7554 bp, Debaryomyces hansenii CBS767
  CDS (1)..(7554)
atgtctacaactcagctacaaatagttgacggtatagcattaacccaaattttcaatggtttaaaatcaaataaggaagaagagagaaatagatatgccttagaattacgaaattatctagcgtctatagctagagatctatctccggagcagttcaatcggtataataatgatatcaacaaaactatttttgaatttttgcatagtaatgaaacctcggagaagttggggggtatagcagcgttgaattcattgattgattttgattcgggtgtaggagaagaaaatgctacaaagacggctagattttcaaactacttgggttcattaatcttgtcaaacgatttaacaatcatgaagcaagcaaccatgactttaggtaagttggcgacacccggtggtactcttacaggtgacttcgttgattttgaagcaaaaagggccatagaatggttacagagtgacaataaacaacacgagaacagaaggcacgcagcaatattgattatcactgcattggtggataatgctcctacgttattgtataattttataaaccagattttggagcatttatggattccattgagagatagcaaattggtgataagaactgatgcagctattgctttacagaaatgtatgcgaataatttatgatagagatattaactctcgtcgattttggatcaaacatttcatagatatggcttcaaagatattaaacgaaaatgttgctagaaaccccacatctgaatccaacgactcaagcaataatggaagcggcaataatagtgtgaactctgttaacgcagcggcaagtacggcctataatttaatttattccacagctacgggatcacaaactaacgagtcaatccacggttctcttcttgtgtacagggaactaattacatttcatagtgatccatacattcattccaagtttgaattgatttacgaaaatacagtattgtataggaatcacaagcaagctataattaggcaagaattaactaagatcattccactactatgcaaagtaaatacagaattatttgttgaaaaatatttgcacagaacattgttgcattatttgtcacagttaaaacaattaaaaagtcaacacagtgagactgccaataatgataaaagtgccatttttagaagtatagggttaatttcgttggaagtagggaaccaaatggctacttatttggatgctatattagataatattcgagatgggttatcttatccttctaatccaagcgtgcaactgattttagtaaatgcagtatctaataatggagataatccactatctggtgcagtgacgtcgagtaatggatcctcgcaatcgacaatcaatggtttgaatagcatttctacttcaggttccgggcccacaaagtatagattgagtcgaaagaatactgaacctgccatttttgattgcatcagtaaattgtcgattgccgtaggtccagctttgacaaagcatttacaacgtgatatattagatatgatgtttagtaattgttccttatcggtctacatgcagaatgttttacaaactttgatcgttaatattccgatgttaactaatcttataagcatgaagttattaaacttattaagtttggttttatcaggtaagattttccaacctcctggttcgccttacggatccatcaaaatgaacgaatcattagcaagagactatagattaataatgatatcaagagacacaggattgagtatcaacagtatacttaatgacgcggatgactatgaaaattatgatagtgcaatcttggtccaagcattaaatatgctagcattttttgagttcgaaaactaccagctaaacgagtttgttagatactgcacaattacgtatcttgaacacaacgttcctaaagttcgtcaaacagccacgataacatcctgtgaaatatttatcaaggatccaatttgtcaacaaaccagcgtgaatgcattaaacgctgttaatgaggttttagacaagcttctatcaatagccatcaccgatcctataccagaaatacggttagaaggtttaaattgtttggcaaatgctggaaatcttgatcctcaactttcccaagctaataatgttagacttctatttattgcattaaacgatgaagtattcagtattaggaagatagcgataaaaatattgggtagattatcatcgataaatcctgcctatattgttccttctttaaggaaaactttaatacaattgttatcgcgtttggaatactcaccaacaagccgtaaaaaggaagaaagtgctacattgatatcgcttctcataagcaattcaaaagaattaaccagaccttacgtgaagccaatagttgaagcattattgcctaaggctaaagatcccagttcatcagtggcagcaagtgcaatcaattgtcttggtgagctagcagttgtaggtggggaagatttgcaaccttttattcctgatttgatgccactaattttggaaacgtttcaagatcagagttcttcttataagagagatgctgctttgaagacgttgggccaattggcaagttcgtctggctacgttattaagcctttacttgactatccgcagttattggggatgttagtaggaatattgaaactggagagttcgcctcacataagaagggaaacagtaaggctattgggtatattaggtgctttggacccttataagcatcgtgaagttgaacaaaattctaagaatataccttcagaacaaaatgcaccaccagtggatgttgcattgttaatgcaaggtatgtcaccttctaatgatgaatactatccgacagttgccataaataacctaatgaaaattttaaaagacccatcattgacagctcatcataataaagtaattcaagccattatgtacattttccaaacattgggattaagatgtgtttcatttttaccacagatcattcctggaattattaatgtcatgaatacatgtcagccttcgatgttgaaattttacttccagcaactaggtgcattaatattgatagttaaacaacacataagaccattccttcctgaaatatttgaagtcatcaaagagtcgtttaacataaacatccaattaaatgttcaggtgatcattataaatttgatagaatccatttcaagggctttagaaggggaatttaaaatgcatcttccagatgttttgaatttgatgttaaatgtttttgaagatgataaatcagttaagagagaaccatcgttacatgttttgaaagcatttgttgtttttggaagtagcattgaagaatatgtccatataattgtcccaaacatcgtgaaaatgtttgaaatggggccgattgtattacgtagggctgcaattgagacaattggaagattatcgaagcaagttctattaaatgatatggcatctagaatcatacatcccattttacgtgtattgcgccaaggcaatgatgaattgaaaactacggcgatgaatactttaagttacttactattgcagttgggtaatgagttcagtgtgttcattcctgtaatcaaatcattgttgatacagcagaaaattcattcagcaattttcgagcaacttgttaataagttattaagtggagatccattaccagcttatcttaacatttataaggattatgatatccatgttaaccattttgatgttcctgacgttgatatgccatcgaaaaagttaccggtaaaccaaggtgcattaaaggcagcttgggattcaagtctgcgtcaaaccaaagaagactggcaagaatggattgggaggttaagtaaagaattattgaagcaaagtccatcgcatgcaataagagcatgcgctgggttagcaactgattatcatcctttggcaaaggacttgtttaacgcaagttttgcaagttgctggagtgaattatattcccagcaccaagaagagttagtagaatcattttgtattgcattatcatcagcaaacaatcccccagaaatacatcagattttattaaatttagctgaatttatggaacatgacgataaatctttaccaatagcaataacaactttaggtcagtatgcgcaacggtgccatgcatatgctaaagcattgcattatcaagaattagaattttatgtggaacctacgacaccaaccattgaatctttaattagtatcaacattcagcttcaacaatctgatgcggctgttggaattttgaaacatgcacagttacatcatgatctccaattaaaagagacatggtatgagaagttacaaagatgggatgatgccttgcgagcttatagtttaagagagaaacaggaaccggacaatatggagattaccatgggtaaaatgagatgttaccatgctttaggagaatgggagcagttatcagaattagcccaaagtaaatggaataactcttcaagtgacataaagagaggagtggctcctttagcagcagcagcagcttgggggttaggccaatgggatagaatggatgcatgtattaaggttatgaaaactgaatccccagataaagctttctttaatgcaattttaagtttacatcgtaatagttttgaggatgcatctaatcacatattgaaagcaagagacctattagtaactgaaatcacagcattggtgagtgaaagttataatagagcttatggtgtcgtagtaagggtacaaatgcttgcggaattagaggaaattattaagtataaatgcttaccacaagggtcagagaaacgtgttataatgagaaaaacctggaataccagattacttggatgtcagaggaatgttgacatttggcaaagaatgttgaaagttagagctcttgttattaaacctaaacaagatatggatatgtggattaaatttgcaaatttatgtcgtaaatcaggaagattgaatttggctgaaaagtccttaaactatttgttggaagaaggttcaccagaaaatccatctagagctccaccacaagttgtgtatgcacaattgaaatatatgtgggctaagggccaacaaagagaagcattacgccatttagttgattttacaactcgaatgtctcaagatttgggtttaaacccaaatgacttaattactcaaccattaccgtctgaaggtccaggtattccaaagcatgtggaagagtataccaaattattggctagatgttttttgaagcaaggtgaatggcaaatattattgaacaataattggaggactgaaacatcagaaattattttgggggcatatcttttggctacacattttgatgacaaatggtataaagcatggcataattgggctcttgctaattttgaagttatttcactttttacttcgcagaataacaacggcaacaatggtacaatcaatgttagtcaaggtgaaataatggatcaaaatgatcaagttgttacatcatctgatgaacaatctcaacagccacagagacagatacaacctgcaaatattataccgatggatgttgttcagcgacatgttgttccatcaataaaaggattctttcacgctatcgcattgtcaaatacaaattctttgcagaatacgttgagattacttacattgtggtttaagtttgggggaataccagaggcagctcaagctatgaatgagggatttaatatggttaagattgataactggttggaagttgtacctcaattaatctcacgtattcatcaaccaaatcaaacagtcagtagatctttaattggattattgagtgatttgggtaaagcgcatcctcaggcactcgtgtatccgttagctgtcgcagttacgtctgaatcggttagccgtaaaagggcggcattgtcaattattgataaaatgcgtttgcattgggctacgttggtagatcaatctgatttagttagtcatgaattgatcagagttgcagtcctctggcacgagcagtggtacgaaggtctagaggatgcatcaagacttttctttggtgaaaagaacactgaaaagatgtttgaggtgttagaacctttgcatcaaatgctacaaaaaggccccgagactatgagagaagcatcatttaataatgcatttggtagagaacttgctgatgcctatgaatgggttttgaacttccgtcgtacaaaagacattactaatctaaatcaagcgtgggacatttattataatgttttccgcagaattagtagacaattgcctcaattgctgagtttggaattacagtatgtatcgccaaagctagaggaagcaaataatcttgaattggctgctccaggtacataccatgctggaaagccaacaatcaagattgttaagtttgatccaacgttctcagttatctcatcgaaacagagaccaagaaaattatcttgtaaaggtagtgatggtaaagaataccagtacgttttgaaaggacacgaagacattagacaagataatttggttatgcaattatttggtttagttaacacattattggtaaatgatccagaatgtttcaaaagacatttagacattcaacaatatccagcaattccgttatcacctaaagttggtttattaggttgggtaccaaacagtgatactttccatgtcttgattagggaataccgtgagtcgcgtaagattttattaaatattgaacatcgtattatgttgcagatggctcctgattatgacagtcttacattactacaaaaagtggaagtattcacaggggctttagacaacaccagaggccaggatttgtataaggtattatggctcaaatcaaagtcttcggaagcgtggttagatcgtcgtacaacgtatactcgttcattggcagtaatgtctatggtaggctacattttaggtttaggtgaccgtcatccttctaatttgatgcttaataggattacaggtaaggttattcatattgattttggtgattgttttgaggctgctattttacgtgaaaagtatcccgaaaaggttccatttagattaacaagaatgcttaattatgctatggaagttagtggtattgaaggttcattccgcataacatgtgaacatgttatgagagtcttaagggacaataaggagtcattaatggcaattttggaagcattcgcatatgatccattgattaattggggatttgacttcccgacaaaagcagtggcggaagctactgggattaatgtaccgcaagttaatatagcagaattattgagaagagaacaaatagatgaacaagaagcagctagattaacgagacaaaacgaaatcgagattagaaacgcgagagctgcattggtgttgaagagaattactgataagttaactggtaatgatattaaaagattgaatgatttagatgtaccaactcaagtggataaattaattcagcaagctacaagtgtagagagtttatgtcagcattatattgggtggtgttcattttggtag

SEQ ID NO: 149820 - protein, 2517 aa, Debaryomyces hansenii CBS767
MSTTQLQIVDGIALTQIFNGLKSNKEEERNRYALELRNYLASIARDLSPEQFNRYNNDINKTIFEFLHSNETSEKLGGIAALNSLIDFDSGVGEENATKTARFSNYLGSLILSNDLTIMKQATMTLGKLATPGGTLTGDFVDFEAKRAIEWLQSDNKQHENRRHAAILIITALVDNAPTLLYNFINQILEHLWIPLRDSKLVIRTDAAIALQKCMRIIYDRDINSRRFWIKHFIDMASKILNENVARNPTSESNDSSNNGSGNNSVNSVNAAASTAYNLIYSTATGSQTNESIHGSLLVYRELITFHSDPYIHSKFELIYENTVLYRNHKQAIIRQELTKIIPLLCKVNTELFVEKYLHRTLLHYLSQLKQLKSQHSETANNDKSAIFRSIGLISLEVGNQMATYLDAILDNIRDGLSYPSNPSVQLILVNAVSNNGDNPLSGAVTSSNGSSQSTINGLNSISTSGSGPTKYRLSRKNTEPAIFDCISKLSIAVGPALTKHLQRDILDMMFSNCSLSVYMQNVLQTLIVNIPMLTNLISMKLLNLLSLVLSGKIFQPPGSPYGSIKMNESLARDYRLIMISRDTGLSINSILNDADDYENYDSAILVQALNMLAFFEFENYQLNEFVRYCTITYLEHNVPKVRQTATITSCEIFIKDPICQQTSVNALNAVNEVLDKLLSIAITDPIPEIRLEGLNCLANAGNLDPQLSQANNVRLLFIALNDEVFSIRKIAIKILGRLSSINPAYIVPSLRKTLIQLLSRLEYSPTSRKKEESATLISLLISNSKELTRPYVKPIVEALLPKAKDPSSSVAASAINCLGELAVVGGEDLQPFIPDLMPLILETFQDQSSSYKRDAALKTLGQLASSSGYVIKPLLDYPQLLGMLVGILKLESSPHIRRETVRLLGILGALDPYKHREVEQNSKNIPSEQNAPPVDVALLMQGMSPSNDEYYPTVAINNLMKILKDPSLTAHHNKVIQAIMYIFQTLGLRCVSFLPQIIPGIINVMNTCQPSMLKFYFQQLGALILIVKQHIRPFLPEIFEVIKESFNINIQLNVQVIIINLIESISRALEGEFKMHLPDVLNLMLNVFEDDKSVKREPSLHVLKAFVVFGSSIEEYVHIIVPNIVKMFEMGPIVLRRAAIETIGRLSKQVLLNDMASRIIHPILRVLRQGNDELKTTAMNTLSYLLLQLGNEFSVFIPVIKSLLIQQKIHSAIFEQLVNKLLSGDPLPAYLNIYKDYDIHVNHFDVPDVDMPSKKLPVNQGALKAAWDSSLRQTKEDWQEWIGRLSKELLKQSPSHAIRACAGLATDYHPLAKDLFNASFASCWSELYSQHQEELVESFCIALSSANNPPEIHQILLNLAEFMEHDDKSLPIAITTLGQYAQRCHAYAKALHYQELEFYVEPTTPTIESLISINIQLQQSDAAVGILKHAQLHHDLQLKETWYEKLQRWDDALRAYSLREKQEPDNMEITMGKMRCYHALGEWEQLSELAQSKWNNSSSDIKRGVAPLAAAAAWGLGQWDRMDACIKVMKTESPDKAFFNAILSLHRNSFEDASNHILKARDLLVTEITALVSESYNRAYGVVVRVQMLAELEEIIKYKCLPQGSEKRVIMRKTWNTRLLGCQRNVDIWQRMLKVRALVIKPKQDMDMWIKFANLCRKSGRLNLAEKSLNYLLEEGSPENPSRAPPQVVYAQLKYMWAKGQQREALRHLVDFTTRMSQDLGLNPNDLITQPLPSEGPGIPKHVEEYTKLLARCFLKQGEWQILLNNNWRTETSEIILGAYLLATHFDDKWYKAWHNWALANFEVISLFTSQNNNGNNGTINVSQGEIMDQNDQVVTSSDEQSQQPQRQIQPANIIPMDVVQRHVVPSIKGFFHAIALSNTNSLQNTLRLLTLWFKFGGIPEAAQAMNEGFNMVKIDNWLEVVPQLISRIHQPNQTVSRSLIGLLSDLGKAHPQALVYPLAVAVTSESVSRKRAALSIIDKMRLHWATLVDQSDLVSHELIRVAVLWHEQWYEGLEDASRLFFGEKNTEKMFEVLEPLHQMLQKGPETMREASFNNAFGRELADAYEWVLNFRRTKDITNLNQAWDIYYNVFRRISRQLPQLLSLELQYVSPKLEEANNLELAAPGTYHAGKPTIKIVKFDPTFSVISSKQRPRKLSCKGSDGKEYQYVLKGHEDIRQDNLVMQLFGLVNTLLVNDPECFKRHLDIQQYPAIPLSPKVGLLGWVPNSDTFHVLIREYRESRKILLNIEHRIMLQMAPDYDSLTLLQKVEVFTGALDNTRGQDLYKVLWLKSKSSEAWLDRRTTYTRSLAVMSMVGYILGLGDRHPSNLMLNRITGKVIHIDFGDCFEAAILREKYPEKVPFRLTRMLNYAMEVSGIEGSFRITCEHVMRVLRDNKESLMAILEAFAYDPLINWGFDFPTKAVAEATGINVPQVNIAELLRREQIDEQEAARLTRQNEIEIRNARAALVLKRITDKLTGNDIKRLNDLDVPTQVDKLIQQATSVESLCQHYIGWCSFW

SEQ ID NO: 149821 - DNA, 6951 bp, Yarrowia lipolytica CLIB122
  CDS (1)..(6951)
atgtccgacgcgagcgttttgaatagcatcttccagcagttgcggacagcccgcacactgactgaaaaaacacacgctgcagaagaactgcgcgaccatctaacctccgtcacgcacgaactcaacacagagcctctctcgcgctacaacaacgacatcaaccttcgcatttccgagctaatccacaatggcgaccccgtcatccggctgggcggtatcatggccattgaccggctcattgacgtcgatgtcggcgaggaaaacgccataaaagtgacccggttcaccaactacctgaagacgactattccaggagatacagaatcgatgcgcattgccgtcgacgctctcggccgtctagctgccacgggaggcaatttgtctgccactgtggttgaatccgaggtcaacagagctctcgaatggctccagagcgaccgaggagagggctctagacgccatgctgccgtcatggtgatcaagagtatggcccagcattgtgccacgttgctgtacgggtacatgagccagatccttgacctgatctgggtgggactgcgtgatccgaaggtgcagattcgggttgactcggccgaggcgctgcagtactgcctgaacattgtgcattctcgtgaccagacccttaaaaagcagtggttcaaccgaattatggaggaggccaaggtgagtttgaacatgggtggtgtcgacaccattcatggcgctctgctcacctacaaggaagtccttcgaggaggcatgtttgagaactcacgatacgacgaggtgtgtgaggttgtgttagccaaccgcgactcgcgtgacgtgctgatccgaaagacggtgctcaacatcatcccagaccttgcccaatacaatccctggcagtttacaaagcggtatctgcacaaatgcatgttgtaccttctttcacagctcaagaaggacaaggaccgtaaccttgtttttctgtcgattggccagatttccttttctgtccggtcggccatggctccttacttggacgccattctggaaaatatccgagaaggtctcagtctgaaatctcgatataggaaggagcaggagagtgccattttctcctgtattggcatgttggctgttgctgtgggtcaggctctggccaagcatctgaaccaaaaaattctggatctcatcatggcttgtggtttgagtgaacacctgcacaattgtctgagtgagctggttcacaacattcctccactgggcccttccatccagcagcggttgttgaacatcatctcgttcactctctctggccacccctttaagctccctgggtctcctgctgcgacttcttctgcagagtacatgtctgtgacacgtgcacgggagtaccgagagactgaggacgacaaggatgatgcagccgtggttgcgcttgctcttcacattctcggcacgtttaacttcaagggtttgtcgctgaccgagtttgtgcggttctgtgcaatcacttatgttgatcatgactctcctgaggtgcgaaaagcagccgccctctcatcttgcaccatttatctcaacgaccctattgtgttccagttctccgctcatgctctgagtgccgtttccgaagtggttgagaagctgttgacggtggctgtggttgatcctgaccctgatatccgaattggtattctcactacatttgatccgcgaattgaccctcatttgtcccaggccgagaacgtgcgtcttttattcactgctttgaacgacgaggtttttgcgattagacagctgtccattggcattatcggtcggctgacaaagataaaccctgcttacgttgttcctcatctgagaaaaacgttgattcatcttctgaccgaactggagtatgccaagtttggacgtaccaaggaagagagtgcgcggctgcttgcacagctgattgggtcgacgcacggactcatcaagccgtacgtcaaacccatcatcaaggtgctgcttgctcgtgcacgtgacacgtcttccaacgtggcctccgcggttatcactgctatcggagagctagctgccactggacgggaaggcatgattgagtacattcccgagattatgcctattttcttggaaactttttcggatcagaatgctcagaagaagctggctggtctgaaatctctcggacagctctcttcctcttccggatacgttattcagccgctgctggattacccccagctgctcacactgcttactaacactctcaagagcgacaatgttgatactcgtcgagaaactgtccgtctcatgggtattcttggagctctggatccttataagcatcgagaggtggagagaagtacccaggatgattcagcagagtatgactcgatccccacagatgtggctcttctcatccagggcatgtctccctcttcggacgagtacaaccacactgtcgtgattacaactctaatggcgattctcaaggaccagtcgcttgtatcgcaccacaatgctgttgtccaagccattgtcatcattttcaagtcgctgggtctcaagtgtgtgccgtttttgaatcagattatccctggctggctgcaagtgcttcgaagcagtactccttctatggccgagttttttgtccagcagttggctcttctggttctcattgtcaagcagcacattaggtcgtatcttgacgacatttttgctgttgttcaggagctctttgccattccatccatgcagcctgttgtcctgacgctggttgaaaacattgctcggtctctgagtggcgagttcaagctgcatgtgcctactctcttgcctctgcttcttggcgtgctggagaacgacaaaagcaccaccaagctcacctccatcaaggtgctgcagacgttcgtggtgctgggcgccaacattgaggactacattcacctcatcatccccatcattgtgcgaatgttcgaatactcgactcatcagctcaagaaacgggccattcagactattggacagttgtctcgaactgtggatctcaccgacatgtcgtcgcgaatcgtgcatcctctgttgcgtgtactggcagcctgtcctgtgactgaagagcccaattcgcaccatgatgagttgcggcgaaccgtcatggagactctgtcatcgctgtgtttccagctgggttccgattacaccattttcatcccccttgtgaacaaggctatgctcaaggccggagtgaactctccctcctacgaccagctggtcaaccgactcctctctggagaaccactgcctgcgtccatggaccccgacagtcgaatccaggagctcaacaatactcctccggataccacctcgctcaacaagctgcctgtgaaccaacagcacttgaagaccgcgtgggacactgcgcaatgctcgactaaggaggattggcaggagtggatgcgacgtctctcgactgctttcctgcgcgagtcttcttctcacgccctgcgagcctgtggtgtcattgctaacaactatcagccattggccaaggacctgttcaatccgtccttctactcgtgctggtctgagctctacgaccagtacaaggacgacttggtgaaccacattgagacggctctgatggcgcccaacatgccgcccgagacgctgcagatcctgctaaacctggccgagtacatggagcacgacgacaagccgctaccgatcgatatgcgtactctggctgcctatgctcaccgctgccatgcctacgccaaggcgctgcactacaaggagctggagtttatgcgggagcctacgacgcccatcattgagaatctgatcgctatcaacaactcgttgcagcagagcgacgctgctatcggtattctcaagcacgtgcagcagcatcatcagtggcagctcaaggaatcgtggtacgagaagctgcagcggtgggacgatgctctcgaggcctacgacaagcttgatgacaattccatggaggtcacaatgggtaagatgcgatgtctgcatgcccttggtgagtgggagtcgctggccgagattgcacaggagaaatggacttcatcaggccccgaggtgcgacgagtggtggcacccctggctgccgcagcttcctggggtttgtctcagtgggagcgaatggacacatatattagtgtcatgaaggtggactctgccgacaagtccttcttcaacgctgtggtgagcatccacagaaacaactttgatgaggcccatacgcatatcactcgtgcacgtgacttgctggctaccgagctcaccgctctcatttctgagtcgtacaaccgagcctatggtgttgttgtgcggttccagatgctggcagagctggaggagattatcgtctacaagggtctgggtcgcaactccgaggagcaggctgccatgcgggccacgtggatgaagcggctcaagggctgtcagcgaaacgtagaggactggcagcgaatgctcaaggtgcggtctctggttgtcaagccgaaacaggatatggagatgtggatcaagtttgcaaacctgtgtcgaaagagtggtcggctctctttggctgaaaagtcgctcaatgctcttcttgaccccgatgatcccgactcacagacttccagagctcctccacctgttgtttacgcccagctcaagtacatgtgggctactggcaactgggaagatgccctgaatcacctcgttgactttaccaatcgaatgtcgctcgatctgggcctggatcctgaagatctcatcactcagaaactaccctcagaaggcgctgctgtccctaagaagattcaggactacactcgtcttcttgctcgatgtttcctcaagcagggcgagtggcagatttcgttgcaggacgactggaaggagaagaaccccgattctatcctcggctcgttcctgttggccactcattttgacgccaaatggtacaaggcgtggcacaactgggcgctggcaaacttccaggttgtgtctctgcggtactcggaaaaggaggagttggccctggaagacgtgtctcaatatgtggtacctgccatcaagggtttcttccattccatctccttgtccaatggatcttctctgcaagacactcttcgtcttctgaccctgtggttccggtacggccatgtgtctgacgcgtctcaggccctttatgacggattccagatgctttctattgacacgtggctggatgtcattcctcagctcatttctcagattcaccagcggtctcaggttgtttccaaggctctgcagggtcttctgattgagctcggtaagaaccatccccaggctctgctgtacctgctcaacgtggctgtcaagagtgactctctgtcgcgtcaacaggccgctatgaacgttattgacaaaatgagaactcacaaccccatcctagtcgagcaggctgagctggtgtccaaggagctcattcgagtggctgttttgtggcacgagcaatggcacgagggtctggaagatgcgtcgcgattcttctttggcgagcgaaacattgaaaagatgttccagacgctagagcctctacacgcaatgctggagcggggtcccgaaactctgcgagaagtgtccttccaaacagcttttggacgtgacttgcacgatgccaacgagtgggtgtggagttttaagcgaaccaatgaccctgcccacctcaaccaggcctgggacatttactacaatgttttccgacgaatcgccaagcagttgccccagctcatctcgcttgacctgcagtacgtgtctcccaagctgctggcagccgagaatctcgagctggcggtgcctggttcgtacgctccgggcaaggagattgtgcgaatcatgaagttcgacccaattttcaccgttatctcgtccaagcagcggcccagacggctgtcgtgcaagggcagtgatggtaaggactacgtgtacgctctcaagggccacgaggatatcagacaggataacctggtgatgcaattgtttggactggtgaacactctgctatctcaggactcggagtgtttcaagcgacatctcaacattacaaagtaccctgccattcctctgtcccccaagtctggtctcctcggctgggtgcctcattcggacactctgcatacactcatcaaggaataccgggatggccgaatcctcatcaacgtggagcatagattcatgctgcagatggcgccggactacgatccattgacgcatctgcaaaagattgaggtgtttacgtacgctctggacaacactaagggccaggatctgtaccgagtcttgtggctcaagtcgcggtcctcggaagcttggttggagcgacgatctcaatacacacgatccttggctacgatgtccatggttggctacattctcggacttggagatcgacatccctccaacctgatgctggaccgatacactggtaaggtgattcacattgatttcggtgactgtttcgaggctgccattctgcgagaaaagtaccccgaaacagtgcccttccgactgactcgaatgctcacatacgccatggaggtgtcaggaatcgagggctcgtaccgaatcacgtccgagcatgtgatgcgggtcatccgagacaacaaggagtcgctgctggccattctggaagcctttgcctatgatcctctcatcaactggggtttcgagcttcccagaggcgaggatctgcctgtcaagcggttcgatgaggacgaaaaggtcaatgttcgaatggctcgagcgcacttggtcctcaaacgaatccaggacaagctgtctggaaacgacatcaagaacagaaaaaatgtcgatgtgccggcacaggtggactacttgattcagcaggccactagcattgagaatctgtgtcagcacttcataggttggtgttctttctggtag

SEQ ID NO: 149822 - protein, 2316 aa, Yarrowia lipolytica CLIB122
MSDASVLNSIFQQLRTARTLTEKTHAAEELRDHLTSVTHELNTEPLSRYNNDINLRISELIHNGDPVIRLGGIMAIDRLIDVDVGEENAIKVTRFTNYLKTTIPGDTESMRIAVDALGRLAATGGNLSATVVESEVNRALEWLQSDRGEGSRRHAAVMVIKSMAQHCATLLYGYMSQILDLIWVGLRDPKVQIRVDSAEALQYCLNIVHSRDQTLKKQWFNRIMEEAKVSLNMGGVDTIHGALLTYKEVLRGGMFENSRYDEVCEVVLANRDSRDVLIRKTVLNIIPDLAQYNPWQFTKRYLHKCMLYLLSQLKKDKDRNLVFLSIGQISFSVRSAMAPYLDAILENIREGLSLKSRYRKEQESAIFSCIGMLAVAVGQALAKHLNQKILDLIMACGLSEHLHNCLSELVHNIPPLGPSIQQRLLNIISFTLSGHPFKLPGSPAATSSAEYMSVTRAREYRETEDDKDDAAVVALALHILGTFNFKGLSLTEFVRFCAITYVDHDSPEVRKAAALSSCTIYLNDPIVFQFSAHALSAVSEVVEKLLTVAVVDPDPDIRIGILTTFDPRIDPHLSQAENVRLLFTALNDEVFAIRQLSIGIIGRLTKINPAYVVPHLRKTLIHLLTELEYAKFGRTKEESARLLAQLIGSTHGLIKPYVKPIIKVLLARARDTSSNVASAVITAIGELAATGREGMIEYIPEIMPIFLETFSDQNAQKKLAGLKSLGQLSSSSGYVIQPLLDYPQLLTLLTNTLKSDNVDTRRETVRLMGILGALDPYKHREVERSTQDDSAEYDSIPTDVALLIQGMSPSSDEYNHTVVITTLMAILKDQSLVSHHNAVVQAIVIIFKSLGLKCVPFLNQIIPGWLQVLRSSTPSMAEFFVQQLALLVLIVKQHIRSYLDDIFAVVQELFAIPSMQPVVLTLVENIARSLSGEFKLHVPTLLPLLLGVLENDKSTTKLTSIKVLQTFVVLGANIEDYIHLIIPIIVRMFEYSTHQLKKRAIQTIGQLSRTVDLTDMSSRIVHPLLRVLAACPVTEEPNSHHDELRRTVMETLSSLCFQLGSDYTIFIPLVNKAMLKAGVNSPSYDQLVNRLLSGEPLPASMDPDSRIQELNNTPPDTTSLNKLPVNQQHLKTAWDTAQCSTKEDWQEWMRRLSTAFLRESSSHALRACGVIANNYQPLAKDLFNPSFYSCWSELYDQYKDDLVNHIETALMAPNMPPETLQILLNLAEYMEHDDKPLPIDMRTLAAYAHRCHAYAKALHYKELEFMREPTTPIIENLIAINNSLQQSDAAIGILKHVQQHHQWQLKESWYEKLQRWDDALEAYDKLDDNSMEVTMGKMRCLHALGEWESLAEIAQEKWTSSGPEVRRVVAPLAAAASWGLSQWERMDTYISVMKVDSADKSFFNAVVSIHRNNFDEAHTHITRARDLLATELTALISESYNRAYGVVVRFQMLAELEEIIVYKGLGRNSEEQAAMRATWMKRLKGCQRNVEDWQRMLKVRSLVVKPKQDMEMWIKFANLCRKSGRLSLAEKSLNALLDPDDPDSQTSRAPPPVVYAQLKYMWATGNWEDALNHLVDFTNRMSLDLGLDPEDLITQKLPSEGAAVPKKIQDYTRLLARCFLKQGEWQISLQDDWKEKNPDSILGSFLLATHFDAKWYKAWHNWALANFQVVSLRYSEKEELALEDVSQYVVPAIKGFFHSISLSNGSSLQDTLRLLTLWFRYGHVSDASQALYDGFQMLSIDTWLDVIPQLISQIHQRSQVVSKALQGLLIELGKNHPQALLYLLNVAVKSDSLSRQQAAMNVIDKMRTHNPILVEQAELVSKELIRVAVLWHEQWHEGLEDASRFFFGERNIEKMFQTLEPLHAMLERGPETLREVSFQTAFGRDLHDANEWVWSFKRTNDPAHLNQAWDIYYNVFRRIAKQLPQLISLDLQYVSPKLLAAENLELAVPGSYAPGKEIVRIMKFDPIFTVISSKQRPRRLSCKGSDGKDYVYALKGHEDIRQDNLVMQLFGLVNTLLSQDSECFKRHLNITKYPAIPLSPKSGLLGWVPHSDTLHTLIKEYRDGRILINVEHRFMLQMAPDYDPLTHLQKIEVFTYALDNTKGQDLYRVLWLKSRSSEAWLERRSQYTRSLATMSMVGYILGLGDRHPSNLMLDRYTGKVIHIDFGDCFEAAILREKYPETVPFRLTRMLTYAMEVSGIEGSYRITSEHVMRVIRDNKESLLAILEAFAYDPLINWGFELPRGEDLPVKRFDEDEKVNVRMARAHLVLKRIQDKLSGNDIKNRKNVDVPAQVDYLIQQATSIENLCQHFIGWCSFW

SEQ ID NO: 149823 - DNA, 7329 bp, Apis mellifera
  CDS (1)..(7329)
atgtcaagtatacttgtacaacaatttgttcaaagacttaaatccagaaatgaagaaatacgtaacaaagcagctagagatttatgtctctatgttaaaacagaactacgtgaagtatcacaggaagaaattacagcttttatggatgaatttaatcaccatatatttgaaatggtatctggttcagatgtaaatgaaaaaaaaggaggtatcttagctatagtttgccttattggagctgatgtgggaaacattaatacaagaactataagatttgcaaattatttaaggaatttattaccctctaatgatgtgggtgttatggaattagctgctaaaacagttggtaagctagcattagtttctggtacttatacagcagaatatgtagaatttgaagtaaagcgtgcctttgaatggcttggtggtgatagacatgaaggtaaaagacatgctgctgttcttgttttaagagaacttgctgtttctatgccaacatatttttttcaacaagtgacaccattttttgaactcatatttaatgcaatacgtgatccaaaacctgtgataagagaaggtgctgttgaagcattaagagctgctttagttgttactgcacagagggaaacagcaaagcaaatgcacaaatcacaatggtacaaacaatgttatgatgaaatagtaacaggattcgaggaaatatatactagagaaagaggagtaaatagggatgatagaatacatggttcactcttaatattaaatgaattattaagatgtagtaacattcaatgggaaaaaaattatgaagctttaatggaacgattaaattgttctactcaacaaaatgagaatgatatattgtcattaatgcctcgattaaaaacaacaatagtatctaaatggtctaattcttctcaaaattcgactaattctcaacagacattatatccatcacatgaatctgcagtatgtcgttgtttaatgcaagaacgattagatgatatatataatgatgtaatgaatcagagaatatctagaaatccacatattcaacatgctcttatgatattgttaccaagacttgcagcatttaataaagaaaaatttacaaaagatcatttaagagaatcactagcatatcttctaatgactttacgtagtagagaaaaagatagatatgctgcatttacaacaattggatttatagcagttgcagtagaagattcgataaatccttatctttcaaaaattatggaaatgatcaaaagtttattaccttctaaggaaacatctactaagaaacgtggagcatctttggagcctgcagtattcatttgtataactttacttggacatgcagtaaaacaagttatagctgcagatgtcagagatttgttagaatctatgttacagactggattaagtcctattcttacaacttctctcagagaactagctcatagtgttccatcattaaaacctgatatatctcaaggacttttacgaatgttatctcaagttttgatgcagaaacccttaagacatcctggtgcaccatggactgcaactagtcctatatctggtcctccaactgaagtggatattccatctacagttttagctttaaaaactctaggaacatttaattttgatggtaatccacttttgcaatttgtaaggcgatgtgctgatcattttcttacatctgaacaagcagaagttcgattagaggctgtaagaacatgttcaagattattacgattagcattaaatcaacctggacctacagtgactaatactgtctctactgttctcggaaaattattagttgtaggtataacagatacagatcctgatgtaagactttgggttttagcttctttggatgattcatttgatattcatttagcacaagcagaaaatctttctgcattatttattgcaatgaatgatgaaatgtttgaaataagagaattagcaattcgcacaatcggacgattaagcacaatgaatccagcatatgttatgccttctttacgtaaaacacttatacaatttttaactgaattagaacattcaggtatgggtcgtaacaaggaacaagctgcacgaatgttggatcatttagtagtcagtgcacctagacttattcgaccatatatggaacccattctaaaagttcttgttccaaaattaaaggagcctgaatcaaatcctggtgtaattttagctatattacgcgctattggtgatttagcagaagttaatggtgctgaaatgcaacaatggatgcctgaacttctctctatactacttgaaatgttagtcgacgcgagctctccagaaaaaagaggagttgctttatgggttcttggacaactagtgggaagtacaggacatgttgttaagccatatatgcaatatccttcattactagatgtattgataaatttcttaaaaacagaacaacaattaattattagaagagaaactataagagttcttggattattaggtgctttagatccttataaacataaaatgaaccttggtcagattgattctcaattggatacccttacttctatggctgatactaaaagtgaagctgaaaatacacaagatttaactactagtgaaatgttggtcaatatgtcctcttcaactttagaagaatattatccagccattgctattgcaactcttatgagaattattcgtgatccaacattatcacaacatcatactatggtagttcaagctgtaacttttatattcaaaagtttaggaattaaatgtgttccatatatttctcaagtgatgccaagttttcttaatgtagttcgtacagcagatgttaattttcgtgaatatctatttcaacaattggctattcttattgccattgtgaagcagcatattagaaactatttggatgatatatttaatttaattaaagaattttggacagtgaatagtccattacagagtactctgatacttttagttgagcacattgctattgctttgggtgcagagtttaagatttatttaccacagttaatgccacaaatattaagagttttaacacatgacacaagtaaagataaatcagtcacagtcaaacttcttcaagcacttcaaaaatttggaaataatctggataattatcttcatttagttttaccaccaattgtaaaattatttcatgctactgattgcccaataactgtaaataaagtagcgcttgaaacagttgatcatttagcagatacattagattttacagattttgcatccagaattgtgcatcctttagtacgaactctagatcaatgtccagagttacgaaatacagcaatggatacactatgtgcattggtgatacaattaggaaaaaaatatcaaatctttattttactagtacaaaaaattatgacgaaacataaaattgttaattcacgttatgaagttttaattgataaaattttgacagaaacaactgttgctgacggtgaggattatttattaatgagacatcgacattcaagaaacaaaaatcgtgacttatcgttaacatcatctgatacaactacgattaaaagattacacgtgtctgcctcaaatcttcaaaaagcctggactgcaacaagaagagtttcaaaagatgattggctggaatggctaagaagtttgtcgattggtttactcaaagaatcaccatcaccagcactaagatcatgttgggctcttgcacaaacttattccaaattacctagagatttatttaatgcagctttcgtttcttgttggaccgaattggacgatacttataaggcggaacttatacaaaccttacaacaagcattaatggttcctgatcttccagagataacacaaacaatcttaaatttagcggaatttatggaacattgtgacaaaggaccattacctttagacaataaaattttaggtgaaagagcaatgcattgtagagcttatgcaaaagcattacattataaagaagatgaatttcataagagcaggaatagtaatgtttttgaatctttaatctctattaataacaagcttcaacagaaagaagctgcagaaggtttactcgaatatgttatgaatcaaaataatcagcaagatctaaaagtgcaagttcgttggtacgaaaaactacataattgggataaagctttacaattatatagagaaagactagaaagcgattctacagatgtagagtcgactttaggtgaaatgcgttgtttggaagcccttggagaatggggacaattgcacgatgttgctaccaaacaatggtctcatcaaaatgatgaaactaaacaaagaatggctagaatggcagcagctgcagcatggggtttaaatcaatgggaaagtatggaaaaatatgtctctttaataccaaaagatactcaggatggtgccttttatagagctgttttagcaattcatgatgaacaatacaatattgcccatcaacttattgatagtgctagagatttgctagatacagaattgactgctatggctggtgaaagctatcaaagagcttataatgctatggtagaagtccaaaaattggcagaactagaggaagtgatacaatttaaattagtcccagaaagaagatccactattaaatccatgtggtgggaaaggcttcaaggtggacaaagaatagttgaagattggcaaaagattatacaggttcacacattggtggtttcacctcaagatgatatgtatacatggttgaaatatgccagtctttgcagaaaaagtggtagcttaatgttatgtcataaaacattagttatgttacttggaacagatccttcattaactcctgatcaggcattaccgaccactcatcctcaagtaacatttgcctattgtaaacatatgtgggtagcaaataaacgagaagaagcatacaatcaactgcaaagatttgtacagatgtctttacaaccgacaactctatcagtagtcaatcaagaagatgagaagcaacaggaaataagaaaaagattacttgccagatgttatttgaaacttggagaatggttagaagcattgcaaggcataaatgaacattctataccagctgtgctatcttattatgctgcagctacagaacatgattctacttggtacaaagcatggcatgcttttgcttatactaactttgaaacagttttattttataaacatcagcaaggtgactcaaatactgagaatattccaggaaatgggactcataataatctttctagttcacagtatatatctcaatttactgtaccagcagttgaaggattttttagatctattaatctttctcatggtaattctttgcaagatacacttcgtttattgaccttatggtttgattatggtcaatggccagaggtatatgaagctattgtcgaaggtatccgtttaattgaaatcaatacttggctacaagtaattccgcaacttatagcaagaatagacacaccccgagctttagttggtcgatgcatacatcatcttctaatagatattggaaaaacgcatccacaagctttggtttatcctttgactgtagcgtcgaaaagcgctagtcatgctagaaagactgccgccaataaaattcttaaaaatatgtgtgaacatagtccgacattagtacaacaagcaatgatggctagcgatgaattaattagagttgcaattctttggcatgaattatggcatgaaggattagaagaagctagcagattatacttcggcgaaagaaatgttcgaggaatgtttgatacattggaacctttacatgcaatgttagaaagaggtccacagactttgaaagaaacgtcctttaatcaagcttatggcagagatttaatggaagcacaagaatggtgccgcagatataaagcttcacgcaatgttcgagatttaaatcaagcttgggatttatattatcatgtttttagaaggatatctcgacaattaccacagttaactagtttagaacttcaatatgttagtcctaaattacttctttgtagggatttagaactggctgtaccgggaagttatagtccgggacagccaatagttagaatagcaagtatacatagttccatgcaagtaataaccagcaaacagcgaccgcgaaaattatgtataaaaggtagtaatggtaaagattatatgttccttttgaaaggacatgaagatctcagacaggatgaacgcgtaatgcagttatttggtctagtcaatactcttttattacatgatccagatacatttagaagaaatcttactattcaaaggtatgcggtaattccactatccacaaatagtggtttaattggttgggtaccgcattgtgatacattacatacacttatcagagattatagagaaaaaaaaaaaatactattaaatatagaacataaaataatgctaagaatggccccaggttatgatcatcttatgcttatgcaaaaagttgaagtatttgaacatgctcttgagcatacatatggtgatgatttatcgcgacttctttggttaaaatcaccatcaagcgaagtatggtttgatcgtaggacaaattatacacgttctcttgctgtaatgtctatggtgggctatatccttggtcttggtgatcgacatccatctaatttgatgttggatcgtttaagcgggaaaatattgcatatcgattttggagattgttttgaagtggccatgactcgagagaaatttcctgagaaaatcccatttcgattaacaagaatgttaatcaatgcgatggaagtaacgggaatcgagggcacatatagaagaacttgtgaatctgtaatgtcagtgttacatcgtaataaggatagtttaatggcagtattagaagcatttgtatacgatcctctattaaattggcgattaatggacaatgctgcattaaaaggtaaaagatctgatgctcagggaatgagtgctagcagtaatcaagagcagagcgatgcattagattctcttactgccacattaccaaagaaaggagtaccatgtagtgttgaaaatggaggtgatactaatcaaccagaggcattaaataaaaaagcccttgctattattacaagagtaagggataaattaacgggacgtgatttctctcatgaagaaacattgagtgttcaacgtcaagttgatcttttaattcaacaagctaccaataatgagaatttatgtcaatgttatattggatggtgtcccttttggtaa

SEQ ID NO: 149824 - protein, 2442 aa, Apis mellifera
MSSILVQQFVQRLKSRNEEIRNKAARDLCLYVKTELREVSQEEITAFMDEFNHHIFEMVSGSDVNEKKGGILAIVCLIGADVGNINTRTIRFANYLRNLLPSNDVGVMELAAKTVGKLALVSGTYTAEYVEFEVKRAFEWLGGDRHEGKRHAAVLVLRELAVSMPTYFFQQVTPFFELIFNAIRDPKPVIREGAVEALRAALVVTAQRETAKQMHKSQWYKQCYDEIVTGFEEIYTRERGVNRDDRIHGSLLILNELLRCSNIQWEKNYEALMERLNCSTQQNENDILSLMPRLKTTIVSKWSNSSQNSTNSQQTLYPSHESAVCRCLMQERLDDIYNDVMNQRISRNPHIQHALMILLPRLAAFNKEKFTKDHLRESLAYLLMTLRSREKDRYAAFTTIGFIAVAVEDSINPYLSKIMEMIKSLLPSKETSTKKRGASLEPAVFICITLLGHAVKQVIAADVRDLLESMLQTGLSPILTTSLRELAHSVPSLKPDISQGLLRMLSQVLMQKPLRHPGAPWTATSPISGPPTEVDIPSTVLALKTLGTFNFDGNPLLQFVRRCADHFLTSEQAEVRLEAVRTCSRLLRLALNQPGPTVTNTVSTVLGKLLVVGITDTDPDVRLWVLASLDDSFDIHLAQAENLSALFIAMNDEMFEIRELAIRTIGRLSTMNPAYVMPSLRKTLIQFLTELEHSGMGRNKEQAARMLDHLVVSAPRLIRPYMEPILKVLVPKLKEPESNPGVILAILRAIGDLAEVNGAEMQQWMPELLSILLEMLVDASSPEKRGVALWVLGQLVGSTGHVVKPYMQYPSLLDVLINFLKTEQQLIIRRETIRVLGLLGALDPYKHKMNLGQIDSQLDTLTSMADTKSEAENTQDLTTSEMLVNMSSSTLEEYYPAIAIATLMRIIRDPTLSQHHTMVVQAVTFIFKSLGIKCVPYISQVMPSFLNVVRTADVNFREYLFQQLAILIAIVKQHIRNYLDDIFNLIKEFWTVNSPLQSTLILLVEHIAIALGAEFKIYLPQLMPQILRVLTHDTSKDKSVTVKLLQALQKFGNNLDNYLHLVLPPIVKLFHATDCPITVNKVALETVDHLADTLDFTDFASRIVHPLVRTLDQCPELRNTAMDTLCALVIQLGKKYQIFILLVQKIMTKHKIVNSRYEVLIDKILTETTVADGEDYLLMRHRHSRNKNRDLSLTSSDTTTIKRLHVSASNLQKAWTATRRVSKDDWLEWLRSLSIGLLKESPSPALRSCWALAQTYSKLPRDLFNAAFVSCWTELDDTYKAELIQTLQQALMVPDLPEITQTILNLAEFMEHCDKGPLPLDNKILGERAMHCRAYAKALHYKEDEFHKSRNSNVFESLISINNKLQQKEAAEGLLEYVMNQNNQQDLKVQVRWYEKLHNWDKALQLYRERLESDSTDVESTLGEMRCLEALGEWGQLHDVATKQWSHQNDETKQRMARMAAAAAWGLNQWESMEKYVSLIPKDTQDGAFYRAVLAIHDEQYNIAHQLIDSARDLLDTELTAMAGESYQRAYNAMVEVQKLAELEEVIQFKLVPERRSTIKSMWWERLQGGQRIVEDWQKIIQVHTLVVSPQDDMYTWLKYASLCRKSGSLMLCHKTLVMLLGTDPSLTPDQALPTTHPQVTFAYCKHMWVANKREEAYNQLQRFVQMSLQPTTLSVVNQEDEKQQEIRKRLLARCYLKLGEWLEALQGINEHSIPAVLSYYAAATEHDSTWYKAWHAFAYTNFETVLFYKHQQGDSNTENIPGNGTHNNLSSSQYISQFTVPAVEGFFRSINLSHGNSLQDTLRLLTLWFDYGQWPEVYEAIVEGIRLIEINTWLQVIPQLIARIDTPRALVGRCIHHLLIDIGKTHPQALVYPLTVASKSASHARKTAANKILKNMCEHSPTLVQQAMMASDELIRVAILWHELWHEGLEEASRLYFGERNVRGMFDTLEPLHAMLERGPQTLKETSFNQAYGRDLMEAQEWCRRYKASRNVRDLNQAWDLYYHVFRRISRQLPQLTSLELQYVSPKLLLCRDLELAVPGSYSPGQPIVRIASIHSSMQVITSKQRPRKLCIKGSNGKDYMFLLKGHEDLRQDERVMQLFGLVNTLLLHDPDTFRRNLTIQRYAVIPLSTNSGLIGWVPHCDTLHTLIRDYREKKKILLNIEHKIMLRMAPGYDHLMLMQKVEVFEHALEHTYGDDLSRLLWLKSPSSEVWFDRRTNYTRSLAVMSMVGYILGLGDRHPSNLMLDRLSGKILHIDFGDCFEVAMTREKFPEKIPFRLTRMLINAMEVTGIEGTYRRTCESVMSVLHRNKDSLMAVLEAFVYDPLLNWRLMDNAALKGKRSDAQGMSASSNQEQSDALDSLTATLPKKGVPCSVENGGDTNQPEALNKKALAIITRVRDKLTGRDFSHEETLSVQRQVDLLIQQATNNENLCQCYIGWCPFW

SEQ ID NO: 149825 - DNA, 7116 bp, Aspergillus nidulans FGSC A4
  CDS (1)..(7116)
atggcgcaagcaggtccgatcacggacgtcacccagaggctcttcatcgagctgaagtctaagaacgaggaaacgcgggtccgagctgcttacgagctttacgaaaatgttcttgccatctcaagagactggcctcccgagaagttcattgaattctataacgccgttagtcaacgcatcgcccagcttgttgtcaccggcagtgatgcacacgaaaggatcggcggtctcctagctcttgaccgactaatagatttcgatggcgtggacaatgcgcagaagacaacgaggttcgccagctatttgcggagcgccctgcgcagcagcgataatgccgtacttgtctacgccgctcgggcacttggtcgcctggcgaagcccggtggtgcccttactgcagaattggttgagagtgaaatacagtcggcactggaatggcttcagtctgaacgacaagaaggtcgacggtttgctgcggtgctggttattcgggagctcgctaaagggtcgcccacgcttctttacgggttcgttcctcagatcttcgaactcatctgggttgctctgagagaccccaaggtacttatccgagagactgctgcagaagcagttcggcagctatggtttgcgagaatatacgaggaagcgctccagggcttgaagtcgaataatgtggactggatccatggatcactcttggttcttaaggaacttctcctcaaaggagccatgttcatgaatgaacattatcgaaatgcgtgtgaaatcgtgcttcgtctcaaggaccaccgagacccgaaaattcggacgcaagttgttctcacaattcccattcttgcctcctacgctccggttgatttcaccgaaacatacctgcatagattcatggtgtatcttcaagcccagctcaaaaaggacaaggagcgcaatgctgctttcatagctatcggaaagattgcaaatgcggtgggtgtagctattgcacaataccttgatggtatcattgtttacatccgcgaaggactggccctgaaagccaaaaatcgagctgccattaatgaagcgccaatgtttgagtgtattagtatgctctcgctggctgttgggcaggctctcagcaaatacatggaatcgctcctcgatcccatctttgcatgtggcttaagtgaatccctgacacaggctcttgttgatatggctcattatattccaccaatcaagcccacgattcaagtaaagctgctggatatgcttagcctgattcttgatgggacgccttttcgccccctaggttgtccggaaagcaggctacctccgctgccgtctttcgccaaagacttcaccctgcaagaactgcattctgacgctgaaattgcgctggctctccacaccctgggaagcttcgatttttctggtcatattttgaatgaatttgtgcgcgacgttgccattcactatgttgaaaacgacaaccctgaaattcggaaggctgcggctcttacctgctgccagctatttgtgcatgaccccattatcaatcagaccagcagccactcaatacaggttgttagcgaggtcatcgacaagctattgaccgttggtgtcggcgaccctgatcctgagattagacgcactgtgctatggtccttggatcgcaaatttgaccggcaccttgcacggccagaaaatatccgatgcctcttcttggccgtgaatgatgaagtgttcgctgtcagagaggcagcgatctgcataattggccgcctttccagtgtcaacccagcctacgtattccctcccctaaggaagttgctggtgaacttgctcactggacttgggttcgcaagcactgctcgccagaaggaagaaagtgcacagcttattagcctttttgtttcgaatgccacgaaacttatccggtcgtacgtcgaccctatggttacgactctgctaccgaaagcagttgatgccaatcacggcgtcgcctccacaacactgaaagctgtcggagaacttgcaagcgttgggggcagcgatatgaaagcctacctgcctaagctgatgccaatcgttctggatgccttgcaggacctttcatctcatgctaagagagaagcggctttgcgaacattgggccagatagccagcaactcaggctacgttatcgacccgtacaccgaccaccctcatctgctggcggtgcttattggtatcatcaagacggagcaggcaggatcgcttcgcaaggaaacgataaaagttctaggaattctaggtgcactggacccttataaataccagcaaataagcgaaaccgcaccagacgtccaccatatcaacgaagtacaagtggtgtcagacgttagtcttattatgcaaggccttgccccttccaatgaagagtactacccaactgttgttatccatactctcatgcagaacatacttcgcgagaactcccttgcgcaatatcattctgctgtcatcgacgcgattgttacgatctttaagacccttggcttgaagtgtgtccccttccttggccagatcattcctggtttcatttctgtcattcgaggttcaccctcaagccggctcgaatcttatttcaaccaaatggcaatccttgtcaatattgtgcggcagcacatcagagcctttcttcctgaaataattgaggtcattcgggaattctgggacacgtcatatcaggttcaagcgaccattctctcgcttgtggacgcgatagccaagtcccttgagggtgaatttaagaagtaccttgcaaatctcattcctccaatgctggacacactggaaaaggataatactccgcgccgccagccttccgagaggattttgcatagcttcttagtattcggctccagtggcgaagagtacatgcatctgattgtgccctccattgtgcgtctgtttgataggtcccagaacccagcgagcatcagaaagtcagctattgacagcttgaccaaactttcgcgacaagtgaatgtctccgattttgcgtccttgattgtacactccctttctcgagtcgttgccggcaacgaccgtatgttacgacaggctgctatggattgcatatgctctttgatattccagcttggccaggatttcaaccattatattcatctgctgaacaaggtcttgaagcatcatcaagtcaatcacgtgaactatcagatccttgtcacaaagctccagaaaggagacccgctcccacaggatctcaatcctgacgagagctatgccccattggcggatgacgcgaactatgcagagatcggtcaaaagaagatggtggtcaatcaacaacatcttaagaacgcctgggacgcttcgcaaaagtcgactcgcgaagactggcaagaatggatccggaggttcagtgtagagcttttgaaagaatcaccttcgccggcgctgcgtgcttgtgccagcctggcgggcatctaccaacccctcgctagggatctattcaatgccgctttcgtctcctgttggacggaattgtacgaccagtaccaggaagagctggttcggtcaatcgaaaaagccctcacctcgccgaacattccaccggaaattcttcagatcttgctcaatcttgctgagtttatggagcacgacgacaaggcgctgccgattgatatccgcactcttggaaaatatgctgccaaatgtcacgcgttcgcaaaggcgctccactacaaagaactcgagttcgagcaagatcagaactctggagctgtagaggcactcattactatcaacaatcagctccagcaatccgatgccgctattggtatccttcggaaggctcaggcgtatcgggatgttgaactgaaggagacctggtttgagaaacttcagcgatgggaagaagcccttgcagcttacaaacgtcgtgagaagattgaccccgactctttcggtatcacaatggggaaaatgcgctgtctacatgctcttggagaatggaaagtgttgtctgacctcgctcaggagaagtggaaccaggcctctctagaacaccggaaatcaatcgctcctctcgctgcggcagctgcatggggtcgcggtcaatgggagctgatggattcgtacctaggagttatgaaagaacaatctcctgaccgttcgttctttggggcaatactggcaattcatcgcaaccaatttgatgaagccattatgtacatcgaaaaggcccggaacggccttgacacggaactctcagcacttctcggagagtcatataaccgtgcctacaatgtagttgttcgcgttcaaatgcttgctgaactcgaggagatcatcacctacaaacagaatgttggtgatcccgagagacaagaggcaatgcgccagacctggaacaggcgacttctcggctgccagcagaatgtagaggtatggcagcgcatgctcaaggtcagagcacttgttacaacaccgcgagagaacctagacatgtggatcaagtttgccaatttgtgtcgcaaatcaaaccgcatggggttagcggaacgttctctcgcctctctagaaactgtcatccctgacggcaacggcggcactcgcactatctccccaccagaagtcacatatgctcgcttgaagtttagctgggcaactggccgccaacgcgaggcccttcatatgctccgtgaatttactgccaacctaacagaagacttcactcgcttcaatgcacttgttgcctcacaatctgaccataacggtatcaacggcgttaatggtatcgcagaaggaaaccataccgatatcatggcccttcgagagcgcgttggtgatgtcaacaagtttagaaagctccttgcaaagagttatctaagacttggtgagtggcaaacggctctacaacgaggggactggcggccagagcatgtccgcgaagtactcaacgcatattcagcagccaccaggtacaaccgcgattcctacaaagcctggcactcatgggccctggccaactttgaggtcgtgacgacaattgccagccaggcaagtaaggacggcggaaatctggcattggttccagggcatatcgtaacagaacatgtgattcctgcgattcgcggcttttttaggtccattgccctctcttcgacgtcgtctcttcaggatactcttcggttgctcactctctggttcaaccatggtggtgaccaggaggtgaactcggtcgttacagagggtttcacggctgttaatatcgacacgtggctcgccgtcactcctcagcttattgcccgcatcaatcagcccaacttcagggttcgcagcgccgttcatcgcttgcttgctgaagttggcaaggcacatccccaagccctcgtgtatccgctcacagttgcgatgaagtcgaatgttgcccgacgatcacagtccgcaggcaacattatggagagcatgcggacacacagtgcaaacctagtggagcaggctgatcttgtaagtcatgagctgattagggtcgctgttctgtggcacgaactctggcacgaaggactggaagaggcgtcacgtctctatttcggtgaccataacgtggatgggatgtttgcaactctcgcaccgcttcatgaaatgcttgataaaggtgctgaaaccctgcgcgaagtatcgtttgcccaagctttcggacgtgacctggctgaggccaagcattactgcatgctctatcgcgagacggaagaaatcggtgacctaaaccaagcgtgggatttgtattacacagtgttccgcaaaatcagccgacagctaccacagttatcaaccctagatctcaaatacgtctcgcccaaactcaaggattgcgtggaccttgatctcgctgttcctggtacctaccaaagtggcaggcccattatccgaatcatcagtttcgatccaatcctacatgttcttcaaacgaagaagcgaccacggaggatgactttgaagggcagtgacggcagctcctacatgtatgtggtgaagggccacgaagatatccgacaagatgagagagtcatgcagttattcggcctggtcaacactcttctcgataacgatagtgaaagcttcaagcggcatctaacggtgcagcgcttcccggccattcctctgtctcagaactctggtatcatcggctgggtcaccaatagtgacaccctccatgctttgataaaagaataccgggaaacgcggcgtattctcctcaacatcgagcataggatcatgttacagatggctccagactatgacaatctaacgctcatgcagaaggttgaagtatttggctatgcgatggacaacacaaccgggaaggatctgtaccgtgttctgtggttgaagagtaagagctccgaagcctggcttgagcgtcgtaccaactacactcgttcacttggagtcatgtccatggtcggctacatccttggtctaggtgaccgccacccgtccaatcttcttctggacagagtgaccggcaaagtggttcatattgactttggtgactgcttcgaagttgccatgcatcgtgaaaagtatccggagcgcgtgccattccgtttgacgcgtatgttgacgtttgcgatggaagtcagcaacattgaaggaagctaccggatcacttgtgaagctgtcatgcgggtgatacgtgagaacaaggactcgctgatggccgttctggaggcttttattcacgaccctctaatcaactggcgtctgggaattcgcgagtctcctgaccgaatgccatttaacgcggagcgtcgtcaatcgattgtctccaatgtcaacctcgagcacggcgtccaacccagcaacttctctcggcaccgtcggccttcaatccttgaaggtggtattctcgacgctcaagaaggggtgcctaatgaggcacgtgaggctcagaatgcaagagccttacaggtgcttgctcgggtgcgggagaagctgaccggccgggactttaagcctagcgaagagctcaatgttagcgatcaagttgacaagcttcttgcacaggcaactagtgttgagaacatctgtcagcattggattggatggtgcagtttctggtga

SEQ ID NO: 149826 - protein, 2371 aa, Aspergillus nidulans FGSC A4
MAQAGPITDVTQRLFIELKSKNEETRVRAAYELYENVLAISRDWPPEKFIEFYNAVSQRIAQLVVTGSDAHERIGGLLALDRLIDFDGVDNAQKTTRFASYLRSALRSSDNAVLVYAARALGRLAKPGGALTAELVESEIQSALEWLQSERQEGRRFAAVLVIRELAKGSPTLLYGFVPQIFELIWVALRDPKVLIRETAAEAVRQLWFARIYEEALQGLKSNNVDWIHGSLLVLKELLLKGAMFMNEHYRNACEIVLRLKDHRDPKIRTQVVLTIPILASYAPVDFTETYLHRFMVYLQAQLKKDKERNAAFIAIGKIANAVGVAIAQYLDGIIVYIREGLALKAKNRAAINEAPMFECISMLSLAVGQALSKYMESLLDPIFACGLSESLTQALVDMAHYIPPIKPTIQVKLLDMLSLILDGTPFRPLGCPESRLPPLPSFAKDFTLQELHSDAEIALALHTLGSFDFSGHILNEFVRDVAIHYVENDNPEIRKAAALTCCQLFVHDPIINQTSSHSIQVVSEVIDKLLTVGVGDPDPEIRRTVLWSLDRKFDRHLARPENIRCLFLAVNDEVFAVREAAICIIGRLSSVNPAYVFPPLRKLLVNLLTGLGFASTARQKEESAQLISLFVSNATKLIRSYVDPMVTTLLPKAVDANHGVASTTLKAVGELASVGGSDMKAYLPKLMPIVLDALQDLSSHAKREAALRTLGQIASNSGYVIDPYTDHPHLLAVLIGIIKTEQAGSLRKETIKVLGILGALDPYKYQQISETAPDVHHINEVQVVSDVSLIMQGLAPSNEEYYPTVVIHTLMQNILRENSLAQYHSAVIDAIVTIFKTLGLKCVPFLGQIIPGFISVIRGSPSSRLESYFNQMAILVNIVRQHIRAFLPEIIEVIREFWDTSYQVQATILSLVDAIAKSLEGEFKKYLANLIPPMLDTLEKDNTPRRQPSERILHSFLVFGSSGEEYMHLIVPSIVRLFDRSQNPASIRKSAIDSLTKLSRQVNVSDFASLIVHSLSRVVAGNDRMLRQAAMDCICSLIFQLGQDFNHYIHLLNKVLKHHQVNHVNYQILVTKLQKGDPLPQDLNPDESYAPLADDANYAEIGQKKMVVNQQHLKNAWDASQKSTREDWQEWIRRFSVELLKESPSPALRACASLAGIYQPLARDLFNAAFVSCWTELYDQYQEELVRSIEKALTSPNIPPEILQILLNLAEFMEHDDKALPIDIRTLGKYAAKCHAFAKALHYKELEFEQDQNSGAVEALITINNQLQQSDAAIGILRKAQAYRDVELKETWFEKLQRWEEALAAYKRREKIDPDSFGITMGKMRCLHALGEWKVLSDLAQEKWNQASLEHRKSIAPLAAAAAWGRGQWELMDSYLGVMKEQSPDRSFFGAILAIHRNQFDEAIMYIEKARNGLDTELSALLGESYNRAYNVVVRVQMLAELEEIITYKQNVGDPERQEAMRQTWNRRLLGCQQNVEVWQRMLKVRALVTTPRENLDMWIKFANLCRKSNRMGLAERSLASLETVIPDGNGGTRTISPPEVTYARLKFSWATGRQREALHMLREFTANLTEDFTRFNALVASQSDHNGINGVNGIAEGNHTDIMALRERVGDVNKFRKLLAKSYLRLGEWQTALQRGDWRPEHVREVLNAYSAATRYNRDSYKAWHSWALANFEVVTTIASQASKDGGNLALVPGHIVTEHVIPAIRGFFRSIALSSTSSLQDTLRLLTLWFNHGGDQEVNSVVTEGFTAVNIDTWLAVTPQLIARINQPNFRVRSAVHRLLAEVGKAHPQALVYPLTVAMKSNVARRSQSAGNIMESMRTHSANLVEQADLVSHELIRVAVLWHELWHEGLEEASRLYFGDHNVDGMFATLAPLHEMLDKGAETLREVSFAQAFGRDLAEAKHYCMLYRETEEIGDLNQAWDLYYTVFRKISRQLPQLSTLDLKYVSPKLKDCVDLDLAVPGTYQSGRPIIRIISFDPILHVLQTKKRPRRMTLKGSDGSSYMYVVKGHEDIRQDERVMQLFGLVNTLLDNDSESFKRHLTVQRFPAIPLSQNSGIIGWVTNSDTLHALIKEYRETRRILLNIEHRIMLQMAPDYDNLTLMQKVEVFGYAMDNTTGKDLYRVLWLKSKSSEAWLERRTNYTRSLGVMSMVGYILGLGDRHPSNLLLDRVTGKVVHIDFGDCFEVAMHREKYPERVPFRLTRMLTFAMEVSNIEGSYRITCEAVMRVIRENKDSLMAVLEAFIHDPLINWRLGIRESPDRMPFNAERRQSIVSNVNLEHGVQPSNFSRHRRPSILEGGILDAQEGVPNEAREAQNARALQVLARVREKLTGRDFKPSEELNVSDQVDKLLAQATSVENICQHWIGWCSFW

SEQ ID NO: 149827 - DNA, 7233 bp, Ustilago maydis 521
  CDS (1)..(7233)
atgtccgtccttggcacccatcagagcgatgcgctcaatcgcatctttgctggactcaagagcagagatgaggccacacgtcaagcagctggcgaagagctcaaatcgcacgtcgcactcgtcgtctcggaactcaagggtgacagcctctcctcgttcaacaacgatctacaccgcagaatcttcgaacttgcgcacagtcagcatgttcacgaaaagcttggtggtgtcattgccatcgaagacctcatcgaacaggaaagcgaggacaatagcgctcgtctctaccgcttctaccaatacctcaaacctaatttgccatgcaacgatgcttccgtcatgatcgccgcctcccgcgccttgggaagggtcgcctaccacggcggtcaatcgctcggagaacagtttatcgaatacgaagtgcttcgtgtgctcgatttcctccaagccggcgatcggaacgagtcgggacgatacgctgccgtgctcatcatccgtgaaatggcaaaaagggtgccgcagcagtttcatccctacgttcctcgtgtcctagaccgcatctgggttgctctccgagatgttcgtgtcatcgtcagagaaggggccgcagaagccatgggtgcctgtctcggcatcatcgctgcacgtgaaaagcagatgggcagtcattttttcgagtcaatctacgaagaggccgaaaagggcctcaagatgagcgcacccgaagccatccacggaagcctgctcgctgtacagcagctgctgcagcactcgaaaaccttcatgcgcaatcgcttccagcgcgcctgcgagctcgtcttccgtctgcacaagcatcgcgatcctctgatccgccgcaccatcaccaacctggtccccgtcctggcgcgctacgacccacactatttcgccgaggagcatctgcgagccgtcatgggcattctcacagagcaactacgaagagaaaaggaccgatcgcccaaggagtcagcacagacgtttgaaacaatcggctttgttgctgcagccatgggtcccaggatgaagcctttcatcgagccagtcctggcctgcgtcaaggagggcctgcagatgcgcggaaagaaaaacgccccacccgaaggccccatctttctctgtgtcggcaaccttgccaccgcagtgggtccacatctcacacgatacatgcacgacctcctcgacctcatgttctcttgtggcctcagcatcccgctcgtcacagcactcgatggcatcgtaaaggcaattccgccactcatgaaggtggtacaggatcgtctcttggacatgctttccatgacgctgattggacaaccctaccgcccgctcggagctcccgccagtcttcgcccctcggccaacgctagtcgcgatgtggttgccgctcaaaccgtcgaatccaagggtgtcgagaccataacggtcgcactgcagacgctgggcaggttcgacttccaaggccacattctcaacgaattcgtccgtaactgcacgctcccttacctcgaggatgaccatgctgccgtgcggcaagctgcggctgagacgtgcgccgacttgttcgtcaacgaccccatctgccgtcaaaccagcatgcacgccatcgaggtggtcaacgatgtgctcgacaagctcatgaccgtcggcattgctgatccagatccagaactccgatggacagtgctcagcaagtttggcgctcaggagcaatttgatcgccatcttgcccaatccgaatatgtccgttccctcttcatcgcgctcaacgacgaaaaattcaaggttcgcgaggtggccattgtcatcatcgggcgtctggcaaagcacaacccagcctacgtcatgccctccctccgcaaagcactcattcagctgctcaccgagcttgaatattcgacggtcagccggcacaaggaagaggctgctaagctgctgaccgaggtcgtccgtgcctcacaacgtctcgtcaagtcgtatgcgttgcccatgcttgaggtgctgttgcccaaagcaaacgatcccagcgtcggtgtcgcggccagagtcatggagtgtctcggtgaactcgccaaagtgggaggagaggatcttgcgccaaacgtcgatcagctcatgcgtcttgccatcgaccaactctcaagcaccgcacctggctcatccaccgcaaagcgggacgctgctctcaagacacttggtctcgtcgcttccaacactggccacgtcgtcaacccatacctcacgtatagaaacctgctcggcacggtcgtcaagatcctcaaaacagagcagtccaagcccgtccgtcgcgagacgatccgtgtcatgggcatccttggtgctctggatccatacagatacaagctgctcgagaagaacggcgacgagggtcaagacgagacatcaaagggaagcggcaccgacctctttgagcttgctttggcaatcggcacttcgaccgacgactactaccagaacatcgccattgatgcgctcatcaccatcctcaaggacccttcgctctcgacacatcatcatgccgtcatcgaggccatcatgtacatgttcaagacgcaaggtctcaagtgcgtcactttcctgcctcagatcattccagctttcctcaacgtgatccgcacctgtggcacgggcctgtccgaattctactttcagcagctagccattctcatctcgatcatcaagcagcacgtccgcagctacctggagcccatctttgagctggtccaggaaaattggaaccccaattcaagcatccagctcaccattgtctcgctcgtcgaggcggttgcgaaagcgcttgaaggcgagttcaaatcatatctgcctatcttgctgcccaacatgctccagacgctcgacggtgagataaccagcaagcgtcagcctacattgctccgtatcctgcaggccttctacgtctttggttcgaatatcgaggagtacttgcatctggtgctgccggtcgtcgtcaagatgttcgagcgcccggacgcgtcgcagacgcttcgacgtgctgctatcttgaccgtaggtaacttgtcgcgcaaagtcagcttctgcgaccatgcatcacgcgtaatccaccctctggtccgtgtgctgcctacggggactagcgacattcgcaacgccgtcatggagacattgtctgcgctcgtagtgcagctcggcgcttcgtacgccatctttattcccgtcgtcaataaggtgctgattcaaaatcgtatacagcatgcgacgtacgatcagctcgtctccaagctgctgaatggcgaacgcctgccgcaagacctgtctgcggctgacaatgcgttggggagcaagatcgacgagtcgccccaagccgaggctaacaagatgactgtcaaccagcaacatctcaagcaagcctgggatacgtccaaagtgtcgacgagcgaagactggcaagaatggctcagaaggatggcggtcgagttcatgcgcgaatcgccaagccatgccttgagggcctgcagaagtctagcagacgtttacccagcgttggcgtacggccttttcaacgtcgcctttgtttcgtgctggaccgagctgtacgagcagtatcagagcgatctagtcaaggcgcttgagacagcattcgatgcacctgaagtgcctggcgatgtggtgcacatgctactcaatctggccgagtttatggagcacgatgacaaggcgttgccaatcaacattcgcgtgcttggcgaccgcgcatacaagttccacagctatgcaaaggcgctccactacaaggaggccgagttcctcacagatccttcgccgcaggtcgtcgaaagtctcatcgatatcaacaccaagttgcagcagtccgatgcggcgttcggtgccctcacgtacgctcgggagcatctcgacatcacccatcacgaagagtggtacgagaagctgcaccgctgggaggaggccttgactgcgtacgaccgcaaagccatgctcgacccagacgactatggcgtcgcctttggcaagatgcgctgtctgcatgctttgggagaatgggagcacctatcggaccttgtgcagcagaaatggggcagagctgacatggaggaccgccgacatatggcgccgcttgccgcggctgccgcctggtcgctcggtcagtgggacaccatggacgactacatttcggccatgcgctccgactcatctgagcgctccttctaccgtgccatcctgcacacgcatcgttcgcaacgagccgcggccaacaagcagatcgccaaggctcgagagtcgctcgactcggagctcactgctctcatcagcgagagctatggccgtgcatacgacctcatggttcgtacacagatgctttccgagctcgaggaggcactggcatacaagctcgactacaaggagcagcctgaccgccaggcgaccattcgctccacgtggatgaagcgtctcaaaggctgccagcccgaggtagaggtgtggcagcgcatcctctctgtgcgttcgatcgtgctcactccggccgacgatacggaaacgtggatcaagtttgccaacttgtgccgcaagtccggacgcatggtgttggctgaaaagacgcttaactcgctgctgggcccggaacgtacgaatgctgatccacgatcgccgattggtcccagagcaccgcctccggtcatctacgcccacctgaaattcatgtgggcttctggagccagaattgagtcgcttagctatctgcaagagtttacgctcaatctcgctgaggatcttggggtccacactgtcgacgagcacggcaaccttgtcacgcaggactggcagtcgtcgccacatctcggcgagtttgcacgcctgctggcacgctgcttcttcaagcaaggcgaatggcagatgtcgttgcgcgagaactgggtcacggacgacaacagcaatgtgatcgagagctaccgcagagcgactgagctcgatcgaaactggtacaaggcatggcacgcttgggcgctggcgaacttcgaggtcatctcgcaccacgaggagaggaatgaacagatcactccgcagatgattgctgccagtatcgtgccttcggtgcagggcttcttccgctcgatcgcgttggcgagtggtaactcgttgcaagacacgctccgcctgcttaccctatggttcaagtatggtcatcaagaggacgtctcgcaggcggttagtgaagggtttgctagtgtcatcgtggatacgtggctcgaggtgattccgcagattattgcacgtatcactgcgccctctccacgagtgcgtcgcctgatccacaacttgctgtcggatgtcggtctggcgcatccgcaggcgcttgtctatcctctcacggtcgctgccaagagtccgagtcatatgcgtatccaggctgccatggggatcatggacaatgtgcgcgagcactcgcccgttctcgtcgagcaggcgttactggtgtcgaacgaattgatccgtgttgcgatcctgtggcatgagatgtggcacgaagggcttgaagaggcatcgcggctgtactttaccgaggacaacatcgacgccatgtttgccacactcgagccgctccacgacgcgttggaaaagggccccgagacccttcgcgagacttcatttgcccagacgcacggccgcgacctggcagaagcgagggaatgcggtcgacgcttccgccagtacggtgacatctcggatctcaatcaggcctgggatctgtactaccacgtctttaagaagatcgccaagcagctgccggcgggtaactcggtgcagctcgacctgcagtacgtctcaccgaagctgctggcaatgcgagacttggagctggcggttcccggtacgtatcaatccggaaagccgattgtatgcatcacgcgcttcgagcagatcgtgctcgtcattgcatcgaaacagcatcctcgtcgactcaagatgaagggttccgacggcaagacgtaccaatatctgctcaaaggtcacgaggacttgcgacaggacgaacgcgtcatgcaactgttcggtctggttaatacactgctctcgattgactcggagagctacaagcgtcgactcgagatccgtcggttccccgtgattccgctctcgcccaacacgggcatgttgggctgggtggaaaatacggatacgctgcacgtactcatcaaagagtatcgagaacagcacaagatcctgctcaacatcgagcatcgattgatgcttcagatggcgccggactacgaccacttgacgctcatgcagaaggtcgaggtgttcgagtatgcgttggacaacacgccggggcaagatctgtaccgagtgttgtggctcaagtcgcgcaattccgagtcgtggttggagcgacggttggcgtacacgcgttcgctggcggtgtcgtcggtcgcaggctacatcctgggtcttggagatcgacacccttcgaatctgttgctcgatcggttgaccggtcagattgtgcacattgatttcggcgattgcttcgagatcgcatgccatcgtcctaagtttcctgaaaaggtgccgttcagattgacgcgcatgctggtgaatgcgatggaagtgggcgggatcaaggggacattcaaggtaaccgcggagaacacgatgcgcgtgctgagggacaacaaggagagcgtgttggcgttgttggaggcgtttgttcatgatccattgatttcttggaggttggttgcggatgatggcgccgagagggcgcctgatgcgaaggagaatgaagctgtagccgccgaaggtggcgctgcttccggtacggcgacgggtgcagtcactggtgcggccaatgtcggcgcgggtggaactgtggctcccaaccaacgccaagaccaagcgctttatcctgcagctggtgcaccgggcggtggtatcgctctacctcccaccgccaccgccaccgccacggctgcagctgcagctgcacccaacgccgtccaagcgggtggccaggacatgcgcaaccaacgcgctctcgaagtcgtccgtcgcatccaaaacaagctcagcggcagagacttcaatcccgcagaaagcctcagcgtcgctgctcagatcgaacgcctcgtacaggacgccacgagcaaagagaatctgtgtgtcgccttcgtcggctggtgttccttctggtaa

SEQ ID NO: 149828 - protein, 2410 aa, Ustilago maydis 521
MSVLGTHQSDALNRIFAGLKSRDEATRQAAGEELKSHVALVVSELKGDSLSSFNNDLHRRIFELAHSQHVHEKLGGVIAIEDLIEQESEDNSARLYRFYQYLKPNLPCNDASVMIAASRALGRVAYHGGQSLGEQFIEYEVLRVLDFLQAGDRNESGRYAAVLIIREMAKRVPQQFHPYVPRVLDRIWVALRDVRVIVREGAAEAMGACLGIIAAREKQMGSHFFESIYEEAEKGLKMSAPEAIHGSLLAVQQLLQHSKTFMRNRFQRACELVFRLHKHRDPLIRRTITNLVPVLARYDPHYFAEEHLRAVMGILTEQLRREKDRSPKESAQTFETIGFVAAAMGPRMKPFIEPVLACVKEGLQMRGKKNAPPEGPIFLCVGNLATAVGPHLTRYMHDLLDLMFSCGLSIPLVTALDGIVKAIPPLMKVVQDRLLDMLSMTLIGQPYRPLGAPASLRPSANASRDVVAAQTVESKGVETITVALQTLGRFDFQGHILNEFVRNCTLPYLEDDHAAVRQAAAETCADLFVNDPICRQTSMHAIEVVNDVLDKLMTVGIADPDPELRWTVLSKFGAQEQFDRHLAQSEYVRSLFIALNDEKFKVREVAIVIIGRLAKHNPAYVMPSLRKALIQLLTELEYSTVSRHKEEAAKLLTEVVRASQRLVKSYALPMLEVLLPKANDPSVGVAARVMECLGELAKVGGEDLAPNVDQLMRLAIDQLSSTAPGSSTAKRDAALKTLGLVASNTGHVVNPYLTYRNLLGTVVKILKTEQSKPVRRETIRVMGILGALDPYRYKLLEKNGDEGQDETSKGSGTDLFELALAIGTSTDDYYQNIAIDALITILKDPSLSTHHHAVIEAIMYMFKTQGLKCVTFLPQIIPAFLNVIRTCGTGLSEFYFQQLAILISIIKQHVRSYLEPIFELVQENWNPNSSIQLTIVSLVEAVAKALEGEFKSYLPILLPNMLQTLDGEITSKRQPTLLRILQAFYVFGSNIEEYLHLVLPVVVKMFERPDASQTLRRAAILTVGNLSRKVSFCDHASRVIHPLVRVLPTGTSDIRNAVMETLSALVVQLGASYAIFIPVVNKVLIQNRIQHATYDQLVSKLLNGERLPQDLSAADNALGSKIDESPQAEANKMTVNQQHLKQAWDTSKVSTSEDWQEWLRRMAVEFMRESPSHALRACRSLADVYPALAYGLFNVAFVSCWTELYEQYQSDLVKALETAFDAPEVPGDVVHMLLNLAEFMEHDDKALPINIRVLGDRAYKFHSYAKALHYKEAEFLTDPSPQVVESLIDINTKLQQSDAAFGALTYAREHLDITHHEEWYEKLHRWEEALTAYDRKAMLDPDDYGVAFGKMRCLHALGEWEHLSDLVQQKWGRADMEDRRHMAPLAAAAAWSLGQWDTMDDYISAMRSDSSERSFYRAILHTHRSQRAAANKQIAKARESLDSELTALISESYGRAYDLMVRTQMLSELEEALAYKLDYKEQPDRQATIRSTWMKRLKGCQPEVEVWQRILSVRSIVLTPADDTETWIKFANLCRKSGRMVLAEKTLNSLLGPERTNADPRSPIGPRAPPPVIYAHLKFMWASGARIESLSYLQEFTLNLAEDLGVHTVDEHGNLVTQDWQSSPHLGEFARLLARCFFKQGEWQMSLRENWVTDDNSNVIESYRRATELDRNWYKAWHAWALANFEVISHHEERNEQITPQMIAASIVPSVQGFFRSIALASGNSLQDTLRLLTLWFKYGHQEDVSQAVSEGFASVIVDTWLEVIPQIIARITAPSPRVRRLIHNLLSDVGLAHPQALVYPLTVAAKSPSHMRIQAAMGIMDNVREHSPVLVEQALLVSNELIRVAILWHEMWHEGLEEASRLYFTEDNIDAMFATLEPLHDALEKGPETLRETSFAQTHGRDLAEARECGRRFRQYGDISDLNQAWDLYYHVFKKIAKQLPAGNSVQLDLQYVSPKLLAMRDLELAVPGTYQSGKPIVCITRFEQIVLVIASKQHPRRLKMKGSDGKTYQYLLKGHEDLRQDERVMQLFGLVNTLLSIDSESYKRRLEIRRFPVIPLSPNTGMLGWVENTDTLHVLIKEYREQHKILLNIEHRLMLQMAPDYDHLTLMQKVEVFEYALDNTPGQDLYRVLWLKSRNSESWLERRLAYTRSLAVSSVAGYILGLGDRHPSNLLLDRLTGQIVHIDFGDCFEIACHRPKFPEKVPFRLTRMLVNAMEVGGIKGTFKVTAENTMRVLRDNKESVLALLEAFVHDPLISWRLVADDGAERAPDAKENEAVAAEGGAASGTATGAVTGAANVGAGGTVAPNQRQDQALYPAAGAPGGGIALPPTATATATAAAAAAPNAVQAGGQDMRNQRALEVVRRIQNKLSGRDFNPAESLSVAAQIERLVQDATSKENLCVAFVGWCSFW

SEQ ID NO: 149829 - DNA, 7203 bp, Tribolium castaneum
  CDS (1)..(7203)
atgtccactttggccatgcaacaattcgttgcggggttgaaatcccgcaaccccgacgttcgtcaaaaaaccgcacgagaattaagcttgtacgtaaaaagcgagcttcgcgaagccacccccgacgaaataacaaacttccttgacgaattcaaccaccacatcttcgaaatggtctcgagcaacgaccccaacgagaaaaaaggcggaattttggcgattgtatgtttgattggagtcgatttcgggaacatgaccacacgtatatcacgcttcgccaattatttacgcaacttgttgccctcgagcgacgtgagcgtcatggagtcggtggcgaagacaatggggcgcttggcgctggtttcaggctcgaaagcctccgaatacgtcgagtttgaagttaagagggcctttgagtggctcagtggcgaccggattgaagggaagcgacaagctgccgttttagtcttgaaagagttggcactaactatgccgacgtatttctaccaacatgtgtcgcaatttttcgatctgatttttttcgcgatacaggaccccaaacctgccattagggagagcgctgtggaggctttgagggccgctttggtcgtcacagcgcaacgagagaccgccaaacagaaccaaaagccacaatggtacaaacaatgttacgacgaatccgtgaaaatgctctcggtggaaagaggcgaacgcatgaaagaggagcgcgtccacggctttctcctcattctcaacgaactggtgcgttgctcaaacgccgaatgggaacgcaaatgcaaaagtttgctcgaacgcactgacaccaaacaaccggtcgagaccagcttcaattttactaaatctcgcttcgttttttcggtctctcgacgcatcccccaataccaagctgtgtctttggcaccctctcaaatcgcaatcatagaatcccaaagttgccgaggcctcgtttccgagaaattcgactacatttgtttagacgtcctggctcagagactctcccgttcgtctcacatccaacaaagttttctcacgattttaccccgattggctgcttttgaccgcgaaaactacgtcaagcagcacttaagccccgtcatgaaccacatcttcaacattttgaagagtcgggaaaaggagagagctaaggcttttgtgactattggcttaattgcgatcgctgtcgagagcgacattgagccgtacattgaacgtattatggaaataattcgcatgtatttgccccgagccgatattttggggcgcaagcggagccccatcgactcctcaattttcaactgtgtcactttcctagcccacgccctcaaaaaccactcaaaaatggacatcccgaacctcctggaaccaatgctagcaacgggattaaccgcatccctcacgatatgtttccgggaattatcccgaaaagtcccggaacataaagaacgaatcagtctcgggttattaaaaatgctgagttatattctcctgaataaaccactagttcatcccgggatgccccgccacttgaccggaaccgtaatgagtcttgcaataccagaagtcaacgatgtgcaaatcatagttttggccctcaaaacactcggaacgtttgactttgagggccagagactcctcccttttgtccaccgctgcgccaatcatttcctcatccatgacaataacgaaatccgattggaggctgtcagaaccacgtgtcggctcctccgacatgctattcactccacagcgaaaaactcgtcggatacggtcaccaaaaccgtagctgctgttttacatcgtttgttaagtgttggtttgaccgataccgacccaaatgtccggtacggagtcttgatttcgctcgatcgtacgtttgataatcatttagcacaagctgagtcgctcagtgcgctgtttctggcgttgcaagacgaaatgtttgaaatacgcgaagttgcactgtttacaatcgggcgcttgagtgcgatgaatccggcatatgtcatgccctcgttgaggaaaactttagtgcagtttttatccgaattggaacattcgggcagtgggaggaataaggaacaaggggcgaggatgttagatcatttggttgtgagcgccccgaggatgataaggccctacatggagcccattttgaaggtcctggtgcccaaactgcgcgaccccgagccaaaccccggcgtcgtgctttccgtcctgctcacaatcggcgatttggccgaggtgagcagcggaggcaccgaactgcaagaatggatgcaagaactgatgggtattttactcgaaatgttgggcgacgcttccgcccccgaaaaacggggcgccgccttatgcaccttgggccagttggttggagtgaccggtcacgtaatccaaccctacaccgaatatccaatactgctcgacgtcctcctcaatttcctcaaaaccgaacaacagtcctacattcggcgagaaacaatccgcgttttggggctgttgggggctttggatccgtacaaacataaaataaatcggggggagattgattattatcccgaagcgcccgttttgataccgatgacggataaaggggaggatttgaacgcggatttgacgtcgagcgaaatgctggttaatatgagttcgagcactttggaggagtactatttggcgatagctatagccactttgatgcggattattaaggatccgacgctggcacaacaccatacaatggtggtgcaagcagttactttcatttttaaaagtttggggattaagtgtgtgccgtatatatcgcaagttttgcccagtcttttgcacgtagtacggacagccgacgttaactttaaggaattcctcttccaacagttggcacaactaatctacatcgtcaagcaacacattcgtaactacttggacgacatttgcctactaatcaaagaattttggaccccgaacagtacgattcaagggactttgatccttttagttgaacacatcgcagtggcgttgggggcgcaatttaaggtttatttaccgaaaatgttgccccatatcttacgcgtgttgaaccacgacacgtccaaggaacgactctacactatcaaattattggaagcgttacacaatttcggtaacaatttggacgaatatatgcacttgattttgccccccattgtccggttattcgacgctcaggagtgtccaatagtcgtgtcgaaaaaagccctcgagactatcgaccaattggccgaaattatcgacttttcggactttatctcacgcattgtccaccccttggttcgaacaattgataactgtcccgaattgagacccacagccatggaaactttatgttcactcatgcaacaattggggcgaaaattctcaattttcgtacctttggtacagaaagtgatgaccaaacataagatacaacacagtaaattcgatactttagtttcgaaaatccaatacgagacaacactggccgaagacgttgatttcccaatgccgagatccaaaacaaccgggaaaaatcgagacccagcgatgcctgccgatagtggaatgattcaaagactcaaagtttcggaatccaacctacaacaggcctggacccctgtccgaagagtctcgaaagacgattggttggaatggctaagacgcctcagtatcgaactattaaaacagtcaccaattccagcattacgttcgtgccttactttagcacagacgtattcgcaactgccacgtgatttattcaacgcagcgttcgtaagttgttggtccgaattgagcgaaaacatgcagaatgaactgatcagttgtctcgagcaagctttgactgtgccggacgttccggaaataactcaaactattttgaatttggccgaatttatggaacattgcgacaaggggcctttgcccctcgatagccacattctggggcaccatgcgatgcattgccgggcgtacgccaaagccttgcattataaggaagaggagtttcaaaggggggcgagcagtcaggttgtcgaagcactcatttcgatcaataataagttgcaacaaaaggaggcggctgaagggttgttacaatacgtcatgcagagggaaatgcaagtgcaggtcaggtggtacgagaagttgcacaattgggagaaggccctgaggttgtatactgagaaactggaaggggacgaggcggaccaagaggcttgtttgggcaaaatgagatgtctcgaagcgttgggcgaatggggcgaactgcaccaagtcgtcgagaaaagtttcagtttactaaatgacgacagcaaacaaaaggcgagtcggctagcggctgcggcctccttcggtttgcacgattacaggtcaatggaaacttacgttaatgtaattccaagggatacgcaagagggtgcgttctaccgtgcaattttggcaatacataaagaggattacgaagtggcccaaagattcatcgattcagctcgcgatttactcgataatgaattaactgcgatggctggtgagtcctaccaaagggcctacggggccatggtcatggtacaaatgttatccgagttggaagaagtaatgcagtatcggttagtaccagaacggaggcccactttaaaagccatgtggtggcaaaggctccaatcgggccaaaaactggtcgaagactggcaaagaatcatccaagtccattccttggtcttgaccccacaagaagacaaacgaacgtgggtgaaatacgcgtcattgtgtcgcaagagcggttcattaatgctatcgcaaaaaaccctagtcatgttactcggttacgacccaagcgaacgtcccgacgcccccttgcccaaaaaccagcctcacatcacactagcctacgccaaacatttatgggtggcacaggaaaaacaaaaagcgttccaaaaactatcacaattcgtcgctgactattcgcaaaacgagccaaacgacgacgtgacagttgaagagaaaaaaagactcctggctaggtgttacctcaaactgggggcctggcatgaggcacttgaaggcatcaacgaaacctccatacctttcattttgaagtgttacaaacaagcgactgaacacgaccctcaatggtacaaggcatggcacgcttgggcctatatgaatttcgaaacggtcttgtattacacgagacaggaggacaagacgcactatacagtcttagccgttcagggatttttcaaatcgattaatttatctaaaggaagttcattgcaagacactttacgtttattaacactgtggttcgattacggcgattggcccgaagtttacgatgccatagtcgaaggcattcgtttagtcgagaaaaacacgtggcttcaagtaattccgcaattaatcgcgcgaattgacacaacggcgttagtatcgaaattaatcaatcatctattggttgatattggaaaaacgcatccacaagccctagtctatccgttaaccgtcgcaacaaaaagtaattcaatcagacgtagaaatgcagctaatagtattttaaaatcgatgagtgaacattcccctacgttggtaagtcaggccatgatggcctcagaagaattgatccgagtggcaattttgtggcacgaaatctggcacgagggactagaagaagcctcaagattgtatttcggcgaacgtaacgttaaaggaatgttgcgaattctcgaaccgttgcatgcgatgatggaaagggggccccagacgttgaaagagacgagttttaatcagacgtacggcagggatctgaacgaggcgcaagactggtgccaaagatacaagctttcgagcaacattagagacctgaaccaggcgtgggacctctactaccacgttttccgccgcatttcgcgtcaattaccgcaactcacctccctcgaattacaatacgtatcgccaaatttgctagtttgtcaagacttagagttggcagtgcctggtagctactgtccaggacagccaatcgtacgcattgccaattttaaccgatctctcgaagtaattacctcaaaacagcggccccgaaaactagtaattcgtggaagcaacggcaaagactacatgtttttacttaaaggtcacgaggatctgagacaagacgagcgtgttatgcaactgttcggtttagttaatactttactaatgaaagacccggatacgttcaggcggaatttgacgatacagcggtatgcggtgattcccctgagtacgaattcgggtctgattgggtggttaccgcactgtgatacgctgcacactttaatacgggattatagagacaagaagaagattttgttgaatattgagcataggattatgttacggatggcgccggattatgatcatttaaccgtgatgcagaaaatggaagtttttgagcacgcacttgagcacacacatggtgacgatttagcgcggttgttgtggctgaaaagcccctcgtctgaggtttggtttgaccggagaacgaactacacgcggtctttagctgtgatgtcaatggttgggtatattttggggttgggggatcgccacccctccaatttaatgttggacagactgagcggcaaaatcctgcatatagatttcggcgattgcttcgaagtggcaatgactagggaaaaattcccggaaaagatccccttccgtttgactaggatgctaataaacgccatggaagtgacagggattgaaggcacgtacagacggacttgtgagtcggtcatgtccatgttacaccgaaataaagacagtctgatggcggtgcttgaagcctttgtttatgaccccctgcttaattggcgattgatggatattgaggtgcggaacttgccgatgaacagcgattcaatgtcgacgagttgttcccaaaaacagggctcatccgaatcgctcaatgttccgaaacgcgagatgataatggaagataacgaaccgcaacacgaagttaatgccagggcggttattatcatcaatcgagttagagataaactgaccgggaacgatttcgctacggaggaacctttgactattcctaagcaagtcgatctgttaatacaacaagcgacaagtaacgagaacttgtcacagtgttacataggctggtgccccttttggtaa

SEQ ID NO: 149830 - protein, 2400 aa, Tribolium castaneum
MSTLAMQQFVAGLKSRNPDVRQKTARELSLYVKSELREATPDEITNFLDEFNHHIFEMVSSNDPNEKKGGILAIVCLIGVDFGNMTTRISRFANYLRNLLPSSDVSVMESVAKTMGRLALVSGSKASEYVEFEVKRAFEWLSGDRIEGKRQAAVLVLKELALTMPTYFYQHVSQFFDLIFFAIQDPKPAIRESAVEALRAALVVTAQRETAKQNQKPQWYKQCYDESVKMLSVERGERMKEERVHGFLLILNELVRCSNAEWERKCKSLLERTDTKQPVETSFNFTKSRFVFSVSRRIPQYQAVSLAPSQIAIIESQSCRGLVSEKFDYICLDVLAQRLSRSSHIQQSFLTILPRLAAFDRENYVKQHLSPVMNHIFNILKSREKERAKAFVTIGLIAIAVESDIEPYIERIMEIIRMYLPRADILGRKRSPIDSSIFNCVTFLAHALKNHSKMDIPNLLEPMLATGLTASLTICFRELSRKVPEHKERISLGLLKMLSYILLNKPLVHPGMPRHLTGTVMSLAIPEVNDVQIIVLALKTLGTFDFEGQRLLPFVHRCANHFLIHDNNEIRLEAVRTTCRLLRHAIHSTAKNSSDTVTKTVAAVLHRLLSVGLTDTDPNVRYGVLISLDRTFDNHLAQAESLSALFLALQDEMFEIREVALFTIGRLSAMNPAYVMPSLRKTLVQFLSELEHSGSGRNKEQGARMLDHLVVSAPRMIRPYMEPILKVLVPKLRDPEPNPGVVLSVLLTIGDLAEVSSGGTELQEWMQELMGILLEMLGDASAPEKRGAALCTLGQLVGVTGHVIQPYTEYPILLDVLLNFLKTEQQSYIRRETIRVLGLLGALDPYKHKINRGEIDYYPEAPVLIPMTDKGEDLNADLTSSEMLVNMSSSTLEEYYLAIAIATLMRIIKDPTLAQHHTMVVQAVTFIFKSLGIKCVPYISQVLPSLLHVVRTADVNFKEFLFQQLAQLIYIVKQHIRNYLDDICLLIKEFWTPNSTIQGTLILLVEHIAVALGAQFKVYLPKMLPHILRVLNHDTSKERLYTIKLLEALHNFGNNLDEYMHLILPPIVRLFDAQECPIVVSKKALETIDQLAEIIDFSDFISRIVHPLVRTIDNCPELRPTAMETLCSLMQQLGRKFSIFVPLVQKVMTKHKIQHSKFDTLVSKIQYETTLAEDVDFPMPRSKTTGKNRDPAMPADSGMIQRLKVSESNLQQAWTPVRRVSKDDWLEWLRRLSIELLKQSPIPALRSCLTLAQTYSQLPRDLFNAAFVSCWSELSENMQNELISCLEQALTVPDVPEITQTILNLAEFMEHCDKGPLPLDSHILGHHAMHCRAYAKALHYKEEEFQRGASSQVVEALISINNKLQQKEAAEGLLQYVMQREMQVQVRWYEKLHNWEKALRLYTEKLEGDEADQEACLGKMRCLEALGEWGELHQVVEKSFSLLNDDSKQKASRLAAAASFGLHDYRSMETYVNVIPRDTQEGAFYRAILAIHKEDYEVAQRFIDSARDLLDNELTAMAGESYQRAYGAMVMVQMLSELEEVMQYRLVPERRPTLKAMWWQRLQSGQKLVEDWQRIIQVHSLVLTPQEDKRTWVKYASLCRKSGSLMLSQKTLVMLLGYDPSERPDAPLPKNQPHITLAYAKHLWVAQEKQKAFQKLSQFVADYSQNEPNDDVTVEEKKRLLARCYLKLGAWHEALEGINETSIPFILKCYKQATEHDPQWYKAWHAWAYMNFETVLYYTRQEDKTHYTVLAVQGFFKSINLSKGSSLQDTLRLLTLWFDYGDWPEVYDAIVEGIRLVEKNTWLQVIPQLIARIDTTALVSKLINHLLVDIGKTHPQALVYPLTVATKSNSIRRRNAANSILKSMSEHSPTLVSQAMMASEELIRVAILWHEIWHEGLEEASRLYFGERNVKGMLRILEPLHAMMERGPQTLKETSFNQTYGRDLNEAQDWCQRYKLSSNIRDLNQAWDLYYHVFRRISRQLPQLTSLELQYVSPNLLVCQDLELAVPGSYCPGQPIVRIANFNRSLEVITSKQRPRKLVIRGSNGKDYMFLLKGHEDLRQDERVMQLFGLVNTLLMKDPDTFRRNLTIQRYAVIPLSTNSGLIGWLPHCDTLHTLIRDYRDKKKILLNIEHRIMLRMAPDYDHLTVMQKMEVFEHALEHTHGDDLARLLWLKSPSSEVWFDRRTNYTRSLAVMSMVGYILGLGDRHPSNLMLDRLSGKILHIDFGDCFEVAMTREKFPEKIPFRLTRMLINAMEVTGIEGTYRRTCESVMSMLHRNKDSLMAVLEAFVYDPLLNWRLMDIEVRNLPMNSDSMSTSCSQKQGSSESLNVPKREMIMEDNEPQHEVNARAVIIINRVRDKLTGNDFATEEPLTIPKQVDLLIQQATSNENLSQCYIGWCPFW

SEQ ID NO: 149831 - DNA, 7083 bp, Aspergillus niger
  CDS (1)..(7083)
atggcgcaagcaggtcctatcacggacgttactcatcggcttttcgccgagttgaagtcgaagaatgaggagacacgggtgcgagctgcttacgagctttacgacaacgttctcgctatctctcgagactggtcccccgagaagtttttggagttttttaacgcggttagccagcgcatagcacaactggtagttactgggaatgacgcacacgagaagatcggtggcctgttggcccttgatcgtctgatagactttgaaggagtggacgctgcgcagaagaccactcggttcgccagttacttgcgcaatgctcttcgcagcaacgacaatgcagtattggtctatgctgctgcggctcttggccgtttggctaaaccaggcggagctctgactgcggagctagtggagagtgaaatacaatctgctctggaggcccttcagtcagaacgacaagaaagccgacggtttgctgccgtgctcgttatccgggagctcgcgaaaggctcacccacgcttctttatggcttcgttccccagatcttcgagctaatttgggtcgctctgagggatcccaaggttctcatacgggaagctgcggctaatgctgtcagcgagtgctttgatataatcgctgctagagatttgcaggttcggcagctatggttctcaagggtatacgaggaagcgcttttaggtctcaaatcaagcaatgtggattggatacatggctcgctcctggttctcaaggagcttctcctaaagggcgccatgttcatgaatgagcactaccgaaatgcctgcgagatagtcctccgtctcaaggaccatcgtgatccgaaaatccgcactcaggttgttcagacaatcccgattctcgcctcctacgccccccttgacttcacagagacgtacctccacagattcatgatctatctccaggcccagcttaaaagagataaagaacggaacgccgcgttcatcgctataggaaagatcgcgaatgctgttggggtcgccatcgcacaatatctcgatggcatcatcgtttatatcagggaaggtctagcaatgaaagcgaggaaccgagctgccgttcaagaagcgccaatgttcgagtgtatcagtatgctgtctttggctgtaggccaggcgctcagcaagtacatggaagcattactcgatcccattttcgcctgcgggcttagcgaatccttaacccaagcgctggtcgacatggctcactatattccgccaataaagcccataatccaagaaaaactactggatatgctaagcttgattctttatggcactcctttcaggcctttggggtgcccagagagcagattacctccaatgccctcatttgcacgggatttcgcccctcaagagctacactctgacacggagatcgcccttgcattgcacacactaggcagttttgacttttcgggccatatccttaacgaatttgtgcgggacgtggcgatcaactatgtcgagaatgacaaccctgagatccggaaagcttcagcactcacctgctgtcagctgtttgttcatgatcctatcatcaaccagacaagcagtcattcgatccaagtcgtcagtgaggtaatcgacaagcttttgactgttggtgttggagatcccgaccctgacatccgacgtactgtcctgtggtccttggataggaaatttgatcggcacctagctagaccggagaacatcagatgtttattcttggctgtcaatgatgaagtgttccccgtcagagaggctgcgatctgtatcataggtcgcctttccagtgtcaaccctgcctacgtcttcccaccgctgcggaagctgcttgtcaaccttttgacaagtctcggctttgctagcactgcacgccaaaaggaagagagtgcccagttgatcagcctgtttgtttcgaatgcgacgaaattgatccggtcctatgttgatcctatggtgactacactgctacccaaggcaaccgacgccaatcctggtgtcgcttccactacattgagggccgttggtgaacttgcaaatgtgggtggcagtgaaatgaaaacatacctgccgcagcttatgccgattatcctggatgcgctacaggatctctcttctcattccaagcgcgaggcggccttgaggacactgggccagctggccagcaactccggttacgttattgatccatacctcgaatattctcatctactcgcagtccttatcaacatcatcaagaccgagcaaaccgggtctctgcgtaaggagacaatcaaattactgggtattcttggagccttggacccctacaaataccaacagatcagcgagaccgcgccggtagttcatcacatcaatgaagtgcaaactgtatctgatgtcgcgcttatcatgcaaggcctcacgccgtccagcgaggagtactaccctacagttgttattaacacgctaatgcaaaacatcttgcgtgaatcgtctcttgcgcagtatcactctgcagtcattgatgccattgtgacgatattcaagacccttggtctgaaatgcgtaccattccttggacagataataccaggtttcatatcggtcatcagaggatcacccccgagccgccttgaatcgtacttcaatcagatggcgattctggtcaatatcgtgcggcaacacatacgagcctttttgcccgagatcattgaagtcgtccgtgaattctgggaagcttcctaccaagttcaggctacaatactctcgctcgtggaagcgatcgccaagtcattggaaggtgaattcaagaagtaccttgcaggcctgatccctccgatgctcgacacgcttgagaaggacaccacgatgcgtcgtcaaccttcggagaagatactccacacatttttgatattcggtacaagcggagaggagtatatgcacctgattgttccctccatcgtgcgactttttgacaggactcaaaacccccagagtatccgaaagtccgctattgagaccctcaccaagctttcacggcaggtgaacgtctcggacttcgcatcattgatggtccattctctgtcccgggttgttgcaggcaccgatcgcgtgctgcgacaagctgctatggactgtatctgcgcgctcatctttcagctaggccaagacttcaaccactacatccacctgctgaataaggtcataaagtataaccagatcaatcatgtcaactaccacatcttggtgacgaagatacaaaagggggatccgctcccacaagacctcaatcccgaggaaaactacgcggcactggcggatgacaccaattatgccgagattggacaaaagaagatggttgtcaaccagcagcacttgaagaatgcttgggacgcctcacagaagtctactcgtgaagactggcaagagtggattcgacgatttagcgttgaattgctgaaagagtcaccttctcccgctcttcgagcatgcgcgagtttggctggtatatatcagcccttagcgagggatctcttcaacgcggcgtttgtttcctgctggaccgagttgtatgaccaataccaagaagagctcgtccggtcgatcgagaaggccctcacctcacctaatatacctcccgaaatcctgcaggttcttcttaacctagcggaattcatggagcatgacgacaaggcccttcccattgatatccgcactctaggcaagtacgctgctaaatgtcacgcgttcgcgaaggccttgcattacaaggaacttgagtttgagcaagaccagaactcaggggcagtggaggctttgatcaccatcaacaatcagcttcagcaatctgatgctgcaattggtatcttgcgaaaagcgcaggcttaccgggatgtggagctcaaagagacatggtttgagaagcttcaacgttgggaggaggctcttgctgcgtacaaacgacgtgagaagatagacccagattccttcggagtcacgatgggtaaaatgcgctgtctccatgctctcggtgagtggaaggtgctctccgacctcgcccaggagaagtggaaccaggcatccctcgaacatcgcagagccattgcacctctagctgcagcggctgcgtggggtcgcggccagtgggaattgatggattcctatcttggtgtaatgaaggagcagtcgccagatcggtccttcttcggcgccatccttgccattcaccggaatcagtttgacgaagcaaccatgtatattgaaaaggctcgcaatggtttggacacagagctttcagcactgctgggagagtcgtacaaccgtgcctacaatgttgttgtgcgtgttcaaatgctcgctgagctcgaggagatcattacgtacaaacagaacattggcgatcccgagaaacaggattcgatgcgtcaaacatggaacaagcgactactcggctgtcaacaaaatgtagaggtatggcagcgcatgctcaaggttagggcgcttgtcacctctcctcgtgagaacctcgacatgtggattaaattcgccaatctctgtcgcaaatccaaccgtatgggactcgccgagcggtcgctcgcatcactggagaccgtggtttccgacagcaacggcacgagggcaattgctcccccagaagttacctatgcccgattgaagttcaactgggccaccggacgtcaacgcgaggcccttcaaatgttgaaggagttcacttcaagcctgacagaagaccttacacggttcaatgctctcatgttatcgcaggcggatcataatggaataaatggattcagaaggctactagcaaagagctatctccgccaaggtgaatggcagacaacgctgcagcgaggtgattggagaccggaacacgttcgtgaagtgctcaatgcgtatgccgctgcgaccaaatacaaccgtgattcatacaaagcatggcattcgtgggcattggcgaactttgaagtcgttacgacgattgctagccaagccagcagagatggcacgacaatggccatggtccccggacacattgtcacggagcatgtaatacctgcacttcgcggcttcctcaggtcaatttcactgtcgtcaacctcatccctgcaggatacattgcggttgctgacactctggttcacccacggtggtgatcaggaagtgaacagtgttgtagcagaaggctttacggcagtgaacattgatacctggcttgctgtcactccacagcttatagctcggatcaatcaacctaatatccgagtgcggagtgctgttcatcggctgctggctgaagttggcaaagtacatccccaggctttggtgtacccattgaccgttgcaatgaagtctaatgttgctcgacgatcgcaatccgccagcaacattatggacagcatgcgacagcacagtgcgaaactcgtggagcaagctgatgttgtaagtcatgagctgattcgagtcgcggtcttgtggcacgagctctggcacgaaggcctagaagaagcctcccgactctactttggcgatcacaatgtggaaggcatgtttgcaactctagcgcccttgcatgagatgctcgataagggtgccgagacgttgcgcgaggtgtcatttgctcaggcctttggtcgcgatcttgcagaggcgaagcactattgtatgctctaccgggagactgaagagattggtgatttgaaccaagcatgggatctttattacacagtattccgcaagatcagccggcagctgccacagctctccacgctcgatttgaaatacgtttcacccaagctcaaggattgtattgaccttgaccttgcggtcccaggtacataccaaagtggcaggcccatcattcgcatcctcagcttcgatcccatattacacgtactacagaccaagaagagaccacggagaatgacattgaagggcagtgacggaaactcgtacatgtactgtgtgaagggacacgaagacatccggcaggatgaacgtgtcatgcagctcttcggcctggtcaacacactacttgataacgatggagagagtttcaaacggcatctgtctgtgcaacggttccctgcaatcccgctatcacagagctctggtatccttggatgggtttccaacagtgacacattgcatgccttgatcaaggaataccgagaaagccgacgtatcttgctgaacattgaacaccgcattatgctccaaatggcgcccgactacgataatcttactcttatgcagaaggtggaggtgttcggctatgccatggacaataccactggaaaggacctctatcgcgttctatggcttaagagtagtagctcggaggcctggctggagcgccgcacgaactacacgcgttcccttggtgtcatgtccatggttggttacatacttggtcttggcgatcgtcacccgtccaatttgcttctggatcgggttaccggaaaagtggtccatatcgacttcggtgactgcttcgaggtggcgatgcaccgtgagaagtatcctgagagggtacctttccggttgactcgtatgttgacatttgccatggaagtcagcaatatcgaaggaagttaccggattacttgcgaggctgtcatgcgtgtcttgagagagaacaaggattccctcatggctgttttggaagcgttcattcacgatccactgatcaactggcgtttggggatccgcgagtccccagatcgaatgccattttctgccgagcgtcgtcagtcggtcgtctctaacattaatatcgatcatggggtacagcccagcaacttctctcgtcaccgccggccttccattcttgagggtggtatcttggatgcacaggagggcattcccaacgaagctagagaggcacagaacgcgcgagcgctccaggtgcttgcccgtgtcaaggagaagctgacaggaagagatttcaagccgagtgaggaactcaacgtcagcgaccaggtggacaagcttcttgcgcaagccaccagtgtcgagaacatctgtcagcattggattggatggtgcagtttctggtga

SEQ ID NO: 149832 - protein, 2360 aa, Aspergillus niger
MAQAGPITDVTHRLFAELKSKNEETRVRAAYELYDNVLAISRDWSPEKFLEFFNAVSQRIAQLVVTGNDAHEKIGGLLALDRLIDFEGVDAAQKTTRFASYLRNALRSNDNAVLVYAAAALGRLAKPGGALTAELVESEIQSALEALQSERQESRRFAAVLVIRELAKGSPTLLYGFVPQIFELIWVALRDPKVLIREAAANAVSECFDIIAARDLQVRQLWFSRVYEEALLGLKSSNVDWIHGSLLVLKELLLKGAMFMNEHYRNACEIVLRLKDHRDPKIRTQVVQTIPILASYAPLDFTETYLHRFMIYLQAQLKRDKERNAAFIAIGKIANAVGVAIAQYLDGIIVYIREGLAMKARNRAAVQEAPMFECISMLSLAVGQALSKYMEALLDPIFACGLSESLTQALVDMAHYIPPIKPIIQEKLLDMLSLILYGTPFRPLGCPESRLPPMPSFARDFAPQELHSDTEIALALHTLGSFDFSGHILNEFVRDVAINYVENDNPEIRKASALTCCQLFVHDPIINQTSSHSIQVVSEVIDKLLTVGVGDPDPDIRRTVLWSLDRKFDRHLARPENIRCLFLAVNDEVFPVREAAICIIGRLSSVNPAYVFPPLRKLLVNLLTSLGFASTARQKEESAQLISLFVSNATKLIRSYVDPMVTTLLPKATDANPGVASTTLRAVGELANVGGSEMKTYLPQLMPIILDALQDLSSHSKREAALRTLGQLASNSGYVIDPYLEYSHLLAVLINIIKTEQTGSLRKETIKLLGILGALDPYKYQQISETAPVVHHINEVQTVSDVALIMQGLTPSSEEYYPTVVINTLMQNILRESSLAQYHSAVIDAIVTIFKTLGLKCVPFLGQIIPGFISVIRGSPPSRLESYFNQMAILVNIVRQHIRAFLPEIIEVVREFWEASYQVQATILSLVEAIAKSLEGEFKKYLAGLIPPMLDTLEKDTTMRRQPSEKILHTFLIFGTSGEEYMHLIVPSIVRLFDRTQNPQSIRKSAIETLTKLSRQVNVSDFASLMVHSLSRVVAGTDRVLRQAAMDCICALIFQLGQDFNHYIHLLNKVIKYNQINHVNYHILVTKIQKGDPLPQDLNPEENYAALADDTNYAEIGQKKMVVNQQHLKNAWDASQKSTREDWQEWIRRFSVELLKESPSPALRACASLAGIYQPLARDLFNAAFVSCWTELYDQYQEELVRSIEKALTSPNIPPEILQVLLNLAEFMEHDDKALPIDIRTLGKYAAKCHAFAKALHYKELEFEQDQNSGAVEALITINNQLQQSDAAIGILRKAQAYRDVELKETWFEKLQRWEEALAAYKRREKIDPDSFGVTMGKMRCLHALGEWKVLSDLAQEKWNQASLEHRRAIAPLAAAAAWGRGQWELMDSYLGVMKEQSPDRSFFGAILAIHRNQFDEATMYIEKARNGLDTELSALLGESYNRAYNVVVRVQMLAELEEIITYKQNIGDPEKQDSMRQTWNKRLLGCQQNVEVWQRMLKVRALVTSPRENLDMWIKFANLCRKSNRMGLAERSLASLETVVSDSNGTRAIAPPEVTYARLKFNWATGRQREALQMLKEFTSSLTEDLTRFNALMLSQADHNGINGFRRLLAKSYLRQGEWQTTLQRGDWRPEHVREVLNAYAAATKYNRDSYKAWHSWALANFEVVTTIASQASRDGTTMAMVPGHIVTEHVIPALRGFLRSISLSSTSSLQDTLRLLTLWFTHGGDQEVNSVVAEGFTAVNIDTWLAVTPQLIARINQPNIRVRSAVHRLLAEVGKVHPQALVYPLTVAMKSNVARRSQSASNIMDSMRQHSAKLVEQADVVSHELIRVAVLWHELWHEGLEEASRLYFGDHNVEGMFATLAPLHEMLDKGAETLREVSFAQAFGRDLAEAKHYCMLYRETEEIGDLNQAWDLYYTVFRKISRQLPQLSTLDLKYVSPKLKDCIDLDLAVPGTYQSGRPIIRILSFDPILHVLQTKKRPRRMTLKGSDGNSYMYCVKGHEDIRQDERVMQLFGLVNTLLDNDGESFKRHLSVQRFPAIPLSQSSGILGWVSNSDTLHALIKEYRESRRILLNIEHRIMLQMAPDYDNLTLMQKVEVFGYAMDNTTGKDLYRVLWLKSSSSEAWLERRTNYTRSLGVMSMVGYILGLGDRHPSNLLLDRVTGKVVHIDFGDCFEVAMHREKYPERVPFRLTRMLTFAMEVSNIEGSYRITCEAVMRVLRENKDSLMAVLEAFIHDPLINWRLGIRESPDRMPFSAERRQSVVSNINIDHGVQPSNFSRHRRPSILEGGILDAQEGIPNEAREAQNARALQVLARVKEKLTGRDFKPSEELNVSDQVDKLLAQATSVENICQHWIGWCSFW

SEQ ID NO: 149833 - DNA, 7278 bp, Gibberella fujikuroi
  CDS (1)..(7278)
  misc_feature (1591)..(1591): y is t or c
  misc_feature (5009)..(5009): r is g or a
atggcgcaagcacagcaggtcgccctggaccggctggacaacatctcccgcgctctaaaatcaagaacgagcgatgatttgcgaaaacgatccgccgtgcagcttcgcgagcttgtggctgtctgccatcgagacctaagccccgagcaattccaggttttctacaactcagtcaacaacaggatcacacagctcatcacacatggaaacgactcgtccgagcgactcggaggcatctatgccctcgatgcgctcatcgatttcgatggcgtcgacgtcggcgtcaaatacacgcgtttcacacagaacctcaagaccattcttcgaggcaaagacatcaaccctatgcaaccagcagcgatcgcgctggggaaattatgtcgcccgggcggcgcgatgatatcagaagtggtggactcagaggttaataccgctctcgagtggctacagaacgaccgcatcgaggaacgaagatatagcgctgtcctcgttctccgcgaactggcccgtagtgccccaacgcttatgtaccaatatataccgacaatcttcgactggatctgggtaggactccgagatcctcgacagcttattcgggcaacatcagcggaaacagttagcgcctgtttccgtatccttcgtgaacgagaccaggacatgaagcaactatggatggataagatctataacgaagcgagatccggtctcaaggtgaacactgtcgagtcgattcacggctcgttgctggtcttgaaggaactgctcgagcagggagctatgtacatgcaggagcattaccaagaggcatgcgaaattgtcttcaaacacaaggaccatagagacccgactattcgaaagaccgtggttcttttaatcccagaccttgccagctactcgccagctgactttgcacacacttggctgcacaagttcatggtatacctatccggcatgctgaagaaggacaaagagcgtaacgatgctttccttgccattggtaacatagccaattcggtgaaaagcgctattgccccgtacctcgatggtgtccttatttacgtgcgcgaaggtctcagcctccagtcccgcaagagaggttcagtcgaccctgtctttgactgcattagtcgtcttgccgtcgcggttggtcagactctcagcaaatacatggaggcactcttggatcctatttttgcgtgcgatctcacccccaagctcacacaggctctcgtcgatatggccttctacatcccccccgtcaagccgaccatccaggagagactacttgatatgctcagcgtagttctctgcggcgaaccgtttaaaccgcttggcgctccacaaccgaatactctcagctcagtcccgattattcccaaagacgcaaaagacccccacgcttacgagcaccgaagggctgaggtaaaattggcgctcaacactctcgggagcttcgatttctcggggcatgttctgaacgagttcgtccgagatgtcgcgatcaagtatgttgaagacgaggatccagaaatccgcgaggcagcggccttgacatgctgccaactatacgttcgcgatccaattgtcaacyagacgagttaccatgcgcttcaggttgtgggtgatgtgatcgagaaactactcacagtcggagtctccgatcctgaaccgaatatcaggcggacagttctggcggctctcgacgaacgatttgacagacacttggccaaggccgaaaacattcgcatcctattctttgcgctcaacgacgaggttttctcgatcagagaagtcgccatctctatcatcggccgcttggctagatacaacccagcatatgtcattccttcgctacgaaagactctcattcagatgcttactgagctcgagttttccgatgtcgccaggaacaaggaggaaagcgcaaagctgttgagcctcttggttcaaaatgcgcaatctctcatcaagccctatgttgagcccatgatctcagtacttctccccaaagccaaggacggcaatccttctgttgctgctaccattcttaaggccattggtgagcttgcgaccgtgggcggtgaggatatgatgccgtacaaggaccgactgatgccaattattcttgatgcgctacaggatcagagctctaacgcaaaacgaggtgccgctctacatgctctgggacagcttgcgagcaattcaggatacgttattctgccatacatcgaatacccacagctgctcgagatcctgcagagcatcatccgaaccgaagggcaacaagtacccctgcgacaggagacgatcaaactgatgggtattcttggcgctctggatccttacaaacatcaggccgaggaacgaacccccgattctcgacgcggcgaggccaaccaactaacagacatttctctcatgatgaccggattaacaccttctaacaaagagtacttcccgactgttgtgattaatgctcttctcgcgatcctgaaggactcttcgttggtccagcaccacgccgctgtgattgaagcgatcatgaacatctttcgcacccttggcttggagtgtgtgtccttccttgatagaatcataccggcattcctacaggtgatacgatctgcgacctcgacaagactcgagtcttacttcaatcaactggccaccctcgtcagcatcgtgcgacaacacataaggaattacctaccgtcaattgttgagatcctgcaggagtactggcatacctcaccttcactacagactacgattttgtccctggtcgaggccatctcgagatcgcttgagggcgaattcaaaatttacctggctggactgctaccactgatgctcggtgttcttgacaaggatacttccgccaagcgcactccatcggagagagtgatgcacgccttcttggtgtttggtgccagtgctgaggagtacatgcatctcatcattcccgtcatcgtcaggacattcgagaagcagggtcagcctacgttcatcagaaagcaggccatcgacacgatcggcaagatctctcgccaagtgaaccttaacgacttcgctgcgaagatcatccacccacttacacgcgtcttggacatgggtgagcctgtcctccgtaccgctgcgctagatacgctctgcgcgctcatccaacagctgggcaaagactatctacactttatgggtacagtcaacaagaccatcaatcagcaccagatccagcactccaattacgagctacttgtgagcaagcttcaaaaaggggaggtactgccacaggacttgagctctggcgttggctttgctgatggcgcagacgagactccttttgcggaccagggcactaagaagctggagatgaatgccattcatttgaaggctgcttgggatactaaaggcaaatccacaaaggaggattggcaagagtggctgcgacgcttcagtacaacattgcttaccgaatcaccgaaccatgctctccgagcttgtgccagcctcgccagcgtgtatctacctctggctcgagagctctttaactcagcgttcgtgtcttgctggagcgagctctatgaacaattccaagacgaactcatccagaacatcgagagcgctataaaatccgagaacgtaccacccgatctgcttggcctcctactcaacctcgccgagtttatggagcatgacgacaaggctttgccgatcgacattcgagttctcggtagggaggcagctcgctgtcacgcgtacgcgaaggccctgcattacaaggagctcgagttcctgcaagaccagagcagtggtgcggtcgaggccctgatcgttatcaacaatcagctccaacagtctgatgcagctatcggtattctccgcaaagctcaactgtataaggaaggcatccagctgcgggagacctggttcgagaagttggagcgttgggaagaggcgctggcgttttatgaaaagcgtgaggaggaggtgcctgaggatcaggcgatacccgttgacatcgtcatgggtaagatgcgttgtttgcatgctttgggagagtgggaggctttggcttcattgactgggagcacctgggccaactctacgcccgaggttcagagaatgattgctcctcttgccacggctgctgcatggggtctgaataagtgggattccatggacaactatctttcgtcgctcaagagatactcacccgaccgatcattcttcggtgcgattttggcgctccaccgcaatcagttccgcgaggcgattgcatgcgttcagcaagctcgtgaaggcctggataccgagttgagtgcgttggttagtgagtcgtacaaccgggcataccaggtcgtcgttcgcgtgcagatgcttgctgagcttgaggagctcatcgtctacaagcagtgcgacgagaagaagcaggccataatgcgacgaacttgggagacccgactgaagggttgtcagaggaacgtcgaggtttggcagcgcatgctcagactacgggccatagtgattgcaccgacggagaatatgcacatgtggatcaagtttgccaacctttgccgcaagtctggacgaatgggactggccgagaagtctctcaaacaactcattggaaccgacgctcctctcatatcagcaattccttattggaacgagcagcgacagccagcatccaaccccagagctgcaccagccgcacaggtcatctatgccgtgctcaagtaccagtgggagcttggacagcagctgcccgtcaacaagggtagcataccagagaagacgctgtattgcctgcgcaagttcaccaaacgatgtgcgcaccgtctcgaggttgccagggcccaccttgctgcacaagctggtaacgatgccagtatcactggcgactacggattccagaacccgatggaacctgccataataagccaacatacaaaacgagcgctgtatgaccaaacagtcctccttgccaagtgctatctgcgccagggagrgtggctgattgcgctcaacaaggatgattggcagtacactcaggttcaagacattcttttgtcttactctcaggcgaccaagtacaatcctcgatggtacaaaggcactggcatggcttgggcgctggccaattttgagattgtgcagacactgacagctggaaatgaaggacacttgtcgaggacagaccagagtatggtgattgatcacgtggttcccgctgtcaagggcttcttcaaatccatcgcactttcacagggaagctcccttcaggatactcttcgactgttgacactctggtttactcatggtggaagttcagatgtcaacgtagccgttaccgaaggtttcgctaatgtcagcgtggacacatggctcgaggtcattcctcagttgatcgcccgcatcaaccagcctaacaagcgagttcagcaatcggtgcacaaccttcttgcagatgtcggacgagctcatcctcaggctctggtctaccctctcactgtcgccatgaaatcttggcagaacacgcgtagatctcgttctgcagctcaaattatggatagcatgagacagcacagcgcaaacctggtcgctcaggccgacacggtcagtcatgaactgattcgtgtcgccgtcctgtggcatgagctttggcatgagggattggaggaagcttcgcgattgtactttggtgatagcaacattgaaggcatgtttgcaacactggcgcctctccacgaactcctggagcgtggacccgagaccctccgcgagatctcctttgcacaggctttcggtcgcgatcttaaggaggcgcaagactggtgccgacagtacgagacaagccaagacgtcaatgacctgaaccaggcgtgggatctgtattatcaggtattccgcagaataagtaggcagctaccgcaggtgaccacgctggagttgacgtactgctcgcctaagcttcttaacgcgaagaacttggacctggcagttccgggaacatacaagagcggacagcccatcgtgaggataatgtcctttgacacaacgtttagtgttatcaactctaagcaacgtccacgaaagctcaacgtcaacggcagtgacggcaagtcgtacgcgttcctgctcaagggccacgaggatatccgccaggacgaacgagttatgcagctgttcggcctgtgcaacacgctcctctcccacgactcggagtgcttcaagcgccacctcaacatccagcgctaccctgccatcccgctctcgcagaatagcggtctgctcgggtgggttcccaacagcgacaccctgcacgttcttattagggagtatcgtgagagtcgcaagatcctgctcaacattgaacaccgcatcatgctccagatggcccccgactacgataacctcaccttgatgcagaaagtcgaggtgtttggctatgcgctcgacaacaccacgggacaggacctgtaccgtgttctttggctcaagtcaaagtcttctgaggcttggcttgagagacgaaccaactacactcgttctcttggtgtcatgtcgatggtgggatacattctgggactgggcgatcgtcatccttccaacttgatgcttgaccgcgtcactggaaagattattcacatcgatttcggtgattgtttcgaggtggcgatgaagagagagaaatacccggagagggttcccttccgactcactcgcatgctgacctatgctatggaagttagcaacattgagggtagctttagaatcaccttcgagaacgtgatgagggttctacgagacaacaaagagagcgtcatggctgttctcgaagcattcatccacgatcctctccttacgtggcgtctcacaagcgccgcatccccaacaggccccaacttcaactcagaccacgacacagccatgcccgtccccggcggagtccgcgcacgtcgccaatccatcctggacagcgacgtcgcgccctccgaactcctcaacgcacccgagccatcaatccagacacgtgctcgcgcccgcacaaacagctcagcgggtgaagccttgaccaacggcggcgcaccagaggtggagagccagaacgcgagggcggtggaggtgctggaccgcgtgcagcagaagcttacgggtcgggacttcaagaccaacgaggagctggatgtcattgcgcaggtcaataagttgatcatggaggctacgaagctggagaatctgtgccagcactacataggatggtgcagcttctggtga

SEQ ID NO: 149834 - protein, 2425 aa, Gibberella fujikuroi
  misc_feature (531)..(531): The Xaa at location 531 stands for Stop, or Gln.
  misc_feature (1670)..(1670): The Xaa at location 1670 stands for Glu, or Gly.
MAQAQQVALDRLDNISRALKSRTSDDLRKRSAVQLRELVAVCHRDLSPEQFQVFYNSVNNRITQLITHGNDSSERLGGIYALDALIDFDGVDVGVKYTRFTQNLKTILRGKDINPMQPAAIALGKLCRPGGAMISEVVDSEVNTALEWLQNDRIEERRYSAVLVLRELARSAPTLMYQYIPTIFDWIWVGLRDPRQLIRATSAETVSACFRILRERDQDMKQLWMDKIYNEARSGLKVNTVESIHGSLLVLKELLEQGAMYMQEHYQEACEIVFKHKDHRDPTIRKTVVLLIPDLASYSPADFAHTWLHKFMVYLSGMLKKDKERNDAFLAIGNIANSVKSAIAPYLDGVLIYVREGLSLQSRKRGSVDPVFDCISRLAVAVGQTLSKYMEALLDPIFACDLTPKLTQALVDMAFYIPPVKPTIQERLLDMLSVVLCGEPFKPLGAPQPNTLSSVPIIPKDAKDPHAYEHRRAEVKLALNTLGSFDFSGHVLNEFVRDVAIKYVEDEDPEIREAAALTCCQLYVRDPIVNXTSYHALQVVGDVIEKLLTVGVSDPEPNIRRTVLAALDERFDRHLAKAENIRILFFALNDEVFSIREVAISIIGRLARYNPAYVIPSLRKTLIQMLTELEFSDVARNKEESAKLLSLLVQNAQSLIKPYVEPMISVLLPKAKDGNPSVAATILKAIGELATVGGEDMMPYKDRLMPIILDALQDQSSNAKRGAALHALGQLASNSGYVILPYIEYPQLLEILQSIIRTEGQQVPLRQETIKLMGILGALDPYKHQAEERTPDSRRGEANQLTDISLMMTGLTPSNKEYFPTVVINALLAILKDSSLVQHHAAVIEAIMNIFRTLGLECVSFLDRIIPAFLQVIRSATSTRLESYFNQLATLVSIVRQHIRNYLPSIVEILQEYWHTSPSLQTTILSLVEAISRSLEGEFKIYLAGLLPLMLGVLDKDTSAKRTPSERVMHAFLVFGASAEEYMHLIIPVIVRTFEKQGQPTFIRKQAIDTIGKISRQVNLNDFAAKIIHPLTRVLDMGEPVLRTAALDTLCALIQQLGKDYLHFMGTVNKTINQHQIQHSNYELLVSKLQKGEVLPQDLSSGVGFADGADETPFADQGTKKLEMNAIHLKAAWDTKGKSTKEDWQEWLRRFSTTLLTESPNHALRACASLASVYLPLARELFNSAFVSCWSELYEQFQDELIQNIESAIKSENVPPDLLGLLLNLAEFMEHDDKALPIDIRVLGREAARCHAYAKALHYKELEFLQDQSSGAVEALIVINNQLQQSDAAIGILRKAQLYKEGIQLRETWFEKLERWEEALAFYEKREEEVPEDQAIPVDIVMGKMRCLHALGEWEALASLTGSTWANSTPEVQRMIAPLATAAAWGLNKWDSMDNYLSSLKRYSPDRSFFGAILALHRNQFREAIACVQQAREGLDTELSALVSESYNRAYQVVVRVQMLAELEELIVYKQCDEKKQAIMRRTWETRLKGCQRNVEVWQRMLRLRAIVIAPTENMHMWIKFANLCRKSGRMGLAEKSLKQLIGTDAPLISAIPYWNEQRQPASNPRAAPAAQVIYAVLKYQWELGQQLPVNKGSIPEKTLYCLRKFTKRCAHRLEVARAHLAAQAGNDASITGDYGFQNPMEPAIISQHTKRALYDQTVLLAKCYLRQGXWLIALNKDDWQYTQVQDILLSYSQATKYNPRWYKGTGMAWALANFEIVQTLTAGNEGHLSRTDQSMVIDHVVPAVKGFFKSIALSQGSSLQDTLRLLTLWFTHGGSSDVNVAVTEGFANVSVDTWLEVIPQLIARINQPNKRVQQSVHNLLADVGRAHPQALVYPLTVAMKSWQNTRRSRSAAQIMDSMRQHSANLVAQADTVSHELIRVAVLWHELWHEGLEEASRLYFGDSNIEGMFATLAPLHELLERGPETLREISFAQAFGRDLKEAQDWCRQYETSQDVNDLNQAWDLYYQVFRRISRQLPQVTTLELTYCSPKLLNAKNLDLAVPGTYKSGQPIVRIMSFDTTFSVINSKQRPRKLNVNGSDGKSYAFLLKGHEDIRQDERVMQLFGLCNTLLSHDSECFKRHLNIQRYPAIPLSQNSGLLGWVPNSDTLHVLIREYRESRKILLNIEHRIMLQMAPDYDNLTLMQKVEVFGYALDNTTGQDLYRVLWLKSKSSEAWLERRTNYTRSLGVMSMVGYILGLGDRHPSNLMLDRVTGKIIHIDFGDCFEVAMKREKYPERVPFRLTRMLTYAMEVSNIEGSFRITFENVMRVLRDNKESVMAVLEAFIHDPLLTWRLTSAASPTGPNFNSDHDTAMPVPGGVRARRQSILDSDVAPSELLNAPEPSIQTRARARTNSSAGEALTNGGAPEVESQNARAVEVLDRVQQKLTGRDFKTNEELDVIAQVNKLIMEATKLENLCQHYIGWCSFW

SEQ ID NO: 149835 - DNA, 7302 bp, Podospora anserina
  CDS (1)..(7302)
atgtccgccgtcaaagatcagacagctacctcgctggaccagcacatcaaggagatcaggaatcgaaactatgatgaaaaccaaaggaaacgggccgcgcgccaaatcagagacctggtcaatgctgccaagcaggagatgggtgccgaacagttccagcgcttcttcgataatgtcaatcagcgtacgaatctattgatacaaggtcccgatacgtatgaccgtcttggtggaatttacatcctggatgcgttggtcgattttgacggcatagaaccagccttgaagtacacccgcttccagaactacattggcagcatcctgcgtggccgcgatatcaactctatgcagccggccgctgtcgtccttggaaaactatgcaagccaggcggttccttgatttccgaactggtcgattccgaagttcaaacagcgcttgagtggctacagtctgaccgaatcgaggaacggcggtactcggcagtcttggtgcttcgcgagctggccagaaacacgcctacgttgatgtataactatgtgggctacgtctttgaacagatttggattggccttcgtgactcccgtctcttgattcgcgagactgccagcgagaccgttagcgcctgtttcaaaatcattcgtgagcgagaccaggagctgaagaaggactggatggacaagatgctcaacgaggcgatcaaggggctcaagatcaacacggttgagtttatccatgcctcgcttcttgtgctcaaggagctgcttgaacagggtggcatgtacatgcaggctcactaccaagaggcctgtgagattgtcttccgccacaaagacgcgcgcgatcccgccatccgcaagacggttgtgcttttgatcccggacctggccaactatgcaccgacagagttctcggcgagctatttgcacatgtttatggtgtatcttgggggcatgctgaagaaggacaaggaccgcaacgacgcctttcttgccattggcaacatcgccaattcggtcaagagcgcaatcacaccctatttagacggcgttctcatccatattcgcgagggtctcagtgtacagtcccggaaacgaagctcggtcgatcctgtttttgactgcatcagtcgattggccgtcgccgtgggtcagacaatgagcaagtatatggaggcgcttcttgatcccatcttcgcctgcgagctcacgccaaaactgacacaggcccttgtcgatatggcgttctacatccccccagtcaaagccaccattcaagagcgcctgttggacatgctgagcaaagttctctgcggcgaacccttcagacctctgggtgcaccccatccaaactcgctcgcttccatacctcatattcccaaagacccaaaggacccccttgctcaccagcggacaaaggatgaagtcaagttggccctcaacacgctcggcagctttgattttcaaggccatgtcttgaacgaattcgtccgcgacgtcgctatcaaatacgtcgaagatgatgacccagaaacacgtgaggctgctgccctcacctgctgccagctctatgtgcgtgacccaatcgtcaaccagacaagctatcatgccctccaagtggtcgccgatgtcatcgagagactcctgactgtgggtgtttcggatcccgaacccaaaatacggcagacgttgctagcagcccttgacgagcgatttgaccagcatctcgccaaggctgagaatatacgcaccttgttcttcgcgctccacgatgaacagtttgccgtcagggaggtggccgtgtccatcataggccggttggctcgccacaatcccgcctatgttatcccccagctgcgaaaaaccatcattcagatgttgacagagcttgaatacacagatgtggctcggagcaaggaggaaagctcgagattactcagtcttctcacacggcacgctcaggagctggtcaaaccatacgtcaactccatcacccaagtgttgctgccaaaagctcgcgacccgatcccgtccgttgctgcgactgtcctccaagcactcggggaactgtgcaccgttggtggagaagagatgctaaactacaagaaggatctcatgcccatcatcattgacgcattgcaggatcaaagcgcaccagttaaacgggaggcagccctgcataccctcggtcagctggccagtaacacaggctatgtcatcaaaccctacctcgagtatccccaacttcttgagatcctgcagtccatcatccggggcgagcctcagcgcgggcttttacgacaggaaaccatcaaggtgatgggcatcctgggagcactcgatccctacaaatatcagcaggtcgaagatcgcgcgccgcgcacacagaagcaaaccgaagcaacccaactcactgatgtgtccctcatgatgggcggactaaccccttcacaggaggactactacccaaccgttgttattaatgcccttctccagatcctcaaagaccagtcgttggtgcagtggcacggaaacgtggtggatgccatcatgagcatcttcatcacgcttgggctcaagtgtgtccagttcctcgaccgtgtggtgcctgcctttatcgccgtgatccgcgcctcgagccaaacgcgactcgacttctatttcaaccaccttagtaggcttgttggaattgtccgtcagcatatcagggtctacctcccggacatcatcgaggttctccaggagtattgggacacgacatattcgctccagaccaccatcatgtcgttgatcgagtccattgcacgctccctagagggcgagttcaaggtctaccttgccagtctcctcccgatgatgctcggcttgctggaaaaggacaccaccaccaagcggcaaccgaccgaaaagatctttcatgctttcctagtgttcggctcaagcgccgaggagtatatgcacctcatcatccccgtgttggtacgtctcttcgacaactcggcccaacccatgtttctgcgcaagtctgccattgaaacgattggcaagctctcgagcatggtgaatctcaacgactatgcgtccaaaatcatccaccccctcacccgggtccttgccagccacgaaccaagtctaagagtggctgccctcgacacgctatgtgccctcatgttgcagctggggcgtgattatttgcactttgaacacaccgtccacaaaaccatctcaacatacggcctccaacactccaactatgacaaggccgtcgaaaagctcaagaaaggggaaacattaccgcctaacctcgcgccgcgcttcgaggacaatgcagtcgagcttcatgcctctgaaaacagcccgcccaagaagttggatctcaaccccatgcatttacggcaagcctgggaaaccaagggtaagtctactaaagacgactggcacgagtggttccgcaagtttagcacgacgttactttctgagtccccgaatcactcactccgagcttgcgccagtttggcaagcacttatcagccactggcaagggagctcttcaactctgccttcgtctcatgctggagcgagctgtacgaacaatttcaggaggaactgatcaccaacatcgaaaacacaatcaaatccgagaatgtgcctcctgatcttctgggccttttgctgaaccttgccgagttcatggaacatgatgacaaggccctaccaatcgacattcgaaccttgggacgtgaggcggcaagatgtcacgcctatgccaaagcgctgcattacaaagaactcgagtttcttcaggaccacaacagtcacgcggtcgaagccctgattgtgattaacaatcagttgcagcagtccgatgccgccattggtatcttgactaaggtgaaggcgtacaaggacgggatcacgctgcgggaaagctggttcgagaagctggaacgctgggatgaggcgcttaacttttactgccaacgcgaacgcgagcttccgcctgaccagcccacaccggtcgacattgtcatgggcaagatgcgttgctaccatgcgctgggtgagtgggattcgctagcctcgctggctggcaagacatggtcaaactcggcaccagaggttcaacgcatgatcgcaggccttgccaccacggctgcctgggggctcgggaaatgggactctatggataactacctgcagtctatgaaacgattctcaccagatcgcgccttcttcggcgccatcttagccctccaccgcaatcagttccgagaagccctgggctgcatcgaccaagctcgagaaggtctcgatacagagctgagcgccctcgtgagcgaatcctacaacagggcataccaagttgttgtgcgcgttcagatgcttgcagagttggaagaattgatcatctacaagcagtgcgatgctgaaaagcaagccagtttgcgggcaacatgggagactcgtctcaaggggtgccagcgaaacgttgaggtatggcagcgcatgctgcgactccggtcgctcgtgctcacgccaccagagaacatgcacatgtggactaagttcgccaacttgtgccgcaagtctggacggatgggtttggcggagaagtcactgagacagcttatcgggtcggatgtgccgctggacacagtgatccctcactggcacgaccgccccatggaccccgatgccgagagacttgcgtctccggttctgtatgcagtactcaagtaccagtgggaggtcggtttgcagccggcgatgcgaaacactgaccgaaccatcgccgagagaacgctgtactgccttcgcaagttcactgacgagacggcccacagggtagagagcgcaagacaccaaatagccgcttccacccaggccggtaacggtgcaattgacggcttacatcaggcctctaccttttccgagttcgacgaggcggcattactcagcccggatgtgcagcgtcactggacagaacaaacggtgctgcttgccaagtgctacctccgccagggcgattggatgattgccctgaacaaggacgattggcaatacacacggcgcaaagacatcctctcctgctactacaaggccacctattatcatcgccactggtacaaggcctggcatgcctgggccttggccaacttcgaagtggtgcaggcccttggatctcgcaaggacctagacagcggcgtcatcatccagtatgccgtgcctgctgtgcatggttttttcgagtctatttcgctctcttcgggaagctctctgcaagacacgctgcgtttgctcacactctggcttacatatggtggcaaccccgatgtcgccagtactgtgacagagggcttcagtcgtgtcagcgttgatacctggcttgaggtcattccacagttgatcgctcgcattacccaacctaacaagaaggttcaggcgtcgatccatgctctgttgtctgatgtcggtcgtgcgcacccccaggcgttagtctaccccttgacggttgccatgaagtcgcgacaaagcacgcgcaggtccaagaccgccagcctcattatggagacaatccgtcagcacagtaataagctggtcgagcaggcagagacggtgagccgcgagcttattaggaccgcggtcctctggcacgagctatggcatgagggtctggaggaggcttcccggctctactttggcgatcacaatatcaagggaatgtttgatgccctcgagccccttcacgacctgctcgaaaagggccctcaaaccctccgggaggtttcatttacacagacgttcggccgtgatctgggtgaggctcgcgagtggtgccggcaatatcgcgaaacagaggacgtcaatgacctgaaccaagcctgggacttgtactaccaggttttccgtcgtatcagccgacagcttccacagatgaccacactggagctgacctactgctctccggacctgctccaggccagggacctggagctcgcggtgccgggaacgtatcgcagtggccaagaggttgtccgaatcatgtcttttgacggcacctttacggtcatcagcagcaagcaacgtccgcgaaaacttgacattgttggaagtgacggtaagacgtacactttcttgctcaaaggtcatgaggacatcaggcaggatgagcgtgtcatgcagctcttcggcctctgcaacacgctcttggccaacgactcggaatgctacaagcgccatctcaacatccaacgttacccggctattccgctgtcgcagaattcgggtcttctcggctgggtcccagacagcgacacgatccaccagcttatccgtgattatcgggagtcaagaaagattctccttaacatcgagcatcggatcatgcttcagatggcgcccgactacgataacctcacactcatgcagaaggtggaagtgtttgggtatgcccttgataacacaacgggtcaggatctgtaccgggtcttatggctgaagagcaagagctccgaagcctggttagacaggcgaactaattacacgcgttccctcggcgtcatgtcgatggtcgggtacatcctgggcttgggcgaccgtcatccgagcaacctgatgctggaccgcatcacgggcaagatcattcacattgactttggcgactgctttgaggtggcgatgaagcgtgagaagtacccggagcgggtgccttttaggcttacccgcatgcttacttatgccatggaggttagcaacatcgagggcagcttccggattacatgcgaacacgtgatgagagtcttgcgtgacaataaggagagcgttatggccgttctcgaggctttcattcacgacccgctactcacgtggcgtcttaccaacccggccagtcccgctggaccacatttcaattcggagagagagcaagctattgccgggccccaggcagcacgggtgcgtcggccttccatactggaggctccgatggccccgactgagttcctggcagctcaagctggtcccgaaggcttgaccggggcgcgtagccgtgcgcgtacaaactcatccgccgcgccgctcccaagcataaccaatgacggtgtccatggccccatcgagattgcggaggtgcaaaatgcgcgggctgtcgaagtgcttgaccgggtctcccagaaactcacgggtcgtgatttcaagccgaacgaagagcttcttgttaaagatcaggttaataagctgatcattgaggctaccaagcttgagaatctctgccagcactatatagggtggtgcagcttttggtga

SEQ ID NO: 149836 - protein, 2433 aa, Podospora anserina
MSAVKDQTATSLDQHIKEIRNRNYDENQRKRAARQIRDLVNAAKQEMGAEQFQRFFDNVNQRTNLLIQGPDTYDRLGGIYILDALVDFDGIEPALKYTRFQNYIGSILRGRDINSMQPAAVVLGKLCKPGGSLISELVDSEVQTALEWLQSDRIEERRYSAVLVLRELARNTPTLMYNYVGYVFEQIWIGLRDSRLLIRETASETVSACFKIIRERDQELKKDWMDKMLNEAIKGLKINTVEFIHASLLVLKELLEQGGMYMQAHYQEACEIVFRHKDARDPAIRKTVVLLIPDLANYAPTEFSASYLHMFMVYLGGMLKKDKDRNDAFLAIGNIANSVKSAITPYLDGVLIHIREGLSVQSRKRSSVDPVFDCISRLAVAVGQTMSKYMEALLDPIFACELTPKLTQALVDMAFYIPPVKATIQERLLDMLSKVLCGEPFRPLGAPHPNSLASIPHIPKDPKDPLAHQRTKDEVKLALNTLGSFDFQGHVLNEFVRDVAIKYVEDDDPETREAAALTCCQLYVRDPIVNQTSYHALQVVADVIERLLTVGVSDPEPKIRQTLLAALDERFDQHLAKAENIRTLFFALHDEQFAVREVAVSIIGRLARHNPAYVIPQLRKTIIQMLTELEYTDVARSKEESSRLLSLLTRHAQELVKPYVNSITQVLLPKARDPIPSVAATVLQALGELCTVGGEEMLNYKKDLMPIIIDALQDQSAPVKREAALHTLGQLASNTGYVIKPYLEYPQLLEILQSIIRGEPQRGLLRQETIKVMGILGALDPYKYQQVEDRAPRTQKQTEATQLTDVSLMMGGLTPSQEDYYPTVVINALLQILKDQSLVQWHGNVVDAIMSIFITLGLKCVQFLDRVVPAFIAVIRASSQTRLDFYFNHLSRLVGIVRQHIRVYLPDIIEVLQEYWDTTYSLQTTIMSLIESIARSLEGEFKVYLASLLPMMLGLLEKDTTTKRQPTEKIFHAFLVFGSSAEEYMHLIIPVLVRLFDNSAQPMFLRKSAIETIGKLSSMVNLNDYASKIIHPLTRVLASHEPSLRVAALDTLCALMLQLGRDYLHFEHTVHKTISTYGLQHSNYDKAVEKLKKGETLPPNLAPRFEDNAVELHASENSPPKKLDLNPMHLRQAWETKGKSTKDDWHEWFRKFSTTLLSESPNHSLRACASLASTYQPLARELFNSAFVSCWSELYEQFQEELITNIENTIKSENVPPDLLGLLLNLAEFMEHDDKALPIDIRTLGREAARCHAYAKALHYKELEFLQDHNSHAVEALIVINNQLQQSDAAIGILTKVKAYKDGITLRESWFEKLERWDEALNFYCQRERELPPDQPTPVDIVMGKMRCYHALGEWDSLASLAGKTWSNSAPEVQRMIAGLATTAAWGLGKWDSMDNYLQSMKRFSPDRAFFGAILALHRNQFREALGCIDQAREGLDTELSALVSESYNRAYQVVVRVQMLAELEELIIYKQCDAEKQASLRATWETRLKGCQRNVEVWQRMLRLRSLVLTPPENMHMWTKFANLCRKSGRMGLAEKSLRQLIGSDVPLDTVIPHWHDRPMDPDAERLASPVLYAVLKYQWEVGLQPAMRNTDRTIAERTLYCLRKFTDETAHRVESARHQIAASTQAGNGAIDGLHQASTFSEFDEAALLSPDVQRHWTEQTVLLAKCYLRQGDWMIALNKDDWQYTRRKDILSCYYKATYYHRHWYKAWHAWALANFEVVQALGSRKDLDSGVIIQYAVPAVHGFFESISLSSGSSLQDTLRLLTLWLTYGGNPDVASTVTEGFSRVSVDTWLEVIPQLIARITQPNKKVQASIHALLSDVGRAHPQALVYPLTVAMKSRQSTRRSKTASLIMETIRQHSNKLVEQAETVSRELIRTAVLWHELWHEGLEEASRLYFGDHNIKGMFDALEPLHDLLEKGPQTLREVSFTQTFGRDLGEAREWCRQYRETEDVNDLNQAWDLYYQVFRRISRQLPQMTTLELTYCSPDLLQARDLELAVPGTYRSGQEVVRIMSFDGTFTVISSKQRPRKLDIVGSDGKTYTFLLKGHEDIRQDERVMQLFGLCNTLLANDSECYKRHLNIQRYPAIPLSQNSGLLGWVPDSDTIHQLIRDYRESRKILLNIEHRIMLQMAPDYDNLTLMQKVEVFGYALDNTTGQDLYRVLWLKSKSSEAWLDRRTNYTRSLGVMSMVGYILGLGDRHPSNLMLDRITGKIIHIDFGDCFEVAMKREKYPERVPFRLTRMLTYAMEVSNIEGSFRITCEHVMRVLRDNKESVMAVLEAFIHDPLLTWRLTNPASPAGPHFNSEREQAIAGPQAARVRRPSILEAPMAPTEFLAAQAGPEGLTGARSRARTNSSAAPLPSITNDGVHGPIEIAEVQNARAVEVLDRVSQKLTGRDFKPNEELLVKDQVNKLIIEATKLENLCQHYIGWCSFW

SEQ ID NO: 149837 - DNA, 7389 bp, Aspergillus oryzae
  CDS (1)..(7389)
atgcctctctctttaccttcgaaggtcaattatgcgactagtattgttcctaggcatcagagccctttcgagtcgtatgtggacaacacagatactagcaaaggcctcgaagagaccggtgccaaacaatttaggcactccgggccttggctggctggacagacggaagccgaattcagtgcctacctgaagaaagtgcggagcaataagccagagcttttgcaaaaactccgccaactcttctccgaaaagcgaactgctgaacggagaaagcaagctcaagataacggagaggatttggaggcgcttgagcctgtaaaggttacggaagaggagttccagacctacctcaagtccttacattggcctccggagaaatttcttgaattttacaatgccgtcagccagcgcattgcacaacttgttgtcacaggcagcgacgcacatgaacgaatcggtggcctactagcgctggatcgcctgatagatttcgatggagtagatgctgcccagaagactacccgatttgccagttatctgcgaagcgctctgcgcagcaacgataatggagtgttggaatacgctgccaaagctctgggccgtttggctaaaccgggcggagctcttactgcggagcttgttgagagtgaaatacaatcggctttagagtggcttcagtctgaaagacaagagagtcgacgcgttgctgccgtacttgttatccgcgaacttgccaaagggtcgccaacacttttgtacggctttgtcccccaaatcttcgagctcatctgggttgcactcagggatccgaaagttgttatccgagaaacagcctccgaggcagtcagggaatgcttcgagattatcgctgcaagagactctcaggttcgaaagtcgtggttcgcgcggatttatgaagaagcactccagggcttgaagtccaacaatgtagattggattcacgggtcactactagtcctcaaagagctccttctcaagggtgcaatgtttatgaatgaacattacaggaatgcttgtgagattgttcttcgtctcaaagatcatcgtgaccaaaagattcgcgcacaggtcgttttgacaatccctatccttgcttgctatgccccagttgacttcacagagacgtatcttcatagatttatggtctaccttcaagcacagctgaagagggacaaggagcgcaatgaggcattcattgctataggaaagattgcgaacgctgtcggcgtggccattgcgcaataccttgatgggatcatcgtttatatcagagaaggcctggccatgaaagcaagaaatcgcgccggtgttaatgaagcgccaatgttcgagtgcatcagcatgttgtcattagctgtaggaccggcgcttaacaactacatggaatcgttgctagatccaatctttgcgtgcgggctaagcgaatcattaactcaggcgctttttgatatggcacattttatcccacaaatcaagcctactatccaagaaaagcttttggatatgttgagtctgattcttaaaggagccccgttccggcctttgggttgcccagagagcagattgccccctattccatcatttgcgaaagacttcgccccccaagagttgcattcagatgcagagatagcactagcacttcacactctgggaagcttcgatttctctggtcacattcttaacgagtttgttcgcgatgtcgccatcaactatgttgagaatgacaactctgaaattcggaaagcttcagcacttacatgctgtcagctatttgtccacgatccaattatcaatcagactagtagtcactcaatacaggttgttagtgaagtcattgacaagcttctgacggttggtgtcggcgatcctgattcagagatccggcgcacagttttgtggtcattggatcgcaaattcgaccgccatcttgcacggccagagaatattcgttgtttgttccttgcggttaatgatgaagtattttctgtcagagaagctgccatctgcatcattgggcgcctctcaagtgtgaatccggcctacgtattcccgcctcttcgaaaactactggtcaatcttctgacggggcttggatttgccagcacggctcgccaaaaagaagagagtgctcagcttatcagcttgtttgtctcaaatgcgacaaaactcatcaggtcatatgtcgatcctatggtgaccaccttgctcccaaaagccactgacactaaccccggtgtcgcttcgaccactttaaaagctatcggtgaacttgcaaatgtcgggggaggcgagatgaagttgtacctgccacagctgatgcctgtcatattggattcgttgcaggacctctcttcccatgccaagcgggaggcagccttgcgtacgctgggtcagctagccagcaactctggatacgttattgacccgtatcttgagtaccctcatctccttgctgtgcttatcaatataatcaagacggaacaaacggggtctctgcggaaggagacaatcaaattgctaggtattcttggcgctttggatccgtacaagtaccagcaaataagtgaaactgcaccagatattcaccatatcaatgaagtccaaactgtctccgacgtcgctttgattatgcaagggctcactccttccaatgaagagtactacccgacagtggtcatcaacaccttgatgcagaatatacttcgcgaaaactccctcgcccaataccattcagcggttattgatgctatcgtcactatcttcaaaactttgggattgaagtgcgtgccatttttgggacaaataatccctggctttatagccgtaataagaggatcgccccctagccgtttggagtcgtactttaaccagatggcgatattggtcaatattgtgaggcagcacattcgggccttccttccggagattattgaagttgttcgcgatttctgggatgcatcatatcaagttcaagccacgatattattgcttgtggaggccattgccaagtctttagaaggtgaattcaagaaatacatggcgggcctcattcccatgatgttggataccctcgagaaggacaacacaccacgtcgacagccttcagaaaggatacttcacactttcctcatctttggcaccagtggggaggagtatatgcatttaattgttccctctattgtgcgccttttcgacagaactcaaaacccacagagcattcggaagaccgccatcgatagtctgacgaaactatcacggcaagtcaatgtatctgactttgcgtctttgatggtccattccttgtcccgtgttgttgcgggcaacgatcgaatgttgcgacaggccgctatggactgtatttgtgctctcattttccagttgggccaggatttcagtcactacatccatcttctgaacaaggttttgaaacgtcaccagatcactcatgtcaattatcatattctggtgacgaaattacagaaaggagactcacttccgcaggatcttaaccctgatgagaattatgcagccctggcggatgatactaactttgccgagatcggccagaagaagatggttgtcaaccagcagcacttgaagaatgcctgggatgcctctcaaaagtcgacacgtgaggactggcaggagtggatacgacgattcagtgtggaacttttgaaggagtctccttctccagccctgcgtgcatgcgccagtctagctggcatttaccagccattggccaaagatctgttcaatgctgccttcgtatcctgctggactgagttgtatgaccaataccaggaagagcttgttcggtcgatcgaaaaggcgctcacgtcacctaatatccctcctgaaatcttgcaggttttgctcaacctcgctgagtttatggagcacgacgacaaagctctccccatcgacatccgcacacttggcaaatacgctgccaagtgtcacgcatttgctaaagctctccactataaagaacttgagttcgaacaggatcaaaattcgggtgcagttgaggctctgattaccatcaacaaccagcttcaacaatctgatgctgccattggtattcttcggaaagcccaagcttatcgggatgtggaacttaaggaaacctggttcgaaaagcttcagcgctgggaggaggcccttgctgcctacaagagacgtgagaagatagacccggattcctttggcgtcacaatgggcaaaatgcgctgtctgcacgcccttggtgagtggaaaatattatctgatctcgcccaagagaagtggaatcaggcctcattagaacatcggagagccattgctcctctcgctgctgcggctgcatggggtcgtggtcaatgggaattgatggattcctacctgggtgttatgaaagaacagtcacccgacaggtcattctttggtgccattcttgccattcatcggaaccagttcgaggaggcaacgatgtatatcgagaaagcgcggaatggacttgacaccgaactttcagccttgcttggtgaatcatataaccgtgcttacaatgtcgtcgtccgcgttcagatgctcgctgaactcgaggaaatcattacttacaagcagaacatcggtgatccagagaagcaggattctatgcgccaaacatggaacaaacggttacttggctgccaacaaaatgttgaagtatggcagcgtatgctcaaggttagagcacttgtcacctcccctcgagaaaaccttgacatgtggattaaattcgccaatctttgtcgcaaatccaatcgaatgggacttgctgagcggtctctggcatctctggaaaccgttgtttctgacaacaatggtacccgggctgtagctcctccagaggtcacatatgctcgcctaaagttcagctgggctactgggcggcagcgtgaagctcttcagatgcttaaggagttcactacaagtctcaccgaagacttcacgagattcaatgctctcatgatctctcagtcagagcataatggcattaatggcgttaacggcatccaagatacaaaccatggagatataatgggtctacgagagcgtattggggatgtggccaagttcagaaggctccttgctaagagctaccttagacagggggagtggcagacttctctacaaaaaggagattggaaaccggagcacgtccgagaggtcctcaacgcatactctgccgctacgaaatacaaccgtgattcttacaaagcttggcattcgtgggcattggccaactttgaagtcgttacaacaatcgcaagccaagctagcaaagatggcgcgacattggccatggttcctgggcacattgtaacagagcatgtgataccagctattcgtggtttcctcaggtccatatccttgtcgtcaacctcatctttgcaagataccctgaggttacttaccctctggtttactcacggtggcgatcaggaagtaaatgccgttgttacagaaggtttcacggcggtgaatatcgacacctggctcgcggtaacaccgcaactcatagcacgaattaatcaaccgaatattcgggtccgaagcgctgtccatcgactacttgctgaggtcggtaaggttcatcctcaggcgctggtgtatccattgactgttgcgatgaaatcaaacgttgcccgacggtcgcagtctgcaagtagcatcatggacagtatgcggcaacatagtgcaaaactggtcgaacaagctgatcttgtaagtcatgaattgattcgggttgccgttctatggcacgagctctggcacgaaggattggaagaagcttcccgcctctatttcggtgaccacaatgtcgaaggaatgtttgcaactctagcaccactccatgaaatgcttgataagggggccgaaacgttacgcgaagtatccttcgcacaggcgtttggtcgtgaccttgcagaggcaaagcattactgcatgctataccgtgagaccgaagagattggtgacctgaaccaagcttgggatctctactacaccgtgttccggaagataagcagacagcttccgcaattgtctacacttgacttgaaatatgtctctcctaaacttaaagactgtgtcgaccttgatcttgctgttccgggcacctaccagagtggccgaccgatcatccgtatcatgagcttcgatcctatacttcatgtccttcaaaccaagaaacgaccacgcagaatgaccctgaaaggtagcgatggtaattcatacatgtacgcacttaagggacatgaagatattagacaagatgagcgagtcatgcagctctttggcctcgtgaatacgctccttgacaatgacagtgagagctttaaacgccatctttcagtgcaacgattcccagccattccattgtctcagagctctggtatcctaggctgggtctcgaacagtgacactctacacgcattgatcaaagaataccgtgagagccgccgaattctcctgaacattgaacaccgcatcatgttgcagatggcgccagattatgacaaccttactctcatgcagaaagtggaagtctttggatatgctatggataacaccacaggaaaagatctgtaccgggtcttgtggctcaagagtaaaagctcagaagcgtggctggagcgacgaacaaactacactcggtcccttggtgttatgtcaatggtgggttacattcttggtctgggtgatcgtcatccgtccaatcttcttttggaccgaattactggaagagtggttcacattgattttggtgactgcttcgaagttgcaatgcatcgggagaaatatcccgaaagagttccgttccggttgactcgtatgttgacctttgccatggaagtcagcaacattgaaggaagctaccggatcacgtgtgaggctgtcatgcgtgtcttgagagagaacaaagactctctgatggctgttctggaagcttttattcatgatcctttgatcaactggcgcctaggaatccgtgagtcgccagacaggatgccattctcatcagagcgccggcaatcgattattggtaatatcaactctgaacagggtgtccaacccagcaacttctcccgtcaccgacggccatctattcttgaaggtggcattcttgatgctcaggaaggcatacctaatgaagcccgtgaagcacagaacgcacgcgccctacaagtgctggcgagggtcaaggagaagctaacgggccgagatttcaagcccagtgaggagctcaatgtcagtgatcaggttgacaaactccttgcgcaggcaactagcgttgaaaatatttgtcagcactggattggatggtgcagtttctggtga

SEQ ID NO: 149838 - protein, 2462 aa, Aspergillus oryzae
MPLSLPSKVNYATSIVPRHQSPFESYVDNTDTSKGLEETGAKQFRHSGPWLAGQTEAEFSAYLKKVRSNKPELLQKLRQLFSEKRTAERRKQAQDNGEDLEALEPVKVTEEEFQTYLKSLHWPPEKFLEFYNAVSQRIAQLVVTGSDAHERIGGLLALDRLIDFDGVDAAQKTTRFASYLRSALRSNDNGVLEYAAKALGRLAKPGGALTAELVESEIQSALEWLQSERQESRRVAAVLVIRELAKGSPTLLYGFVPQIFELIWVALRDPKVVIRETASEAVRECFEIIAARDSQVRKSWFARIYEEALQGLKSNNVDWIHGSLLVLKELLLKGAMFMNEHYRNACEIVLRLKDHRDQKIRAQVVLTIPILACYAPVDFTETYLHRFMVYLQAQLKRDKERNEAFIAIGKIANAVGVAIAQYLDGIIVYIREGLAMKARNRAGVNEAPMFECISMLSLAVGPALNNYMESLLDPIFACGLSESLTQALFDMAHFIPQIKPTIQEKLLDMLSLILKGAPFRPLGCPESRLPPIPSFAKDFAPQELHSDAEIALALHTLGSFDFSGHILNEFVRDVAINYVENDNSEIRKASALTCCQLFVHDPIINQTSSHSIQVVSEVIDKLLTVGVGDPDSEIRRTVLWSLDRKFDRHLARPENIRCLFLAVNDEVFSVREAAICIIGRLSSVNPAYVFPPLRKLLVNLLTGLGFASTARQKEESAQLISLFVSNATKLIRSYVDPMVTTLLPKATDTNPGVASTTLKAIGELANVGGGEMKLYLPQLMPVILDSLQDLSSHAKREAALRTLGQLASNSGYVIDPYLEYPHLLAVLINIIKTEQTGSLRKETIKLLGILGALDPYKYQQISETAPDIHHINEVQTVSDVALIMQGLTPSNEEYYPTVVINTLMQNILRENSLAQYHSAVIDAIVTIFKTLGLKCVPFLGQIIPGFIAVIRGSPPSRLESYFNQMAILVNIVRQHIRAFLPEIIEVVRDFWDASYQVQATILLLVEAIAKSLEGEFKKYMAGLIPMMLDTLEKDNTPRRQPSERILHTFLIFGTSGEEYMHLIVPSIVRLFDRTQNPQSIRKTAIDSLTKLSRQVNVSDFASLMVHSLSRVVAGNDRMLRQAAMDCICALIFQLGQDFSHYIHLLNKVLKRHQITHVNYHILVTKLQKGDSLPQDLNPDENYAALADDTNFAEIGQKKMVVNQQHLKNAWDASQKSTREDWQEWIRRFSVELLKESPSPALRACASLAGIYQPLAKDLFNAAFVSCWTELYDQYQEELVRSIEKALTSPNIPPEILQVLLNLAEFMEHDDKALPIDIRTLGKYAAKCHAFAKALHYKELEFEQDQNSGAVEALITINNQLQQSDAAIGILRKAQAYRDVELKETWFEKLQRWEEALAAYKRREKIDPDSFGVTMGKMRCLHALGEWKILSDLAQEKWNQASLEHRRAIAPLAAAAAWGRGQWELMDSYLGVMKEQSPDRSFFGAILAIHRNQFEEATMYIEKARNGLDTELSALLGESYNRAYNVVVRVQMLAELEEIITYKQNIGDPEKQDSMRQTWNKRLLGCQQNVEVWQRMLKVRALVTSPRENLDMWIKFANLCRKSNRMGLAERSLASLETVVSDNNGTRAVAPPEVTYARLKFSWATGRQREALQMLKEFTTSLTEDFTRFNALMISQSEHNGINGVNGIQDTNHGDIMGLRERIGDVAKFRRLLAKSYLRQGEWQTSLQKGDWKPEHVREVLNAYSAATKYNRDSYKAWHSWALANFEVVTTIASQASKDGATLAMVPGHIVTEHVIPAIRGFLRSISLSSTSSLQDTLRLLTLWFTHGGDQEVNAVVTEGFTAVNIDTWLAVTPQLIARINQPNIRVRSAVHRLLAEVGKVHPQALVYPLTVAMKSNVARRSQSASSIMDSMRQHSAKLVEQADLVSHELIRVAVLWHELWHEGLEEASRLYFGDHNVEGMFATLAPLHEMLDKGAETLREVSFAQAFGRDLAEAKHYCMLYRETEEIGDLNQAWDLYYTVFRKISRQLPQLSTLDLKYVSPKLKDCVDLDLAVPGTYQSGRPIIRIMSFDPILHVLQTKKRPRRMTLKGSDGNSYMYALKGHEDIRQDERVMQLFGLVNTLLDNDSESFKRHLSVQRFPAIPLSQSSGILGWVSNSDTLHALIKEYRESRRILLNIEHRIMLQMAPDYDNLTLMQKVEVFGYAMDNTTGKDLYRVLWLKSKSSEAWLERRTNYTRSLGVMSMVGYILGLGDRHPSNLLLDRITGRVVHIDFGDCFEVAMHREKYPERVPFRLTRMLTFAMEVSNIEGSYRITCEAVMRVLRENKDSLMAVLEAFIHDPLINWRLGIRESPDRMPFSSERRQSIIGNINSEQGVQPSNFSRHRRPSILEGGILDAQEGIPNEAREAQNARALQVLARVKEKLTGRDFKPSEELNVSDQVDKLLAQATSVENICQHWIGWCSFW

SEQ ID NO: 149839 - DNA, 7572 bp, Chlamydomonas reinhardtii
  CDS (1)..(7572)
atgatgctgtcgggagtgggtccggtgcccaccaaaccggctttcaaggccggtggcgacacgctctcgcggcacctggaggagctgtgccgttctggcgcatgggagcggcgccacaaggatggtgacaaagcattattggagtacatcgaggcggaggctcgggacctgtcggtggaggcttttgggcggctaatgaccgacgtgtatcagcgcatcggcaacatgctgctcaaagggaacgacatcacgcggcgcatgggtggcgtgctggcgattgacgagcttatcgatgtcaagctctctggagacgacgctgccaagacggcgcggctgtcggggctgctgtcgcgggtgctggaggagagcgaggacccggtgctcagcgagtcggcctcgcacacgctgggacacctggtgcgcagcggcggcgccatgacgtcggacatcgtggagaaggagatccgccgctcgcttgcctggtgcgacccccgcaatgagcccaatgagtcgcggcggctgactgcgctgctggtgctgacggaggcggcggagtccgcgcccgccgtgttcaacgtgcacgtcaagtcgttcattgacgcggtgtggttcccgctgcgcgacgccaagcagcatatccgcgaggcggcggtgcgggcgctcaaggcttgcctgtgcctggtggagaagcgcgagacgcgctaccgcgtgcagtggtactacaagctgcacgagcagaccatgcgcggcatgaagcgcgaccaccgcaccggcgcgcttccctcgcccgagtccatccacggctcgctgctggcgctggcggagctgctacagcacaccggcgaattcatgctggcgcgctacaaggaggttgtggagaacgtgttccgctacaaggacagcaaggagaaaaacatccgccgggcggtcatccacctgctgccgcgcatggcggccttctcgccggagcgctttgcgtcggagtacctggctcgcgccattgccttcctgctgatcgtgctgaagaacccgcccgagcgcggcgcggcgttcgcggcgctggcggacatggcggcggccctggcgcggggctgcctgtcgcccatctacgtcgccatccgggaggcgctgtcggcgccgcccgccgcgcgcgccgccgcccggccgcggcccgccacctgctacgaggccctgcagtgcgtgggcatgctggcggtggcgctgggcccgctgtggcggccctacgcggcggcgctggtggaggccatggtgctcacaggcgtgagcgaggtgctggtgcaggcgctgacgcaggtcgccaacgcgctgccggagcttctggaggacatccagtaccagctgctggacctgctgagcctggtgctcagcaagaggcccttcaacagcagcaccacgcagcccaagttcgcggccctgagtgcggccatcgcggcgggcgagctgcagggcaatgcactcaccaagctggcgctgcagacactgggcacgtttgacctgggcggcatccagcttctggagttcatgcgcgaccacatcctggcctacaccgacgaccccgacaaggagatccgccaggccgcggtgctggccgcatgcccgcgtgctggagcggcacgcagcagcctccgcgtccgcagcctccgcagcggctggcggcgcgccgccgcggctgtgtggcacacgcgcgtggtggagcgctgtgtgggccggctgctggtggtggcggtggcggaccccagtgagcgcgtgcgcaaggaggtgctgcgggcgctggtggccaccacggccctggacgactacctggcgcaggccgactgcctgcgcgcgctgttcgtgggcatgaacgacgagagcgtggcggtgcgcgggctggccatccggctggtggggcggctggcggagcgcaacccggcgcacgtgaacccggcgctgcgcaagcacctgctgcagctgctgcacgacatggagttcagccccgacaacagggccagggaggagtcggccttcctgctggaggtgctcatcaccgccgccgcccgcctcatcatgccctacgtctcgcccatccagaaggcgctggtgtccaagctgcgcggcggctcgggcccgggcataactgtgttgtccacgctgggcgcgctggctgaggtgagcggcaccacgttccgccccttcatcagcgaggtcatgccgctggtcatcgaggccattcaggacaactcggacgggcggcggcgtgtggtggccgtcaagactctgggcttcatcgtgagcagctgcggcaatgtgatgggcccctacctggagtacccacagctgctgtcggtgctgctgcgcatgctgcacgagggacaccccgcgcaacgccgggaggtcatcaaggtgctgggcatcatcggtgcgctggacccgcacacacacaagctcaaccaggccagcctgagcggggagggcaagctggagaaggagggggtgcggccgctgcggcacggcggcggcggcgcgggcggcgccggcggcggcgcaggcgggggaggcgtcggcggcggcgtggcgggcgacagcaatgacggcggcatgggccccggcgacgacggcggccccggcggcgacctgctgccctcctcgggcctggtgaccagcagcgaggactattaccccaccgtggccatcaacgcgctgatgcgggtgctgcgcgaccccgccctggcctcccagcacctggccgtcatccgggcgctggcagccatattccgcgcgctgcagctcagcgtagtgccctacctgcccaaggtcctgcccatcctgctgggcgtgctgcgcggcggcgacgaggcgctgcgtgaggagatcctggcctcgctgcgcgcgctggtgggctacgtgcggcagcacatgcgccgcttcctgcccgacctcacgcagctggtgcacgagttctggcccgccgcgccgcgcacctgcctggcgctcatagcggacctgggcatggcgctgagggacgacatacgtgccaaacccctccctcccctccctctcctgccgccctcctctcccccccgcacaccccacaacaggcagtacgtgcccgagctgctgcccaagttcgtggcggtgttcagcgaggccgagcgcgccggcagctgggacctggtgcggcccgccctgggcgccctggagagcctgggcagcgccgtggacgactcgctgcacctgctgctgccctccatggtgcggctgatcagccccgccgccagctccacgccagccgaggtgcggcgcgcggcgctgcgctcgctgcggcggctcatcccgcgcatgcagctgggcggctacgcctcggcggtgctgcacccgctcatcaaggtcctggacggccacagcgacgagcagctgcggcgtgatgcgctagacaccatctgcgccgtggccgtgtgcctggggcccgagttcgccatcttcgtgcccaccatccgcaaggtgcgtgtgcggcaccgcctgcaccacgagtggttcgaccggctggccggcaaggtgtgcgccgtgtcgccgccctgcatgtcagacgcggaggactgggagggcgccggaggcgccgcctccggcgccggctccgccggcgcagccggcggctgggccgtggagatcgacctgctcgcccgcatgcaggcggagggcggcggcgccctgggcggccagccgccggtgccgccgggtcccgacggcggcccctccgccaagctgccggtgaacgcggcggtgctgcggcgcgcctgggagagcagccaccgcgtgaccaaggaggactgggcggagtggatgcgcaacttcgcggtggagctgctcaaggagagcccctcgcccgcgctgcgcgcctgccacggcctggcgcaggtgcaccccagcatggcgcgcgagctgttcgcggcgggcttcgtgagctgctgggcggagctggagcaggggctgcaggagcagctcgtgcgcagcctggaggctgcgctggcctcccccaccatcccccccgagacggtgactgcgctgctgaacctggccgagttcatggagcacgacgacaagcgcctgcctctggacacacgcacgctgggggcgctggcggagaagtgccacgccttcgccaaggcgctgcactacaaggagctggagttccagaccagcccgcagtccgccatcgaggcgctcatccacatcaacaaccagctgcggcagccggaggcggcggtgggcgtgctggcgtacgcccagaagcacctgcacatggagctcaaggagggctggtatgagaagctgtgccgctgggacgaggcactggacgcctacgagcggaggctgctcaaggaggcgccgggcagcatggagtaccacacagcgctgctgggcaagatgcgctgcctggcctcgctggccgagtgggagaacctgtccaacctgtgccgcaccgagtggcgcaagtcggagccgcacgtgcgccgtgagatggcgctcatcgcggcgcacgcggcctggcacatgggcgcctgggacgagatggccatgtacgtggacacggtggacaaccccgaggccgtggggcccaacagccacacccccaccggcgccttcctgcgcgcggtgctgtgcgtgcgcgccaaccaggtgagcggggcgcaggcgcacgtggagcgcacccgcgagctgatggtggcggacctggcggcgctggtgggcgagagctacgagcgcgcctacacggacatggtgcgcgtgcagcagctggcggagctggaggaggtgtgcgcctacaagcaggcgctggacaggagggcagccgacccgggcggcagcgaggctcgcatcggcttcatccagcagctgtggcgcgaccggctccgcggcgtgcagcggcacgtggaggtgtggcagagcctgttctccatccgcagcctggtggtgcccatggcgcaggacgtggacagctggctcaagttcgccagcctgtgccgcaagagcggccgcagcaggcaggcctaccgcatgctgctgcagctgctgcgctacaaccctatgaacatcactcaggccggcaaccccggctacggcgccggcagcggcgcgccgcacgtgatgctggccttcctgaagcacctgtggacgcagggcaaccgcacagaggcctacaaccgcatcaaggacctggcgtcgctcaacggccgggccttcctgcggctgggcatctggcagtgggccatgaacgatctggacaacccgggtgtgattgcggagaacctggcttccttccgcgcggccaccgagcacgcgcccaattgggccaaggcctggcaccagtgggcgctgttcaatgtggcggtttcagcgcactacaggtgcgaccccatgcgggacgagaaccaggccgtgtcgcacgtgccgccggcggtgcagggcttcttccgcagcgtggcgctggggcaggcggcgggcgaccgcacaggcaacctgcaggacatcctgcggctgctgacgctgtggttcaacttcggcgcgtacgccgaggtccgcgccgcgctgacggagggcttccagctggtgtccatcgacacctggctgctggtcatcccgcagatcatcgcgcgcatccacacccacaacacagacgtgcgccagctcatccaccacctgctggtcaagatcgggcgccaccacccgcaggctctgatgtacccgctgctggtggccaccaagtcccagagcccggcccggcgccaggcggcctacagcgtgctggagtgcatccggcagcacagcgcggcgctggtggagcaggcgcagctggtcagcggcgagctcatccgcatggccatcctgtggcacgagatgtggcacgagggcctggaggaggccagccgcctgtacttcggcgagagcaatgtggagggcatgctgaacacgctgctgccgctgcacgagatgctggagaaggcggggcccaccacactcaaggaaatcgccttcgtgcagagctacggccgggagctgtcggaggcgtacgagtggctgatgaagtacaaggccagccgcaaggaggcggagctgcaccaggcctgggacctgtactaccacgtcttcaagcgcatcaacaagcagctgcgctccctaaccacgctggagctgcagtacgtcagccccgcgctggtgcgggcgcaggacctggagctggcagtgcccggcacctacattgccggggagccgctggtgaccatcgccgccttcgcgccgcagctgcacgtcatcagctccaagcagcgcccgcgcaagctcaccatacacggcggcgacggcgcggagtacatgttcctgctcaagggccacgaggacctgcgccaggacgagcgcgtgatgcagctgtttggcctggtgaacaccatgttggcgcacgaccgcatcaccgccgagcgcgacctgtccatcgcgcgctacgccgtcatcccgctgtcgcccaacagcggcctcatcggctgggtgcccaactgcgacacgctgcacgcgctcatccgggagtacagggaggcccgcaagatcccgctcaactgggagcaccgtctgatgctgggcatggcgcccgactacgaccacctgacggtcatacagaaggtggaggtgttcgagtacgcgctggactccaccagcggcgaggacctgcacaaggtgctgtggctcaagagccgcaacagcgaggtttggctggaccggcgcaccaactacacccgctccgccgccgtcatgtccatggtgggctacatcctgggcctgggcgaccgccacccctccaacctcatgctggaccgctacagcggcaagctgctgcacatcgactttggcgactgcttcgaggcgtccatgaaccgggagaagttcccggagaaggtgccgttccggctcacgcgcatgatgatcaaggccatggaggtgtcgggcatcgagggcaacttccgcaccacgtgcgagaacgtgatgcgcgtgctgcgctccaacaaggagagcgtgaccgccatgctggaggccttcgtgcacgaccccctcatcaactggcgcctgctcaacaccaccgaggcagccacggaggcggcgctggcgcgcacggacggcggcggcggcggcggtggccacatggacggccccggggggcacccggggggccgggacgcgctgggcggcggcggcggcggggcgggcggcggcggcggcggcgacccgggggccatgcccagcccgccgcggcgcgagacgcgggagaaggagctcaaggaggcgtttgtgaacctgggcgatgccaacgaggtgttgaacacgcgcgcggtggaggtgatgaagcgcatgagcgacaagctcatgggccgcgactacgcccccgagctatgtgtgggcggcggcagcggcgccagcggcatggagccggacagcgtgccggcgcaggtggggcgcctcatcaacatggcggtcaaccacgagaacctgtgccagagctacatcggctggtgccccttctggtag

SEQ ID NO: 149840 - protein, 2523 aa, Chlamydomonas reinhardtii
MMLSGVGPVPTKPAFKAGGDTLSRHLEELCRSGAWERRHKDGDKALLEYIEAEARDLSVEAFGRLMTDVYQRIGNMLLKGNDITRRMGGVLAIDELIDVKLSGDDAAKTARLSGLLSRVLEESEDPVLSESASHTLGHLVRSGGAMTSDIVEKEIRRSLAWCDPRNEPNESRRLTALLVLTEAAESAPAVFNVHVKSFIDAVWFPLRDAKQHIREAAVRALKACLCLVEKRETRYRVQWYYKLHEQTMRGMKRDHRTGALPSPESIHGSLLALAELLQHTGEFMLARYKEVVENVFRYKDSKEKNIRRAVIHLLPRMAAFSPERFASEYLARAIAFLLIVLKNPPERGAAFAALADMAAALARGCLSPIYVAIREALSAPPAARAAARPRPATCYEALQCVGMLAVALGPLWRPYAAALVEAMVLTGVSEVLVQALTQVANALPELLEDIQYQLLDLLSLVLSKRPFNSSTTQPKFAALSAAIAAGELQGNALTKLALQTLGTFDLGGIQLLEFMRDHILAYTDDPDKEIRQAAVLAACPRAGAARSSLRVRSLRSGWRRAAAAVWHTRVVERCVGRLLVVAVADPSERVRKEVLRALVATTALDDYLAQADCLRALFVGMNDESVAVRGLAIRLVGRLAERNPAHVNPALRKHLLQLLHDMEFSPDNRAREESAFLLEVLITAAARLIMPYVSPIQKALVSKLRGGSGPGITVLSTLGALAEVSGTTFRPFISEVMPLVIEAIQDNSDGRRRVVAVKTLGFIVSSCGNVMGPYLEYPQLLSVLLRMLHEGHPAQRREVIKVLGIIGALDPHTHKLNQASLSGEGKLEKEGVRPLRHGGGGAGGAGGGAGGGGVGGGVAGDSNDGGMGPGDDGGPGGDLLPSSGLVTSSEDYYPTVAINALMRVLRDPALASQHLAVIRALAAIFRALQLSVVPYLPKVLPILLGVLRGGDEALREEILASLRALVGYVRQHMRRFLPDLTQLVHEFWPAAPRTCLALIADLGMALRDDIRAKPLPPLPLLPPSSPPRTPHNRQYVPELLPKFVAVFSEAERAGSWDLVRPALGALESLGSAVDDSLHLLLPSMVRLISPAASSTPAEVRRAALRSLRRLIPRMQLGGYASAVLHPLIKVLDGHSDEQLRRDALDTICAVAVCLGPEFAIFVPTIRKVRVRHRLHHEWFDRLAGKVCAVSPPCMSDAEDWEGAGGAASGAGSAGAAGGWAVEIDLLARMQAEGGGALGGQPPVPPGPDGGPSAKLPVNAAVLRRAWESSHRVTKEDWAEWMRNFAVELLKESPSPALRACHGLAQVHPSMARELFAAGFVSCWAELEQGLQEQLVRSLEAALASPTIPPETVTALLNLAEFMEHDDKRLPLDTRTLGALAEKCHAFAKALHYKELEFQTSPQSAIEALIHINNQLRQPEAAVGVLAYAQKHLHMELKEGWYEKLCRWDEALDAYERRLLKEAPGSMEYHTALLGKMRCLASLAEWENLSNLCRTEWRKSEPHVRREMALIAAHAAWHMGAWDEMAMYVDTVDNPEAVGPNSHTPTGAFLRAVLCVRANQVSGAQAHVERTRELMVADLAALVGESYERAYTDMVRVQQLAELEEVCAYKQALDRRAADPGGSEARIGFIQQLWRDRLRGVQRHVEVWQSLFSIRSLVVPMAQDVDSWLKFASLCRKSGRSRQAYRMLLQLLRYNPMNITQAGNPGYGAGSGAPHVMLAFLKHLWTQGNRTEAYNRIKDLASLNGRAFLRLGIWQWAMNDLDNPGVIAENLASFRAATEHAPNWAKAWHQWALFNVAVSAHYRCDPMRDENQAVSHVPPAVQGFFRSVALGQAAGDRTGNLQDILRLLTLWFNFGAYAEVRAALTEGFQLVSIDTWLLVIPQIIARIHTHNTDVRQLIHHLLVKIGRHHPQALMYPLLVATKSQSPARRQAAYSVLECIRQHSAALVEQAQLVSGELIRMAILWHEMWHEGLEEASRLYFGESNVEGMLNTLLPLHEMLEKAGPTTLKEIAFVQSYGRELSEAYEWLMKYKASRKEAELHQAWDLYYHVFKRINKQLRSLTTLELQYVSPALVRAQDLELAVPGTYIAGEPLVTIAAFAPQLHVISSKQRPRKLTIHGGDGAEYMFLLKGHEDLRQDERVMQLFGLVNTMLAHDRITAERDLSIARYAVIPLSPNSGLIGWVPNCDTLHALIREYREARKIPLNWEHRLMLGMAPDYDHLTVIQKVEVFEYALDSTSGEDLHKVLWLKSRNSEVWLDRRTNYTRSAAVMSMVGYILGLGDRHPSNLMLDRYSGKLLHIDFGDCFEASMNREKFPEKVPFRLTRMMIKAMEVSGIEGNFRTTCENVMRVLRSNKESVTAMLEAFVHDPLINWRLLNTTEAATEAALARTDGGGGGGGHMDGPGGHPGGRDALGGGGGGAGGGGGGDPGAMPSPPRRETREKELKEAFVNLGDANEVLNTRAVEVMKRMSDKLMGRDYAPELCVGGGSGASGMEPDSVPAQVGRLINMAVNHENLCQSYIGWCPFW

SEQ ID NO: 149841 - DNA, 7691 bp, Zea mays
  CDS (1)..(7395)
  misc_feature (7652)..(7652): n is a, g, c or t
  misc_feature (7655)..(7655): n is a, g, c or t
  misc_feature (7665)..(7665): n is a, g, c or t
atgaagccctcgccgcacttcccggagatcggaaagaagcctaaagatttgattgctaaggaccacacatttaacatcgcggcttacatctcgtctggagcggatgttattgctgccgcgctccgtaaacatgttgaggaggaagcccgagatctcagcggtgaagcttttttaaggtttatggatcagctctatgagcagatatctagtttactgcagagcaacgatgttaatgaaaatttactggctctccgtgctatcgatgcgttaattgatatgccctttggagaaggcgcttccaaagtttctaagtttgccagcttcttgagaaacgtatttgaagtgaagcgcgaccctgaaatcctagttcccgcaagtgaagtgctgggtcatttagcaaaagcgggaggagcaatgactgcagatgaagtggagcggcagattaaaacggctttggggtggcttactggtgaacgagtggaatatcgccgatttgcagctgtactcattctcaaagagatggcagaaaatgcgtcaacagttttcaatgttcatgttcctgagtttgttgatgctatatgggtagcactgagagaccctaaacaagctgttcgtgaaaaagcagttgaagccttgcgcgcttgtctccatgttattgaaaaacgggagacacgttggcgtgtacaatggtattaccggatgtgtgaagccgcacaagttgggcttggcaggaatgcttctgttcatagtattcatggatcattattggccgttggagaattgctgaggaatacaggggagtttatgatgtctcggtacagagaagtggctgatattgtcctcgattatttaaagcatcgagatcagcttgttcgacgtagtataacatcacttcttcctcgaattgcccacttcctgcgtgacagatttgtgactaattacctgaagatttgtatggatcatatcttgtttgttctacgtacaccagacgagcgcgctagtggttttgttgcccttggagagatggctggggctctgggtgttgaacttgtgccttatttaccagcaattacctcacatttgcaagatgcgattgctcctcgcagaggaaggccatctcttgaggcaatttcttgtgtaggaagctttgcaaaagctatgggtcctgcaatggaacctcatattcgtagcggacttctagatgctatgttttttgctggtctttctgataaacttatagatgcactcgagtctataagcacaagcatcccgtctttactacccacaatacaggagcgtttattggattgtatatctcaagcactaccaaagtcatcaataaggccaggtgcttctgttggtcgagcaagcaggtcaaacaatttgcaacagtttgtggactctaatagtcctgttcttgtgcaacttgcactgtggactctagcaaacttcaactttaagggccatgaacttctggaattcgctagagagagtgtcatactttatttggaagatgaagatagcagtaccagaaaagctgcctctttgtgctgttgcaaattagttgcacactccctttctgcttcttcagcttcacagttcggttcaaataggacaaatcgtattggaggagctaagcgccgccggcttgtagaggagatagtggagaaacttcttatggctgcagttgctgatgctgatgttggtgttagaagttcagtcttcaaggctttgtatcgaaatccagcttttgatgatttcttggcccaagctgacatcttgacttcaatttttgttgccttaaatgatgaggaatatgatgtcagagaattggcaatttctgttgctggtcgattgtctgaaaagaatcctgcatatgtactgcctgcccttcgtcgctatcttatacaattgctcacatatcttgaccagagtatggatagcaagtgtagagaggaaagtgctagattattgggttgtttaattaggagctgcgcgcggctcattcttccttacattgctccagttcacaaggcactagtgactagattgtgtgaaggaacgggaccaaatgctaataatgctcttgctgcgggagtgcttgccactgttggagaactggccaaagtgggtggctttgctatgaggcaatatcttcctgagctgatgcctgtagttgtggattctcttttagatggaggtgctgttagtaaaagggaagtggcagtgtcaactctgggacagattatccagagcacaggctatgttattgccccctataatgagtaccccccattgcttggcttactcttgaagttgcttaatggtgaattggaatggtcaactagactagaagtgctgaaggttttagggattatgggtgcattggaccctcacgcacacaagcgtaatcagcacaatctacctggtcagcatagagaggtcctacggccaacatcgaaaccgcacaacatattgtttccatggaagaacctaccgactgactactggccttcttttcagcatccgaggactactattcaacagttgcaattagctccctcatgcgaattcttcgagatccttctctttcaagttatcaccaaatggtggttggctcccttatctttatttttaagtcaatgggccttggctgtgttcccatacttaccaaaggttcttcctgatctattccgtgctgttcgcatgtgcgaggatggtgctttaaaagagttcataacctggaaacttggaacattgatatctattgtccggcagcacatccgaaaatatttacaagacatactttccctcatctctgagctgtggacttcctcattcagcttggctgcaccaaatcggaccatacagggcccacagggttcaccggttcttcaccttgtcgagcaactatgcttagctttaaatgatgagttcagaatgtatttacttcacattctaccgagttgtatccaagtcttaggtgacgctgaacgttgcaatgattattactatgttcctgacatattacacacacttgaagtttttggcggaaatttggatgagcacatgcacttggttgctccggtgcttgttcgtttatttaaagtggagctggttgatatcaggcggcgtgcaattgttactttgactaatcttatacctaaggttcaggttggtactcatgtttcggctttagtgcatcatctgaagcttgtcttggatggcaacaacgatgatctgcggaaagatgctgcagaagcgctctgctgcctcgcccttggagaagactttactatcttcataccatcaatacgcaaaattcttgtgaagcaccacttgcggtacagaaaatgggatgagattgaaaatcggctactgaggcgagagctactcatcactgaaaacttgtctgtgcaaaagtacacacaatgtccacctgatgtcattagtgacccccttgatgattgtgatggtacaccttctgagatagctgatgaaacacagcgacaagcaagaagtcatcaagtcaatgatgtccggttgcggagtgccggtgaggcttctcaaaggagtactagggaagactgggctgaatggatgaggcatttcagtattgcgcttctcaaagagtcaccatctccagctttacgcacctgtgcaaggctagctcagcttcagccttctgttggccgcgagttgtttgctgcaggttttgcaagttgctgggcccaaatgagtgaatcctcccaggaacagctagtgagaagtctcaagacagccttctcatctcagaacattcctcctgaaattcttgccacgctgctgaacttagcagaatttatggaacatgatgagaagccgcttcctattgatacaagactgcttggtgcacttgctgagaagtgtcgagcatttgcaaaggcactccattataaagaaatggaatttgaagctgtgtgcaccaagaagatgggtgcaaatcctgttacagtggttgaatcccttattcatattaacaatcaactacagcagcatgaggcagctattggcatattgacttactcacagcaaaattcggaagttcaattgaaagaatcatggtatgaaaagttgcaccgttgggatgaggctcttaaagcatacaccgtgaaatcatctcaaacatctggtcctttacaaaacttggatgctacattaggtcgaatgaggtgtctagcagctttggctcggtgggaagatttaagtgcattgtgtagagagcaatggacgggtgcagaaccatctgctcgactggaaatggctccaatggctgcaaatgctgcttggcatatgggtgagtgggaccatatggcagactatgtttctcgcctggatgatgcagatgaaaataagctccgtatgttgggtaacgcaacagctagtggtgacggaagcagtaatggtgctttcttccgggcagttcttttagttcgttacaaaaagtatgatgacgctcggatgtatgttgagcgagctcggcggtgtttagctacagaacttgcagcactggtacttgagagttatgagcgagcgtataataacatggtgcgtgttcaacaactttcagaactggaagaggtgattgattactgcactcttcccatggaaagcccgattgctgacggacggagggaacttattcgcaatatgtggaatgaacggattaaaggaacaaaacggaatgtcgaggtgtggcaagccctacttgctgtcagggagttggttcttccccctaacgaagacagagacacctggataaagttcgctgaactttgctggaagaacggtcgtattagtcaggctagatctacgttagtcaaacttttacagtttgatcctgaatcttcccctgaattgacactgtatcatgcacatccacaagtagctctggcttatctaaaataccagtatgcagttggtgatgagcttaaaaggagggatgcattttctaaactgcaagagttgtctgtgcaggttgctaccaccatgggcaatttacctggaacatcagcaaaccatggcaccatgtcaaatgctggagtaccactcattgctcgtgtctacttgacacttggtagctggaagaaggcactatcacctgcattagatgacgattccattcaagaaattttgatttcttaccataatgccacgctaagtgcaaaggactgggggaaggcctggcacatatgggctttgttcaacacagaagtcatgtcacgctatactttccgaggccgaccagatattgctggaaaatatgttgttgcagcagtaactgggtatttctattctattgcttgtgcatctactacgaaaggggtcgatgatagcttgcaggatatccttcgtctgttaactctttggttcaaccatggggatacctcagaagttcaaacagcgttgcagaaaggtttttcccttgtcaagattgagatgtggctggttgtgctgccccagataattgctaggattcattcgaacaatagagtagttagagaactgatacaatctttgctagttcgaattggaaaggggcatccacaggctttgatgtatcctctcttggttgcctgcaaatcaataagtatattgagacaacgtgcagcgcaggaggtcgttgataagatccgccagcacagtggaggtcttgttgaccaggcacaacttgtgtcgaaggaactgatacgggtagcaattttgtggcatgaaatgtggcatgaggcactcgaggaagctagcaggatgtattttggtgagcacaatatcgaaggaatgcttgctgtacttgagccattgcatgcaatgcttgagaggggggatgagacaattaaagaaaatgccttcattcaggcttatgggcatgaattactggaagctcatgaatgctgtttgaaatatcgggctacaggagaggatgctgagctaactaaggcctgggatttgtattaccatgttttcagaagaatcgacaaacagcttccaagtcttacgaccctcgatctgcactctgtttcgcctgagctactcaaatgtcgaaagttggaacttgctgtgccaggaacttatgctgcagattcaccacttgtgacgattgagtattttgttccccaattgattgttataacgtccaaacaaagaccaagaaagctgacaattcatggaagtgatggcaatgattatgcattcttgcttaaaggccacgaagatttgcggcaagatgaacgagtaatgcagctttttggtttggtgaatactctcctagagaactcaaggaaaacatcagagaaggatttatcaatccaaagatatgctgttatacctttgtcacctaacagtggtttaattggatgggttccaaactgtgacacacttcatgctctgatccgtgaatacagagatgccaggaagattttcttgaatcaggagcacagacttatgttggcttttgcacccgattatgatcacttacccctcattgcaaaggtggaagtgtttcagcatgctttgcaaaatactgagggaaatgaccttgcgaaggttctgtggctgaagagtcgaacttcggaagtatggcttgagcgccgcacaaactacgctagaagcctggctgttatgagcatggttgggtatttgcttggtttaggagatcggcatccaagcaaccttatgttagatcgctatagtggaaaaatattacacatcgacttcggagattgctttgaggcttcaatgaatcgagaaaagttccctgaaaaagtaccattccgtttgactcgaatgcttgtgaaagctatggaagttagcggtattgagggtacattccgaacaacttgtgaaaatgtgatgcaagtccttcgcacaaacagagacagcgttatggccatgatggaggcatttgtacatgacccgttaatcaattggcgtctgttcaatttcaatgaggttcctcaagtgtcgaactatggtaatgttcatgctcacacggttgtcagtagtgaagaagcagtggctaaccgagagctcatgcaacctcagcgaggagcacgtgagagggaactgctacaggctgtcaatcaactcggtgatgccaatgaggttttgaatgagcgtgctgtagctgtgatggcacggatgagtgacaaactaacagggcgtgacttctcttctgggtcagctttggctggagcaggtagctctatccaacatggcagtgagcatttggcttcaggagatgcccgggatgcccaacctggtctctcagtgaaggttcaggttcagaagctcatactccaagcgacttcacacgaaaatttgtgccaaaactatgtcgggtggtgtccgttctggtgagctctcttggaaacagtagcagtttataacatgtaaatattgtgaataccgtgtgcatagaagtttcgtggtgacagtttgtatgtgcagctttgtaattagcagaacttcaagatgccttggaccatccttttgtcagtttcttagaccgtgtttagcagttcacccttatggccatccaaaacactgtttttgtactgtagattgtattgtttgtagattgtactgttcgcagggtggatttttgaatatgagtntangaatgtgtancctgttgaaaataaaaaaaaaaaaaa

SEQ ID NO: 149842 - protein, 2464 aa, Zea mays
MKPSPHFPEIGKKPKDLIAKDHTFNIAAYISSGADVIAAALRKHVEEEARDLSGEAFLRFMDQLYEQISSLLQSNDVNENLLALRAIDALIDMPFGEGASKVSKFASFLRNVFEVKRDPEILVPASEVLGHLAKAGGAMTADEVERQIKTALGWLTGERVEYRRFAAVLILKEMAENASTVFNVHVPEFVDAIWVALRDPKQAVREKAVEALRACLHVIEKRETRWRVQWYYRMCEAAQVGLGRNASVHSIHGSLLAVGELLRNTGEFMMSRYREVADIVLDYLKHRDQLVRRSITSLLPRIAHFLRDRFVTNYLKICMDHILFVLRTPDERASGFVALGEMAGALGVELVPYLPAITSHLQDAIAPRRGRPSLEAISCVGSFAKAMGPAMEPHIRSGLLDAMFFAGLSDKLIDALESISTSIPSLLPTIQERLLDCISQALPKSSIRPGASVGRASRSNNLQQFVDSNSPVLVQLALWTLANFNFKGHELLEFARESVILYLEDEDSSTRKAASLCCCKLVAHSLSASSASQFGSNRTNRIGGAKRRRLVEEIVEKLLMAAVADADVGVRSSVFKALYRNPAFDDFLAQADILTSIFVALNDEEYDVRELAISVAGRLSEKNPAYVLPALRRYLIQLLTYLDQSMDSKCREESARLLGCLIRSCARLILPYIAPVHKALVTRLCEGTGPNANNALAAGVLATVGELAKVGGFAMRQYLPELMPVVVDSLLDGGAVSKREVAVSTLGQIIQSTGYVIAPYNEYPPLLGLLLKLLNGELEWSTRLEVLKVLGIMGALDPHAHKRNQHNLPGQHREVLRPTSKPHNILFPWKNLPTDYWPSFQHPRTTIQQLQLAPSCEFFEILLFQVITKWWLAPLSLFLSQWALAVFPYLPKVLPDLFRAVRMCEDGALKEFITWKLGTLISIVRQHIRKYLQDILSLISELWTSSFSLAAPNRTIQGPQGSPVLHLVEQLCLALNDEFRMYLLHILPSCIQVLGDAERCNDYYYVPDILHTLEVFGGNLDEHMHLVAPVLVRLFKVELVDIRRRAIVTLTNLIPKVQVGTHVSALVHHLKLVLDGNNDDLRKDAAEALCCLALGEDFTIFIPSIRKILVKHHLRYRKWDEIENRLLRRELLITENLSVQKYTQCPPDVISDPLDDCDGTPSEIADETQRQARSHQVNDVRLRSAGEASQRSTREDWAEWMRHFSIALLKESPSPALRTCARLAQLQPSVGRELFAAGFASCWAQMSESSQEQLVRSLKTAFSSQNIPPEILATLLNLAEFMEHDEKPLPIDTRLLGALAEKCRAFAKALHYKEMEFEAVCTKKMGANPVTVVESLIHINNQLQQHEAAIGILTYSQQNSEVQLKESWYEKLHRWDEALKAYTVKSSQTSGPLQNLDATLGRMRCLAALARWEDLSALCREQWTGAEPSARLEMAPMAANAAWHMGEWDHMADYVSRLDDADENKLRMLGNATASGDGSSNGAFFRAVLLVRYKKYDDARMYVERARRCLATELAALVLESYERAYNNMVRVQQLSELEEVIDYCTLPMESPIADGRRELIRNMWNERIKGTKRNVEVWQALLAVRELVLPPNEDRDTWIKFAELCWKNGRISQARSTLVKLLQFDPESSPELTLYHAHPQVALAYLKYQYAVGDELKRRDAFSKLQELSVQVATTMGNLPGTSANHGTMSNAGVPLIARVYLTLGSWKKALSPALDDDSIQEILISYHNATLSAKDWGKAWHIWALFNTEVMSRYTFRGRPDIAGKYVVAAVTGYFYSIACASTTKGVDDSLQDILRLLTLWFNHGDTSEVQTALQKGFSLVKIEMWLVVLPQIIARIHSNNRVVRELIQSLLVRIGKGHPQALMYPLLVACKSISILRQRAAQEVVDKIRQHSGGLVDQAQLVSKELIRVAILWHEMWHEALEEASRMYFGEHNIEGMLAVLEPLHAMLERGDETIKENAFIQAYGHELLEAHECCLKYRATGEDAELTKAWDLYYHVFRRIDKQLPSLTTLDLHSVSPELLKCRKLELAVPGTYAADSPLVTIEYFVPQLIVITSKQRPRKLTIHGSDGNDYAFLLKGHEDLRQDERVMQLFGLVNTLLENSRKTSEKDLSIQRYAVIPLSPNSGLIGWVPNCDTLHALIREYRDARKIFLNQEHRLMLAFAPDYDHLPLIAKVEVFQHALQNTEGNDLAKVLWLKSRTSEVWLERRTNYARSLAVMSMVGYLLGLGDRHPSNLMLDRYSGKILHIDFGDCFEASMNREKFPEKVPFRLTRMLVKAMEVSGIEGTFRTTCENVMQVLRTNRDSVMAMMEAFVHDPLINWRLFNFNEVPQVSNYGNVHAHTVVSSEEAVANRELMQPQRGARERELLQAVNQLGDANEVLNERAVAVMARMSDKLTGRDFSSGSALAGAGSSIQHGSEHLASGDARDAQPGLSVKVQVQKLILQATSHENLCQNYVGWCPFW

SEQ ID NO: 149843 - DNA, 7335 bp, Aedes aegypti
  CDS (1)..(7335)
atgtcgacggtggtgctacagttcgtgagtgggctgaaaagccgcaacaaggatgcacagaataaggcggcccaggaactgtcgctgtacgtcaagacggaactgcgcgagattccgcaggatgatctgctggcgttcttcgaggacttcaaccagtacatttttgagatgttgtccagtgccgacatcaacgacaagaaaggaggcgtgctggccattaattgcttgataagtggcgatgtggtcaacacgacgactcagatttcccgttattcgaacaatctccggaatctgcttccgtcgagtgacatttcggtgatggagctggcagcgaaggtgctcgtcaagttagccctgctacccggctccaagggcgccgagtcgttcgagttcgacatcaaacgtgccttcgagtggctgatggaggaacgaaccgagggcaaacgccatgccgccgttttggtgctgcgtgaactggccgtggccatgccgacgtttttctaccagcaagttggaagctttttcgagcacatattcgtcgccatcaaggatcccaagccgatgattcgggagggagctggtcaagccttgcgggctgtattgattgtcacttcgcagagagagggaaccaagcagaataataatccacaatggtacaaccacttgttacgacaacgcaatggaatgcttcagggagcttccttccgcgagaaaggtttcaaccgagatgatcgcatccacggagcaataattgtgttcaatgaaatcttacgatgttcaaatgcagcctgggagaaaaagtacatgcagttggagagtttgaacgtcgatcgcaggtctcgtcacacggatgaaggtcacagcattttcccccggattcgtgtcccgttcatggacaagctaggaggaggacatagctctggagcgtctcgtaccagtgagggaagtgatgtcaaattcttccgccagaatagctccattcaggagtctgcaatctgccgagcgttgacgaacgacaactacgaattgatttgtcagaaagtgcttgagcaacgcaattcaaagtcaccctacgtgattcagtcgctgctgaccattctacctcgattggccgccttcaatcgcagagactttgtcaataaccatttgaaaactgtcgtcaactatcttatcctaacgattaagagcaaagaaaaggaacggaatctggcgttcgtcacgcttggctatatcgccgtggcagtcgagaaggatattgcccccttcaggaccaggatcatcgaggtgatcacggcagctctgcctccgaaagaaaccccaagcaagaagaaagtctgcgtcgatccgtcggtgttcatgtgcatcaccctgttgggtcatgcgttaaaaagtgcaattacaaccgatgtcaagagcttgatcttgccaatgctttcgactggactgagcacagggctaacggtgtgcttacacgagttgagcgagaatgtgccgcagctgaggcaggaaattaccagcggactgttgaagattttgtcctgcgtgctgatgaataaaccattgccgcagtttatacccgggcggcctcaaggtggaatgaacacgagcctctacgagcaacagattcaagatacgcccaccacagtgctggccctccgcactctgggaaccttcaatttcgaaggacacagcttgctaccgttcgtgcaacgatgcgccgatcactttctgctcagcgagcagcaggaaattcgcatcgaagccgttcagacgtgcactctgctgctgaagctggctctccaatcggtcgattcggcagacggatcggaaaccctcacccagaccgttggaagcgtgctggagaagattctgatcgttggtatcaccgacgttgatccgaatgtgcgtctgagggtgctgaaatctttggacgacagcttcgattctcagctggcgcaaccatggttcctgagctcgctgttgatcacgatgaatgatgaggtgtttgaaatcagggagttggcgattatcatcattggaagactgtcggccatcaatccggcttacgtgatgccaagcttgaggaaaacgatggtacagatcctaacggagctggaacactccggtatgagtagaaacaaggagcagagcgcgagaatgttggatcatctgatagtcagcactccgaggttgatatcttcctatatgcgtccgatcttgtcgatcttggttccgaaattgaaagagcctgaatcaaatccgggagtggtgttgaatgtgttgagagccataggtgatcttgctgaagttaatggaggtcataatgttttggaaaaatggtcggatgagctgctggctacattgctagagatgctaagcgatgccggatcaacggaaaagcgcggcgtggctttgtggactcttggccaattggtcagtgccacggggcaagcagtcaaaccgtaccacaaatatcccaatttgatcgatatattgatcaactttttgaaaaccgaacagcaaccgtacgtaaggcgggaaacgatccgtgtcctcgggttgctcggtgccttggatccgtacaagcacaagatgaatcgtggcctgattgacagccagaccaacaatatcctcatttcgatttccgacagcaagacagaggaatataccgatttgtccacgtcggaaatgttgatcaatatgaacaatcagctggaggagtactacccggcggtggccatttcaacgctgatgaaaatccttcgtgatcctacgttatcctcgcatcacaccagcgttgtccaggcgatcacctttatcttcaaaagtttgggtatcaaatgcgttccatatttgtcccaggtcttacccagtctgctcggcaatattcgcaatgccgaaatgaacttgaaggagttcttgttccagcagctatcgatcctgatcgagatagtcaaacagcacatcatcagcttcatggaggaaatattccagctgatcaaaacgttctggaacagtatctatcctttgcagccgaccctcatcattttggtggaaaagatcgccatcgctttgggatgtgagttcaagatctatcttcctcagttgatgccgcagatcttgcgagttctccttcacgatgcgtccacccatcgaatagtcaccgtcaagctcctcaacgctctgcagaagttcgggaacaatctggacgactatcttcacttgatcattccagccattgttaagctgttcgaaccgatcgaagttccttaccaggtgtctcttgcagccctagaaaccatcaactaccttgcggagatccttgatttcaccgatttctcgtcgcgcatcattcatcccttggtacgcgtcctggacaaccacccgggtcagctccaaacggccgcgctgcaaaccctctgctcgatcatgatccaactgggcaagaaatacctcgtttttgtcccgctagtcaaccgggtcatgatcaggcacaaaatatcttacacagagtacaacaaactcctctccaagctgcaaagtcagagcaccctcgccctggacgatgaattccgactgcgccaggctcggttcaagaatcgcgaaatgtccctcgctggggacaccaccatccgcaagttgaacgtgtccaccgcggatctccagctggcgttcaaagccaatcgcagggtatcccgtgacgattggctcgagtggctccgtcggctcagcattggtcttctgaaggagtccaaaagcccggcgctgcgatcctgccgaaccctggcccaaaactatccccagctgttgaaggatctgttcaacgcagccttcgtcagctgttggaccgatttaccggacagtctcaaagaggagctatcgtccagcttgaggcaggctctgatggtgccggaccttccggaaattacccaaaccattctcaacctggccgagtttatggaacactgcgagaacgatgcgctgaggatcgatccgaagatcttgggcgagagggccatggagtgccgagcctatgccaaggctttgcactacaaggaggaagagttcctgaacatgaaggacaaggatcagagcgtgttcgagtcgttgattttgatcaacaataagctgcagcagaaggaagcggctgaggggctgctggagtacgccatggaacacaggagcgcttctgaggaaatgaaagtccaggtgaggtggtacgagaagctgcacagctgggagaaagcattgaacttgtatcaggacaaattggagagcaatccgggtgatctggactcgagacttggtcagtggaggtgtttggaagcgctaggggagtggtcaacgctgaatacgctgaccaaggagacgtgggaatcgctgggaaccgaaggacagagtaaggccggtagacttgctgccgctgcagcctggggtttgaaggattgggagggaatgcaggagtttgtcaagttcatcccggaggacacgcaggacgggtcgttctatcgtgccgtactggctgtgcatcacggtgagtatgaacttgcccaaaccctaattgacgatacgagagacttgttggatacggaattgaccgcgatggccggcgaatcgtacgaacgcgcgtacggagcaatggtttgcgttcaaatgctgtcggaattggaagaagtcattcagtacaagctgattcccgagcggcaggaaactatcaaggcaatgtggtgggatcgcttgctcggtggccaacgtttggtggaagattggcaacgaattttgcaggttcatactttggttgtccaccccgcaaatgacgtcaaaacgtggctgaagtttgcctcactctgtcgcaagagtgattcgttgaaactttccgagaagaccctcgtcatgctgcttcgctacaatccctcggagtacccggatcacccgttggaattcatgcaaccagacatcagctttgcctacgcgaaacatctgtgggcagctggcgagcaagaaaaggcttacaatcaactgaatcgactagtcgccgatatgggcatcgagggtaacttcgacgtcgaggaaaaggacgaaaaccgccgtctgttggcgcgttgctacatgaagctcggacaatggcagaaccaactacaaggactcaacgagcaatccatcaagggcatcttggcttgctacgagaaggctaccaaacacgactccaattggtacaaggcgtggcatctctgggcttacatgaacttcgaggttgttcagaatcagaaacaacaggaggacctcatcaagaaccctggcggagacaaagagaagtgtatgattcggcagtatgccgttcccgcggttgaaggcttcttccgctcgatcaatctgtcacacggaaactccctccaagacacactccgtctcctaaccctctggttcgactacggacagtatcccaaggtgtacgaagccctggtcgaaggaatgcgcgtcattgaaatcaacacatggcttcaggtcatccctcagttgatcgcccgcatcgatactccgcgcaacctagttggccaactaatccaccagctgttgaacgacatcggaaagtgtcatccgcaggctcttgtctatccgctgaccgttgcttccaattcggcatccagtgcgcgacgacaggccgctcacaagatcttgggctccatgggtgaacattcgtccaacttggtcaaccaagcgatcatgtgcagcgaggaactgatccgcgtgaccattctgtggcacgaacagtggcacgagggcttggaggaggcgtcgcggctgtatttcggcgaccggaacatcaagggaatgttcgaaactttggaaccgctgcaccaaatgcttcagaggggacctcaaaccttgaaggagacctcgttcaatcaggcgtacggtagggatctgaacgaggcgcaggagtggtgcaaacattataagaactcgggcaacattcgtgacttgaaccaagcgtgggatttgtactatcacgtattccgccgaatttcccggcagttgccgcagcttacctccctagaactacaatacgtcagtcctaagctgctagcctgtcgtgatctagagctagccgtccccggaagctacgcccccggtcaggagctgatccggatcgccagcattcaatcgaacctccaggtgatcacttcgaagcaaagaccgcgaaaactttgcatccgtggctccaacggcaaggagtacatgttcctgctgaagggccacgaagatttgcgccaggacgaacgcgtgatgcagctgtttgggctggtgaacaccctgctgctaaacgatccggacacgttccgtcggaatctgaccattcaacggtacgcattcattccgttgagcaccaattccggcttgatcggttgggtgccccactgcgatacgctgcacacgctgactcgagattaccgcgagaagaaaaagaccatgctgaacatcgagcatcggattatgttgcgaatggcaacggattacgaccatctgacgttgatgcaaaaggtcgaagtctttgagtatgcgttggagctcaccaaaggagacgacctggccaagctgctctggctgaagagcccctcgtcggaggtttggttcgatagaagaacgaattatacgcgatcccttgcggtcatgtcgatggttggctacattctgggactgggcgatcgacatccgtcgaacttgatgctggatcgattgagcggcaaaattctgcacatcgactttggcgattgcttcgaggttgcgatgacccgcgagaagttcccggagaagattcccttccgtttgacgcgaatgctgatcaacgccatggaagttaccggcatcgaggggacctaccgccggacgtgtgaaagcgtcatgcacgtgctccgtcgcaacaaggatagtctaatggccgtgctggaagctttcgtatacgatccattgctcaactggcgcctgctggatgtggacaagaatcgcaggtccaagaatgccaccgacgtggacagcacaacggaaagcatggaagaaacgttggatcttctgatcaacgccaggaacctgcggatgaacgaagccaacggaggcggagacgtggtggatcagggcagcaattgcatcgccaatccggccgaagctaccaacaataaagcccgggccatcgtggatcgtgtgaagcagaaactgaccggaaaggacttcaacacggtcgaaccggtgcaacggcagatcgatctgttgatacggcaggcgacgaacaatgaaaacctctgccagtgctacatcgggtggtgtcctttctggtag

SEQ ID NO: 149844 - protein, 2444 aa, Aedes aegypti
MSTVVLQFVSGLKSRNKDAQNKAAQELSLYVKTELREIPQDDLLAFFEDFNQYIFEMLSSADINDKKGGVLAINCLISGDVVNTTTQISRYSNNLRNLLPSSDISVMELAAKVLVKLALLPGSKGAESFEFDIKRAFEWLMEERTEGKRHAAVLVLRELAVAMPTFFYQQVGSFFEHIFVAIKDPKPMIREGAGQALRAVLIVTSQREGTKQNNNPQWYNHLLRQRNGMLQGASFREKGFNRDDRIHGAIIVFNEILRCSNAAWEKKYMQLESLNVDRRSRHTDEGHSIFPRIRVPFMDKLGGGHSSGASRTSEGSDVKFFRQNSSIQESAICRALTNDNYELICQKVLEQRNSKSPYVIQSLLTILPRLAAFNRRDFVNNHLKTVVNYLILTIKSKEKERNLAFVTLGYIAVAVEKDIAPFRTRIIEVITAALPPKETPSKKKVCVDPSVFMCITLLGHALKSAITTDVKSLILPMLSTGLSTGLTVCLHELSENVPQLRQEITSGLLKILSCVLMNKPLPQFIPGRPQGGMNTSLYEQQIQDTPTTVLALRTLGTFNFEGHSLLPFVQRCADHFLLSEQQEIRIEAVQTCTLLLKLALQSVDSADGSETLTQTVGSVLEKILIVGITDVDPNVRLRVLKSLDDSFDSQLAQPWFLSSLLITMNDEVFEIRELAIIIIGRLSAINPAYVMPSLRKTMVQILTELEHSGMSRNKEQSARMLDHLIVSTPRLISSYMRPILSILVPKLKEPESNPGVVLNVLRAIGDLAEVNGGHNVLEKWSDELLATLLEMLSDAGSTEKRGVALWTLGQLVSATGQAVKPYHKYPNLIDILINFLKTEQQPYVRRETIRVLGLLGALDPYKHKMNRGLIDSQTNNILISISDSKTEEYTDLSTSEMLINMNNQLEEYYPAVAISTLMKILRDPTLSSHHTSVVQAITFIFKSLGIKCVPYLSQVLPSLLGNIRNAEMNLKEFLFQQLSILIEIVKQHIISFMEEIFQLIKTFWNSIYPLQPTLIILVEKIAIALGCEFKIYLPQLMPQILRVLLHDASTHRIVTVKLLNALQKFGNNLDDYLHLIIPAIVKLFEPIEVPYQVSLAALETINYLAEILDFTDFSSRIIHPLVRVLDNHPGQLQTAALQTLCSIMIQLGKKYLVFVPLVNRVMIRHKISYTEYNKLLSKLQSQSTLALDDEFRLRQARFKNREMSLAGDTTIRKLNVSTADLQLAFKANRRVSRDDWLEWLRRLSIGLLKESKSPALRSCRTLAQNYPQLLKDLFNAAFVSCWTDLPDSLKEELSSSLRQALMVPDLPEITQTILNLAEFMEHCENDALRIDPKILGERAMECRAYAKALHYKEEEFLNMKDKDQSVFESLILINNKLQQKEAAEGLLEYAMEHRSASEEMKVQVRWYEKLHSWEKALNLYQDKLESNPGDLDSRLGQWRCLEALGEWSTLNTLTKETWESLGTEGQSKAGRLAAAAAWGLKDWEGMQEFVKFIPEDTQDGSFYRAVLAVHHGEYELAQTLIDDTRDLLDTELTAMAGESYERAYGAMVCVQMLSELEEVIQYKLIPERQETIKAMWWDRLLGGQRLVEDWQRILQVHTLVVHPANDVKTWLKFASLCRKSDSLKLSEKTLVMLLRYNPSEYPDHPLEFMQPDISFAYAKHLWAAGEQEKAYNQLNRLVADMGIEGNFDVEEKDENRRLLARCYMKLGQWQNQLQGLNEQSIKGILACYEKATKHDSNWYKAWHLWAYMNFEVVQNQKQQEDLIKNPGGDKEKCMIRQYAVPAVEGFFRSINLSHGNSLQDTLRLLTLWFDYGQYPKVYEALVEGMRVIEINTWLQVIPQLIARIDTPRNLVGQLIHQLLNDIGKCHPQALVYPLTVASNSASSARRQAAHKILGSMGEHSSNLVNQAIMCSEELIRVTILWHEQWHEGLEEASRLYFGDRNIKGMFETLEPLHQMLQRGPQTLKETSFNQAYGRDLNEAQEWCKHYKNSGNIRDLNQAWDLYYHVFRRISRQLPQLTSLELQYVSPKLLACRDLELAVPGSYAPGQELIRIASIQSNLQVITSKQRPRKLCIRGSNGKEYMFLLKGHEDLRQDERVMQLFGLVNTLLLNDPDTFRRNLTIQRYAFIPLSTNSGLIGWVPHCDTLHTLTRDYREKKKTMLNIEHRIMLRMATDYDHLTLMQKVEVFEYALELTKGDDLAKLLWLKSPSSEVWFDRRTNYTRSLAVMSMVGYILGLGDRHPSNLMLDRLSGKILHIDFGDCFEVAMTREKFPEKIPFRLTRMLINAMEVTGIEGTYRRTCESVMHVLRRNKDSLMAVLEAFVYDPLLNWRLLDVDKNRRSKNATDVDSTTESMEETLDLLINARNLRMNEANGGGDVVDQGSNCIANPAEATNNKARAIVDRVKQKLTGKDFNTVEPVQRQIDLLIRQATNNENLCQCYIGWCPFW

SEQ ID NO: 149845 - DNA, 7158 bp, Emericella nidulans
  CDS (1)..(7158)
atggcgcaagcaggtccgatcacggacgtcacccagaggctcttcatcgagctgaagtctaagaacgaggaaacgcgggtccgagctgcttacgagctttacgaaaatgttcttgccatctcaagagactggcctcccgagaagttcattgaattctataacgccgttagtcaacgcatcgcccagcttgttgtcaccggcagtgatgcacacgaaaggatcggcggtctcctagctcttgaccgactaatagatttcgatggcgtggacaatgcgcagaagacaacgaggttcgccagctatttgcggagcgccctgcgcagcagcgataatgccgtacttgtctacgccgctcgggcacttggtcgcctggcgaagcccggtggtgcccttactgcagaattggttgagagtgaaatacagtcggcactggaatggcttcagtctgaacgacaagaaggtcgacggtttgctgcggtgctggttattcgggagctcgctaaagggtcgcccacgcttctttacgggttcgttcctcagatcttcgaactcatctgggttgctctgagagaccccaaggtacttatccgagagactgctgcagaagcagtaagtgaatgcttcgaaatcattgctgcgagagatatacaggttcggcagctatggtttgcgagaatatacgaggaagcgctccagggcttgaagtcgaataatgtggactggatccatggatcactcttggttcttaaggaacttctcctcaaaggagccatgttcatgaatgaacattatcgaaatgcgtgtgaaatcgtgcttcgtctcaaggaccaccgagacccgaaaattcggacgcaagttgttctcacaattcccattcttgcctcctacgctccggttgatttcaccgaaacatacctgcatagattcatggtgtatcttcaagcccagctcaaaaaggacaaggagcgcaatgctgctttcatagctatcggaaagattgcaaatgcggtgggtgtagctattgcacaataccttgatggtatcattgtttacatccgcgaaggactggccctgaaagcgaaaaatcgagctgccattaatgaagcgccaatgtttgagtgtattagtatgctctcgctggctgttgggcaggctctcagcaaatacatggaatcgctcctcgatcccatctttgcatgtggcttaagtgaatccctgacacaggctcttgttgatatggctcattatattccaccaatcaagcccacgattcaagtaaagctgctggatatgcttagcctgattcttgatgggacgccttttcgccccctaggttgtccggaaagcaggctacctccgctgccgtctttcgccaaagacttcaccctgcaagaactgcattctgacgctgaaattgcgctggctctccacaccctgggaagcttcgatttttctggtcatattttgaatgaatttgtgcgcgacgttgccattcactatgttgaaaacgacaaccctgaaattcggaaggctgcggctcttacctgctgccagctatttgtgcatgaccccattatcaatcagaccagcagccactcaatacaggttgttagcgaggtcatcgacaagctattgaccgttggtgtcggcgaccctgatcctgagattagacgcactgtgctatggtccttggatcgcaaatttgaccggcaccttgcacggccagaaaatatccgatgcctcttcttggccgtgaatgatgaagtgttcgctgtcagagaggcagcgatctgcataattggccgcctttccagtgtcaacccagcctacgtattccctcccctaaggaagttgctggtgaacttgctcactggacttgggttcgcaagcactgctcgccagaaggaagaaagtgcacagcttattagcctttttgtttcgaatgccacgaaacttatccggtcgtacgtcgaccctatggttacgactctgctaccgaaagcagttgatgccaatcacggcgtcgcctccacaacactgaaagctgtcggagaacttgcaagcgttgggggcagcgatatgaaagcctacctgcctaagctgatgccaatcgttctggatgccttgcaggacctttcatctcatgctaagagagaagcggctttgcgaacattgggccagatagccagcaactcaggctacgttatcgacccgtacaccgaccaccctcatctgctggcggtgcttattggtatcatcaagacggagcaggcaggatcgcttcgcaaggaaacgataaaagttctaggaattctaggtgcactggacccttataaataccagcaaataagcgaaaccgcaccagacgtccaccatatcaacgaagtacaagtggtgtcagacgttagtcttattatgcaaggccttgccccttccaatgaagagtactacccaactgttgttatccatactctcatgcagaacatacttcgcgagaactcccttgcgcaatatcattctgctgtcatcgacgcgattgttacgatctttaagacccttggcttgaagtgtgtccccttccttggccagatcattcctggtttcatttctgtcattcgaggttcaccctcaagccggctcgaatcttatttcaaccaaatggcaatccttgtcaatattgtgcggcagcacatcagagcctttcttcctgaaataattgaggtcattcgggaattctgggacacgtcatatcaggttcaagcgaccattctctcgcttgtggacgcgatagccaagtcccttgagggtgaatttaagaagtaccttgcaaatctcattcctccaatgctggacacactggaaaaggataatactccgcgccgccagccttccgagaggattttgcatagcttcttagtattcggctccagtggcgaagagtacatgcatctgattgtgccctccattgtgcgtctgtttgataggtcccagaacccagcgagcatcagaaagtcagctattgacagcttgaccaaactttcgcgacaagtgaatgtctccgattttgcgtccttgattgtacactccctttctcgagtcgttgccggcaacgaccgtatgttacgacaggctgctatggattgcatatgctctttgatattccagcttggccaggatttcaaccattatattcatctgctgaacaaggtcttgaagcatcatcaagtcaatcacgtgaactatcagatccttgtcacaaagctccagaaaggagacccgctcccacaggatctcaatcctgacgagagctatgccccattggcggatgacgcgaactatgcagagatcggtcaaaagaagatggtggtcaatcaacaacatcttaagaacgcctgggacgcttcgcaaaagtcgactcgcgaagactggcaagaatggatccggaggttcagtgtagagcttttgaaagaatcaccttcgccggcgctgcgtgcttgtgccagcctggcgggcatctaccaacccctcgctagggatctattcaatgccgctttcgtctcctgttggacggaattgtacgaccagtaccaggaagagctggttcggtcaatcgaaaaagccctcacctcgccgaacattccaccggaaattcttcagatcttgctcaatcttgctgagtttatggagcacgacgacaaggcgctgccgattgatatccgcactcttggaaaatatgctgccaaatgtcacgcgttcgcaaaggcgctccactacaaagaactcgagttcgagcaagatcagaactctggagctgtagaggcactcattactatcaacaatcagctccagcaatccgatgccgctattggtatccttcggaaggctcaggcgtatcgggatgttgaactgaaggagacctggtttgagaaacttcagcgatgggaagaagcccttgcagcttacaaacgtcgtgagaagattgaccccgactctttcggtatcacaatggggaaaatgcgctgtctacatgctcttggagaatggaaagtgttgtctgacctcgctcaggagaagtggaaccaggcctctctagaacaccggaaatcaatcgctcctctcgctgcggcagctgcatggggtcgcggtcaatgggagctgatggattcgtacctaggagttatgaaagaacaatctcctgaccgttcgttctttggggcaatactggcaattcatcgcaaccaatttgatgaagccattatgtacatcgaaaaggcccggaacggccttgacacggaactctcagcacttctcggagagtcatataaccgtgcctacaatgtagttgttcgcgttcaaatgcttgctgaactcgaggagatcatcacctacaaacagaatgttggtgatcccgagagacaagaggcaatgcgccagacctggaacaggcgacttctcggctgccagcagaatgtagaggtatggcagcgcatgctcaaggtcagagcacttgttacaacaccgcgagagaacctagacatgtggatcaagtttgccaatttgtgtcgcaaatcaaaccgcatggggttagcggaacgttctctcgcctctctagaaactgtcatccctgacggcaacggcggcactcgcactatctccccaccagaagtcacatatgctcgcttgaagtttagctgggcaactggccgccaacgcgaggcccttcatatgctccgtgaatttactgccaacctaacagaagacttcactcgcttcaatgcacttgttgcctcacaatctgaccataacggtatcaacggcgttaatggtatcgcagaaggaaaccataccgatatcatggcccttcgagagcgcgttggtgatgtcaacaagtttagaaagctccttgcaaagagttatctaagacttggtgagtggcaaacggctctacaacgaggggactggcggccagagcatgtccgcgaagtactcaacgcatattcagcagccaccaggtacaaccgcgattcctacaaagcctggcactcatgggccctggccaactttgaggtcgtgacgacaattgccagccaggcaagtaaggacggcggaaatctggcattggttccagggcatatcgtaacagaacatgtgattcctgcgattcgcggcttttttaggtccattgccctctcttcgacgtcgtctcttcaggatactcttcggttgctcactctctggttcaaccatggtggtgaccaggaggtgaactcggtcgttacagagggtttcacggctgttaatatcgacacgtggctcgccgtcactcctcagcttattgcccgcatcaatcagcccaacttcagggttcgcagcgccgttcatcgcttgcttgctgaagttggcaaggcacatccccaagccctcgtgtatccgctcacagttgcgatgaagtcgaatgttgcccgacgatcacagtccgcaggcaacattatggagagcatgcggacacacagtgcaaacctagtggagcaggctgatcttgtaagtcatgagctgattagggtcgctgttctgtggcacgaactctggcacgaaggactggaagaggcgtcacgtctctatttcggtgaccataacgtggatgggatgtttgcaactctcgcaccgcttcatgaaatgcttgataaaggtgctgaaaccctgcgcgaagtatcgtttgcccaagctttcggacgtgacctggctgaggccaagcattactgcatgctctatcgcgagacggaagaaatcggtgacctaaaccaagcgtgggatttgtattacacagtgttccgcaaaatcagccgacagctaccacagttatcaaccctagatctcaaatacgtctcgcccaaactcaaggattgcgtggaccttgatctcgctgttcctggtacctaccaaagtggcaggcccattatccgaatcatcagtttcgatccaatcctacatgttcttcaaacgaagaagcgaccacggaggatgactttgaagggcagtgacggcagctcctacatgtatgtggtgaagggccacgaagatatccgacaagatgagagagtcatgcagttattcggcctggtcaacactcttctcgataacgatagtgaaagcttcaagcggcatctaacggtgcagcgcttcccggccattcctctgtctcagaactctggtatcatcggctgggtcaccaatagtgacaccctccatgctttgataaaagaataccgggaaacgcggcgtattctcctcaacatcgagcataggatcatgttacagatggctccagactatgacaatctaacgctcatgcagaaggttgaagtatttggctatgcgatggacaacacaaccgggaaggatctgtaccgtgttctgtggttgaagagtaagagctccgaagcctggcttgagcgtcgtaccaactacactcgttcacttggagtcatgtccatggtcggctacatccttggtctaggtgaccgccacccgtccaatcttcttctggacagagtgaccggcaaagtggttcatattgactttggtgactgcttcgaagttgccatgcatcgtgaaaagtatccggagcgcgtgccattccgtttgacgcgtatgttgacgtttgcgatggaagtcagcaacattgaaggaagctaccggatcacttgtgaagctgtcatgcgggtgatacgtgagaacaaggactcgctgatggccgttctggaggcttttattcacgaccctctaatcaactggcgtctgggaattcgcgagtctcctgaccgaatgccatttaacgcggagcgtcgtcaatcgattgtctccaatgtcaacctcgagcacggcgtccaacccagcaacttctctcggcaccgtcggccttcaatccttgaaggtggtattctcgacgctcaagaaggggtgcctaatgaggcacgtgaggctcagaatgcaagagccttacaggtgcttgctcgggtgcgggagaagctgaccggccgggactttaagcctagcgaagagctcaatgttagcgatcaagttgacaagcttcttgcacaggcaactagtgttgagaacatctgtcagcattggattggatggtgcagtttctggtga

SEQ ID NO: 149846 - protein, 2385 aa, Emericella nidulans
MAQAGPITDVTQRLFIELKSKNEETRVRAAYELYENVLAISRDWPPEKFIEFYNAVSQRIAQLVVTGSDAHERIGGLLALDRLIDFDGVDNAQKTTRFASYLRSALRSSDNAVLVYAARALGRLAKPGGALTAELVESEIQSALEWLQSERQEGRRFAAVLVIRELAKGSPTLLYGFVPQIFELIWVALRDPKVLIRETAAEAVSECFEIIAARDIQVRQLWFARIYEEALQGLKSNNVDWIHGSLLVLKELLLKGAMFMNEHYRNACEIVLRLKDHRDPKIRTQVVLTIPILASYAPVDFTETYLHRFMVYLQAQLKKDKERNAAFIAIGKIANAVGVAIAQYLDGIIVYIREGLALKAKNRAAINEAPMFECISMLSLAVGQALSKYMESLLDPIFACGLSESLTQALVDMAHYIPPIKPTIQVKLLDMLSLILDGTPFRPLGCPESRLPPLPSFAKDFTLQELHSDAEIALALHTLGSFDFSGHILNEFVRDVAIHYVENDNPEIRKAAALTCCQLFVHDPIINQTSSHSIQVVSEVIDKLLTVGVGDPDPEIRRTVLWSLDRKFDRHLARPENIRCLFLAVNDEVFAVREAAICIIGRLSSVNPAYVFPPLRKLLVNLLTGLGFASTARQKEESAQLISLFVSNATKLIRSYVDPMVTTLLPKAVDANHGVASTTLKAVGELASVGGSDMKAYLPKLMPIVLDALQDLSSHAKREAALRTLGQIASNSGYVIDPYTDHPHLLAVLIGIIKTEQAGSLRKETIKVLGILGALDPYKYQQISETAPDVHHINEVQVVSDVSLIMQGLAPSNEEYYPTVVIHTLMQNILRENSLAQYHSAVIDAIVTIFKTLGLKCVPFLGQIIPGFISVIRGSPSSRLESYFNQMAILVNIVRQHIRAFLPEIIEVIREFWDTSYQVQATILSLVDAIAKSLEGEFKKYLANLIPPMLDTLEKDNTPRRQPSERILHSFLVFGSSGEEYMHLIVPSIVRLFDRSQNPASIRKSAIDSLTKLSRQVNVSDFASLIVHSLSRVVAGNDRMLRQAAMDCICSLIFQLGQDFNHYIHLLNKVLKHHQVNHVNYQILVTKLQKGDPLPQDLNPDESYAPLADDANYAEIGQKKMVVNQQHLKNAWDASQKSTREDWQEWIRRFSVELLKESPSPALRACASLAGIYQPLARDLFNAAFVSCWTELYDQYQEELVRSIEKALTSPNIPPEILQILLNLAEFMEHDDKALPIDIRTLGKYAAKCHAFAKALHYKELEFEQDQNSGAVEALITINNQLQQSDAAIGILRKAQAYRDVELKETWFEKLQRWEEALAAYKRREKIDPDSFGITMGKMRCLHALGEWKVLSDLAQEKWNQASLEHRKSIAPLAAAAAWGRGQWELMDSYLGVMKEQSPDRSFFGAILAIHRNQFDEAIMYIEKARNGLDTELSALLGESYNRAYNVVVRVQMLAELEEIITYKQNVGDPERQEAMRQTWNRRLLGCQQNVEVWQRMLKVRALVTTPRENLDMWIKFANLCRKSNRMGLAERSLASLETVIPDGNGGTRTISPPEVTYARLKFSWATGRQREALHMLREFTANLTEDFTRFNALVASQSDHNGINGVNGIAEGNHTDIMALRERVGDVNKFRKLLAKSYLRLGEWQTALQRGDWRPEHVREVLNAYSAATRYNRDSYKAWHSWALANFEVVTTIASQASKDGGNLALVPGHIVTEHVIPAIRGFFRSIALSSTSSLQDTLRLLTLWFNHGGDQEVNSVVTEGFTAVNIDTWLAVTPQLIARINQPNFRVRSAVHRLLAEVGKAHPQALVYPLTVAMKSNVARRSQSAGNIMESMRTHSANLVEQADLVSHELIRVAVLWHELWHEGLEEASRLYFGDHNVDGMFATLAPLHEMLDKGAETLREVSFAQAFGRDLAEAKHYCMLYRETEEIGDLNQAWDLYYTVFRKISRQLPQLSTLDLKYVSPKLKDCVDLDLAVPGTYQSGRPIIRIISFDPILHVLQTKKRPRRMTLKGSDGSSYMYVVKGHEDIRQDERVMQLFGLVNTLLDNDSESFKRHLTVQRFPAIPLSQNSGIIGWVTNSDTLHALIKEYRETRRILLNIEHRIMLQMAPDYDNLTLMQKVEVFGYAMDNTTGKDLYRVLWLKSKSSEAWLERRTNYTRSLGVMSMVGYILGLGDRHPSNLLLDRVTGKVVHIDFGDCFEVAMHREKYPERVPFRLTRMLTFAMEVSNIEGSYRITCEAVMRVIRENKDSLMAVLEAFIHDPLINWRLGIRESPDRMPFNAERRQSIVSNVNLEHGVQPSNFSRHRRPSILEGGILDAQEGVPNEAREAQNARALQVLARVREKLTGRDFKPSEELNVSDQVDKLLAQATSVENICQHWIGWCSFW

SEQ ID NO: 149847 - DNA, 7008 bp, Schizosaccharomyces pombe
  CDS (1)..(7008)
atggagtattttagtgatctaaaaaacaaaaatgaaagcattcaactagcagccgctgatcaattaaaagaatttgtacatagttctactaaggaattatcaggtgaatcccttgcgcgtttcaataacgatatcaatcgtcgaatttttgagcttattcatagccatgattcccacgaaagatttggaggaatccttgcgataggcaagctaattgaattcgaaagtgagggagatgttactaatctttcgcggtatgcaaattacttacgaatgacccttcctagtacggattggcattcgatggaactatctgcgaaggttcttggtcatttggctgcgtctggtggtacccttgcagccgaattcgttgaatttgaagttcagcgtgctttcgagtggcttcaaggagaccgtcaagagcaaaaacggatggcggctattttaattattaaggctttagcacaaaattctcctaccttagtttacttgtatattagtgaaattttccaaaatttgtggactggattgcgtgatccaaagcctcttattcgggaaactgctgctgatgctttgggtgcttctttagacgtggtttgtcaaagagaagctaaagttcaattgcagtgttttaatgaagttctgcttcaagctgaacatggtttacgacagtcgagtgtggaatatctgcatggaagtcttctcgcatacaaagagcttttcgaaaaatctggctcttttattcgtgaacattacacagaattttgtgatttggcgcttcgtttacgagagcatagagataactctatcagacgctgcatagtatttttactgcctacattgtctgaatataaccccaaaaaatttcaacagcgttatttagattcttttatggtttacttactttcccatatcaggaaagacaaggaaaagtctttagcttttgaagctattggaagaatagccatggcagtcaatgaagcaatgattccttatttacagaatattttaaaagtaataagggatacattgacagcaaaagtacgtgaaaaaacgcaatatgaaaagcctgtttttgaatgcattggcatgttggctgctgctgtaaagcttgaactccttgaagattctcgaagtctacttggtctgattttttcttgcgaactgagcgttcacttgcgtcaagctcttgtgaaaatggcagaaaacatccctcctcttttggctcctattcaagaacgattattgaatatggttagtcaaattttgactggaaaaaactttgaaattcgtactaatgacacatatactcccagtttcactaatatatactctgctagggaacctgaccaaagaagtaaaagcacggaatcaattattttggctttagaaactttgggtacttttaattttactggttattcattaattagtttcatccaagaatctgtcttatcttacttggaaaatgataattcagagatccgtattgctgctgcacgaacttgctgtcaggtttttgccagagatccgatatgtagaaaaacaaatcctttggctgttgaatcagtcgctgaggtgcttgaaaagctattaacccttggaattgcagatagtgatccaaaaattagggaaaccgtactctcattactagatgaaagatttgatcggcatttggcacatcctgataatattcgttgcttatttatcgctctgaatgatgaagttttttcaatcagagaaattgctatcattattataggaaggcttgcattgtataatccggcccatgtgatgccatcgctacgaaaaactattattcagttattatctgacatggaatattcgggtaatagtcgtcaaaaagaagaaagcgcacagcttctcaaattactggtatccaaagctagaacactcattaagccatatatccaatcgatcattcatgtaatattaccgaaagcagcagatacgagtcctggagtttcatctgccattatatcagctttaggtgaactcgcaagtgttgaaggagaagatatgcctgtggatgttcgtggttccttcatgaagttaatacttgtgaatttacaggatcaaagctctacattgaagcgacttgcttctcttaaatgtttacgaaaactttgtggtcgttcaggttatgtaattcagccatatttagattaccctcctttgttgggcgcgctaattggtattttgcaatcagaacaaccaacaccgataagaagagaagtactgagaacattaggtgtgttaggtgctttagatccatatacgtatttaactactgaggaagtttcagatgatttacaaagtagtcataataatgcccatggtgtacctcaaattagtgccgcgcagtacccgtcattggaaaactacgctatggttgctgttgtcactttgataggtattttaaaagacagttcgctctctatgcatcactcttctgttgttcaagcagtgatgcatatttgctctcaaatgggatctaaatctactgtatttttacctcaagtggtaccaacgtttctacaagtaatgcaatccttatcggcttcctcggctgagttttattttcagcagttaacgactttaacttctattattggaccaaacattagggattatgtatctgatatttttaatctttcaaaagtcttttgggaatctaccacatctctattgctagttattcttgaactcatcgatgccatagcaattgcactgcaggatgaatttaaattttacttgcctcaaatattatcttgtatgttgaaagcattttcccttgataatacgtcttcccgttccgtttcatacaaagttttacaatcatttgttatatttggttctaatattgaagaatacatgcatcttgttctaccagttataattagaagttttgagcgtgatactataccccttggattcaggaagagtgccctcaaatgcattgcccaattatttcaatctgttaatttctcggatcatgcctctcgaatcattcatccattggttcgcatgctagggaaatctaatggcgatttgagagcagttattatggatactctttgtgctatagtatcgcaacttgggtatgattattcgatttttataccgatggtgaataaagttttggttagtcacaagataagtcatccggcttacgaacttttggtttcacgacttttgaaaggtgagcctctacccaaagatgtcgtagtaaaggagtttaagccgaggccctcaacaaagcctttttctacacaagatgaagtcttgacaaagcttcctgttgatcaagcatccttgaaagcagcatgggaatcatcacaaaaattgacaagggatgattggcaggactggataagaagaataagtattgaacttctgaaggaatccccttcttcggcacttaggtcttgttcgaccttagctggtatataccatccattggctcgcgatttatttaatgtcagttttttgtcttgttgggatgagttaactgaaagcaataagaaaaatctcgttaaatcaatagagctcgctatgaatgcccctaacatttcagtagaaatattacagactctgttaaatcttgctgagtatatggagcgtgaagatcatacattaccaattcctatcaaagtaattagtgctcatgcatctaagtgtaatgtttatgccaaggctctgcattatacagaattacaattcgttcaagagacgaaagaggaagttagcattagcactatcgagtctctcattaccataaacaatcatctgcaacaatccgatgccgctgtaggtatgcttcaatataccaaagaacacaagcagtttagtttgaaagaaacttggtatgaaaaattacatagatgggatgatgcattagctgcatatgagcatcgagaacgtgaaggtgactcgtctttcgagataaatatcggaaaattacgctgttattatgctttgggtgactgggatcacctttccgaattggcacaaaaagcttgggtaacgtctgaacaagaacatcgtgaagctattgctccacttgcagctgccgctgcttggggtttgggtcaatggaatttaattagtgaatatgttagtgccatggaccgtgacccacaagataaagagtttttttccgctattagtgctgtacatcttggtcaatacaataaggcgtatggccatatcgagagacatcgtgatatattagtaaacgacctttcttccataatcggtgaaagctataatcgtgcatatggtattatggtcaaatcccaaatgctttcggaacttgaagaaattattgactataaaaagaatatgcaatatgaaaacaatttggactctcttaaaaaaacgtggcggaaaaggcttgaaggatgtcagaaaaatgtggatgtttggcataatacgcttcggtttagggctctggtattgtctccacaagattctcctgaaatgtggataaaattagctgatctttgccgtcgttctgaccggttgaagctttcaaatcagtgtctcacatatttgatgggtcgcgatccttcaaatgcttacccgcttgactcacttaagcttctcaatcctcatgttgtatatacgtatttaaaatatttgtgggctacagatcaaaaaaatattgcggtatcggagctcgaagagttcacctcatatctatcgtcaaaacatgggtataaaatgggtgattcttcaaagttggttgatattttagcctcatcatctgtaagttcggaagagcgttcgtttttagcaaggtgttttcataaacttggcaaatggaaaaagtctcttcaagatagtgttaatcaagaaagcgtaagggatattttgaattgttatttttatgctactttgttcgataaatcgtggtataaagcttggcactcttgggctctcgcaaatttcgaagtcgttggttattatgaacagactgaacatggggttacccaagatatgtatgaacaatatattgtacctgctattaaaggattttttcactcttctgttttaaatcaaaaaaactcacttcaggatatattgcggttacttaatttatggtttaaattcggtgagcacagcgacgtagcagccgcaattgttgaaggattttccaatgttccaatggatacatggttagaagttataccacaactaattgcacgaatacacacttcaagttcttcagttagagcatctgttcatcagttactttccgatattggtagggtgcatcctcaggcattggtgtattcacttactgtgtcctccaaatctacaaatccgcagcagaagcattcagcaaaatcaattatggatagcatgctttcgcatagtgatacgttggttcgtcaagctctacttgttagtcaagagctaattagagttgctatactttggcatgaattatggtatgaaggattagaggaagcttctcaagcttatttttcagatcacgatatatctttaatgattgatattgtgaaacccctgcatgaaacattggagaagggtccttccaccttgtctgagatatcatttgctcagacatttgggtatgatttacgtaaagctagaagttactggcagaaatttttgcaagatggtgaccctacggaattaaatcagtcttgggatttgtattatcaagtctttagacgtattcaaaagcaattaccacggattaagcatttggagctacaatatgtttcccctaagttattggatgcttgtgatttggaactagctgtgcctggaacctatggtcataacaaaccggtcattcggatctcgcatttccatcacactttcgaagttatttcttctaagcaaaggccaagaagattgacaattcatggtagtgatggcaaagattatcagtatgtccttaagggtcatgaagatttgaggcaagatgaacgagttatgcagctttttggtttatgtaatacgttactgactacggattctgagacattcaaacgacgtctgaatatagagcgttatacagttattccgctatctcccaattctggtttgctggggtgggttccgcatagtgatacattacatttcctgatcaaagagtttcgctcaaagcgtaacatattgttaaatttagagcatcgcatgatgcttcaaatggcacccgactgcgacagtttaacattattgcaaaaactagaagtattcgaatatgttatggctaatactgatggttatgatttgtatcatgtgttgtggcttaaaagtcgaagttcagaagcatggcttgataggagaaccagctatactcaaagcttggcagtcatgtcaatggttggatatatacttggacttggtgaccgacatccttccaatctaatgatggatcggtattctggtaagatcattcatattgactttggtgattgttttgaggttgccatgcatagagaaaaatttcctgagaaaataccgtttcgacttactcgaatgcttattaatgctatggaggttagcggtatccaaggtacttacaaaattacttgcgagcttgttatgcgtgttttaagatcaaatacggagtctttaatggcagttcttgaagcatttgtctatgaccctttgattaattggagacttatgactaaaagctctttcggggcttctacgacactccggcctacctcaagtagtgtagaagagaaaggaaggtcctacactcatcgtgcgcgtcacgctgattatgcagctcttagtgaaacaaatggtgtaaacgccgaaggactcaacgagagatctattcaagtcttgaagcgtgtctcaaataagctaactggtaaagatttcgatttgaaagagcaattgccagtcaaagcgcaagttgaaaagcttatccaacaagctacagctcccgaaaatctttgccgttgttatgtaggatggtgtagtttttggtaa

SEQ ID NO: 149848 - protein, 2335 aa, Schizosaccharomyces pombe
MEYFSDLKNKNESIQLAAADQLKEFVHSSTKELSGESLARFNNDINRRIFELIHSHDSHERFGGILAIGKLIEFESEGDVTNLSRYANYLRMTLPSTDWHSMELSAKVLGHLAASGGTLAAEFVEFEVQRAFEWLQGDRQEQKRMAAILIIKALAQNSPTLVYLYISEIFQNLWTGLRDPKPLIRETAADALGASLDVVCQREAKVQLQCFNEVLLQAEHGLRQSSVEYLHGSLLAYKELFEKSGSFIREHYTEFCDLALRLREHRDNSIRRCIVFLLPTLSEYNPKKFQQRYLDSFMVYLLSHIRKDKEKSLAFEAIGRIAMAVNEAMIPYLQNILKVIRDTLTAKVREKTQYEKPVFECIGMLAAAVKLELLEDSRSLLGLIFSCELSVHLRQALVKMAENIPPLLAPIQERLLNMVSQILTGKNFEIRTNDTYTPSFTNIYSAREPDQRSKSTESIILALETLGTFNFTGYSLISFIQESVLSYLENDNSEIRIAAARTCCQVFARDPICRKTNPLAVESVAEVLEKLLTLGIADSDPKIRETVLSLLDERFDRHLAHPDNIRCLFIALNDEVFSIREIAIIIIGRLALYNPAHVMPSLRKTIIQLLSDMEYSGNSRQKEESAQLLKLLVSKARTLIKPYIQSIIHVILPKAADTSPGVSSAIISALGELASVEGEDMPVDVRGSFMKLILVNLQDQSSTLKRLASLKCLRKLCGRSGYVIQPYLDYPPLLGALIGILQSEQPTPIRREVLRTLGVLGALDPYTYLTTEEVSDDLQSSHNNAHGVPQISAAQYPSLENYAMVAVVTLIGILKDSSLSMHHSSVVQAVMHICSQMGSKSTVFLPQVVPTFLQVMQSLSASSAEFYFQQLTTLTSIIGPNIRDYVSDIFNLSKVFWESTTSLLLVILELIDAIAIALQDEFKFYLPQILSCMLKAFSLDNTSSRSVSYKVLQSFVIFGSNIEEYMHLVLPVIIRSFERDTIPLGFRKSALKCIAQLFQSVNFSDHASRIIHPLVRMLGKSNGDLRAVIMDTLCAIVSQLGYDYSIFIPMVNKVLVSHKISHPAYELLVSRLLKGEPLPKDVVVKEFKPRPSTKPFSTQDEVLTKLPVDQASLKAAWESSQKLTRDDWQDWIRRISIELLKESPSSALRSCSTLAGIYHPLARDLFNVSFLSCWDELTESNKKNLVKSIELAMNAPNISVEILQTLLNLAEYMEREDHTLPIPIKVISAHASKCNVYAKALHYTELQFVQETKEEVSISTIESLITINNHLQQSDAAVGMLQYTKEHKQFSLKETWYEKLHRWDDALAAYEHREREGDSSFEINIGKLRCYYALGDWDHLSELAQKAWVTSEQEHREAIAPLAAAAAWGLGQWNLISEYVSAMDRDPQDKEFFSAISAVHLGQYNKAYGHIERHRDILVNDLSSIIGESYNRAYGIMVKSQMLSELEEIIDYKKNMQYENNLDSLKKTWRKRLEGCQKNVDVWHNTLRFRALVLSPQDSPEMWIKLADLCRRSDRLKLSNQCLTYLMGRDPSNAYPLDSLKLLNPHVVYTYLKYLWATDQKNIAVSELEEFTSYLSSKHGYKMGDSSKLVDILASSSVSSEERSFLARCFHKLGKWKKSLQDSVNQESVRDILNCYFYATLFDKSWYKAWHSWALANFEVVGYYEQTEHGVTQDMYEQYIVPAIKGFFHSSVLNQKNSLQDILRLLNLWFKFGEHSDVAAAIVEGFSNVPMDTWLEVIPQLIARIHTSSSSVRASVHQLLSDIGRVHPQALVYSLTVSSKSTNPQQKHSAKSIMDSMLSHSDTLVRQALLVSQELIRVAILWHELWYEGLEEASQAYFSDHDISLMIDIVKPLHETLEKGPSTLSEISFAQTFGYDLRKARSYWQKFLQDGDPTELNQSWDLYYQVFRRIQKQLPRIKHLELQYVSPKLLDACDLELAVPGTYGHNKPVIRISHFHHTFEVISSKQRPRRLTIHGSDGKDYQYVLKGHEDLRQDERVMQLFGLCNTLLTTDSETFKRRLNIERYTVIPLSPNSGLLGWVPHSDTLHFLIKEFRSKRNILLNLEHRMMLQMAPDCDSLTLLQKLEVFEYVMANTDGYDLYHVLWLKSRSSEAWLDRRTSYTQSLAVMSMVGYILGLGDRHPSNLMMDRYSGKIIHIDFGDCFEVAMHREKFPEKIPFRLTRMLINAMEVSGIQGTYKITCELVMRVLRSNTESLMAVLEAFVYDPLINWRLMTKSSFGASTTLRPTSSSVEEKGRSYTHRARHADYAALSETNGVNAEGLNERSIQVLKRVSNKLTGKDFDLKEQLPVKAQVEKLIQQATAPENLCRCYVGWCSFW

SEQ ID NO: 149849 - DNA, 7014 bp, Schizosaccharomyces pombe
  CDS (1)..(7014)
atgaaagaatttcctgggttgaaaagcaggaatgaagaaattcgcaataaagcggcaaatgatctttatgaatatgttatagcttattctcgagaattatcgggcgaagctttagttcagtttaacaatgatgttaacaagtacgtttatactttaattcacagtaccgatccactcgatcgtctggcaggcgtaactgccataaatcgtctaattgattatgaaggagaagatactacaaggattactagatttgcaaattatttgcgtattattcttccaggaactgaccaaaaagccaccgttcttgctgcaaaagctttagggagacttgcagttcctggaggtgctctaacttctgaatttgtgaacttcgaagttaaacgcgctttggaatggcttcaaggagaacgtaatgaaaatcgtagatatgcagcagtgcttatacttaaggagcttgccaaaaatacgtctacattaatctatgctcatatcgattcaatttttgagcttttatggcatggacttcgggatccaaaagttactattcgaatagcttcggctgatgcgttgagtgagttcttgaaaatcgttaggcaaagggattcatccatccgtctccaatggtatacaagtattctcaatgaagctcaacgtggtgttgcacagggttcttctgattacattcatggtagtttactagtatatcgccaattatttttaaaagctggaatgtttatgcatgagaggtatcgagaagtatcggacattatattgcaattcagagatcacaaagatttgcttattcgcaaaaccgttacagaattgattgctacactcgcagcttataatccagatgaatttgtttccaattatttacacgtttgtatgctccatctacttaatctattaaaaaaagaaaatgttaagatgttggcgtttgccactattggaaaagttgccgtggctattactaatagcataatcccatatcttgaccccatatgcgattcaatcaaggaaagtctaaaaatccatatccgtaataaaagtgcttcggatgctgcaatttttcaatgcattagcctactttctatagcactaggacaagccttttcaaactatgcgtatgacctctttgacttaatatttgcaagcggactttctgaggcttcttaccgtgctctctcagatctggcccataatatacctccattattaccagtcatacaggaacgactattagatatgctcagcaaaattctaagtggtcgtccttttattcctccaggatgtcctccccaatatgtagcaagatctttaaaatcttcaaagagtgcttccctgaagacaggattttttcccaatgacgtctatattttggctctaaaagttttgggaaattttgacttctccggttatattcttaatgaatttgtgaaggattgtgtagttgtataccttgaaaacaatgacccggaagtacgcaaaaccgcctccataacctgctcccaactatttgctcgtgatcctattttatcgcagactagtgatcatgcgattcaagtagttgccgaagtgctagaaaagcttctaacagttggtatttgcgatactgttccagatattcggctaactgttcttaattctctcgattctcgctttaacaagcatttagcccaagcagataaaattcgtttactttttattgctattaatgatgaaaactttgctgtacgagaatctgcattacggataattggaagactaaatgtctataaccctgcctatgtgatgccatatttaaggaaaataatgttaaaaactttaacaatattggactattctacaattatcagaactaaagaagagaatgccaagttattgtgtttattaattgcagcagctcctcgcttaatagagtcacatgtggaaccaatactgcaaatacttttacccaaagctaaagattctagttcaattgtggcagctagtattgttaattcgcttggtgaaatatgccaaatcagcggtgaggttattgttccttttattaaagacttaatgccgctaataattgaggctttgcaggaccaaagttctcctattaggagagcagcggctttaaaggctttgggtaatttatcaagcagcaccggatatgtaattgatccgtatattgaattcccttctttacttgatatacttattggcataacgaaaaccgaacaagatattactattcgtcgagagactattaaactaataggtacacttggtgctttagatcccaataggcatcgtgttttagaaaagggaacagaaaaagtagttccagaacagaaaaacattcctcctgacatttctttgctgatgtcgggcattggtccatcatccgatgaatattaccccacagtcgtgattactgctttgatgagtatattaaaagacccgtccttaactattcaccatactgctgttattcaagctgtaatgtatatattcaagaccatgggtctcagatgtgccccctttctttcccaaattattccagaatttatcgcagttatgagaacgtgtcctacgaacatattggagttttattttcagcaactaagtattttggtccttattgttcgtcagcacatacgaagttttttaccagatttatttaagcttatcaaagatttttggaacccgcattctaatttacaatttacaattttgtcgctaattgaatcactggctagagcaatgcagggagagttcaagccatacttaccatctttattagtaatgatgctacaaatatttgactctgatgtatcagtggactcagtcagtacaaaaaaggtattgcacgcattcatcgtcttcggtgatacattagctgattattttcatatgctcttggatccaatacttcgactgtatgagcgaaatgatgtttcaatcggtataaaagaaagtataatgattacaattggacgactttcaatggttattaatctctcggaatatgcatcaagaattatacatcctgttatgcgtatgctttcgtgcaacaatgcctctctcattcgcgtgagtatggatactgtatgtgcgcttatatatcaacttaatgttgattttgctattttcattccaatgattgataagtgccttaagatgaatggcgttactcatgaaacctactcgatacttgttgaacaatttttacaagaacagcctcttcctataaaactcaacccttatgaaaaatacgataagcctaaattagatgtggtagcttccgctgctgatataacctctaaaaagcttcctgtaaatcaagaaatcctcagaaatgcgtgggaagcatctcaacgatcgactaaggatgactggcaagaatggatccgacgattaggcgtagctctcttaagagaatcaccttcacatgccttacgagcatgtgctgctttggctgctgcctatcaacctttagccagggacttatttaacgctagttttgtttcttgttggtctgaattatatgatcactttcaagaagaattagttaagtcgattgagatagctttaacgtcgccacacatatctcctgaaattattcagattttactcaatcttgcggaatttatggagcatgatgataaaccacttccgattgatattcgtactttgggtgcctatgcagctaaatgccatgcgtttgctaaggctttacattacaaggagctagaattcattgaagaagaattggtgacaaaaccttcggttgatacaattgaggccctaatttcaatcaataatcaactccaacaaccagacgcagctattggaatacttaaacatgctcagcagcatgacaaaatgaatcttaaagaaacttggtacgaaaagttacaaaggtgggaagatgctctgtcagcttatgaaaaaagagaagctgctggcgctggcaatttcgaaataacgatgggcaaacttcgttgtttacacgctttgggtgaatgggatcgattatctcagttagctcaagaaaattggattcatgctggtcatgatgcgcgacggtatattgcaccgctttccgtagccgctgcttgggggttaggtcaatgggagcaaatggatgaatatatttctgttatgaagtctgagtcaccagataaagctttttttaacgcgattgtggctctacatcgatcacaatttgaagaagcagcttcttatatcaccagagctcgagatttacttgatactgagcttactgcgcttgttggtgaaagttataatagggcttacagcgttgctgtccgtgttcaaatgttatccgaattagaagaaatcattacctataaaaaagccgaggacaaacccgaagttcgtgaaatgataaagaagacatgggttagacgtttgaaaggctgtcagagaaatgtggatgtttggcaaagaatgttaagaatacgatctttagttatttcaccccgtgataacatggagatgtggatcaaattcgctaatctctgcagaaaatctggtaggatcagtctagcgaaaaaatcacttaatttactccttgaagacgacgaaaacttagataattcactcgtcttaaagaagactcacccttcaattgtctatgcaaatctaaagtttttgtgggctgttgacgataaaaggaaggctcttaatagcatgcaagagtttacttctcagctaatttctgacattaatgttgaccctgctctttttgttcaatctacatcagttaatactcaaaaatcacaagaagaaattcaatattattttcatcttctagctagatgttatcacaagcaaggtcaatggcagcaagaaattgagaataattggtcagaaggatcttttgatggagttcttcaatcatatatgtatgctacgcaatttgattctaaatggtataaagcttggcactcttgggcattagctaatttcgaagctgtaaagtttttggagcaatcagaggagcaaatcccaagtgctgcatatgagcagtatattattccagcagtcaaaggcttttttaagtcaattgctttaagcaaaggtaaccttcaggacaccttgcgccttcttaatctttggtttaaattcggcaataatagcaatgtaattaatactttgaacgttggtatatccactgtgaacatcgatatctggctggacgttatacctcagcttattgcgagaattcatgcctcctctttgagtgttcgtaaatctgtgcatcagttgctttccgatgtaggtcgcgcgcatccccaagctcttgtttatcctttaactgtagcagcaaaatcgcagagttctgctaggcaaaacgctgctttagcaattatggattccttgaaaacacatagtccacgtctagttgaacaagcaagacttgttagtcatgagcttatcagagctgcaatcctttggcatgaacaatggcatgaaggattggaagaggcttcacgattgtattttggtgatcataacattgagggtatgtttgccgtgttgagaccattgcatgaaatgttggaacgtggtccggaaacgcttcgtgaaatttctttccaacaagcctttggacgtgacttagtcgaagcaagggattgttgtatccgttttgagcaaactggtgatatatcagacttaaatcaggcctgggacttatattaccaagttttcaagaaaattcgtaaacagctacctcagttgacaacattagatttacaatacgtttctcctaaactcttacatgtacatgatcttgagttagctgttccgggaacatacgttagcgggaaacctgttataagaattgtaaagttttaccctacattcaacgtgataacatctaagcaacgtccgagacgactgagtattaaaggcagtgatggaaaagattatcaatatgttttaaagggtcacgaggacatcagacaagatgaacgtgttatgcagctatttgggctttgtaacaatctgttactagctgacccggaaacttttaagcgcttactttcaatccaaaggtatccagtgattcctttatcaccggattcaggccttttaggctgggttttggatagcgatactttgcatgtcttaattcgtgactacagagaaagcagaaagattttactcaacatagaacataggttgatcattcagatggctccagattacgatcgtctcactctccttcagaaagttgaagtctttgaatatgccctacttagtactacggggcaggatttataccgcgttttatggctgaagagtcgtagctcagaagcttggcttaataggcgaactaactattctcgtactcttgcggtgatgtcaatggtagggtacatcttaggtttgggcgatcgtcatccttccaatttgatgctggacaggtatacaggtaatatcatccatatcgattttggagattgttttgaagtagcaatgcatcgagaaaagtttcccgagaagattcctttccgccttacgcgaatgcttgttaacgcaatggaagttagtggtatagaggggacgttccggataacatgcgaacatgttatgcgagttcttcgtactaataaggagtctgtgatggcagttttagaagctttcgtttacgatcctcttattaactggcgccttgctcctgcatattcaccttctatcgatgaaaagcaatctaacgaacctaatacacttctcggtgagacaattgatggtttacaccggaaacgcttaaacgaagaaggaattacacttgaagaacgtcaaaaacccgagatactcaatcaaagagctataaccgttcttaatcgtgtgtccaataaacttactggtcgggatttcaaaccccaacagcaattggatgtaccaagtcaagtagagaagctgattttacaagcaacctctatagagaacctatgcttgtgctatattggctggtgtagtttctggtag

SEQ ID NO: 149850 - protein, 2337 aa, Schizosaccharomyces pombe
MKEFPGLKSRNEEIRNKAANDLYEYVIAYSRELSGEALVQFNNDVNKYVYTLIHSTDPLDRLAGVTAINRLIDYEGEDTTRITRFANYLRIILPGTDQKATVLAAKALGRLAVPGGALTSEFVNFEVKRALEWLQGERNENRRYAAVLILKELAKNTSTLIYAHIDSIFELLWHGLRDPKVTIRIASADALSEFLKIVRQRDSSIRLQWYTSILNEAQRGVAQGSSDYIHGSLLVYRQLFLKAGMFMHERYREVSDIILQFRDHKDLLIRKTVTELIATLAAYNPDEFVSNYLHVCMLHLLNLLKKENVKMLAFATIGKVAVAITNSIIPYLDPICDSIKESLKIHIRNKSASDAAIFQCISLLSIALGQAFSNYAYDLFDLIFASGLSEASYRALSDLAHNIPPLLPVIQERLLDMLSKILSGRPFIPPGCPPQYVARSLKSSKSASLKTGFFPNDVYILALKVLGNFDFSGYILNEFVKDCVVVYLENNDPEVRKTASITCSQLFARDPILSQTSDHAIQVVAEVLEKLLTVGICDTVPDIRLTVLNSLDSRFNKHLAQADKIRLLFIAINDENFAVRESALRIIGRLNVYNPAYVMPYLRKIMLKTLTILDYSTIIRTKEENAKLLCLLIAAAPRLIESHVEPILQILLPKAKDSSSIVAASIVNSLGEICQISGEVIVPFIKDLMPLIIEALQDQSSPIRRAAALKALGNLSSSTGYVIDPYIEFPSLLDILIGITKTEQDITIRRETIKLIGTLGALDPNRHRVLEKGTEKVVPEQKNIPPDISLLMSGIGPSSDEYYPTVVITALMSILKDPSLTIHHTAVIQAVMYIFKTMGLRCAPFLSQIIPEFIAVMRTCPTNILEFYFQQLSILVLIVRQHIRSFLPDLFKLIKDFWNPHSNLQFTILSLIESLARAMQGEFKPYLPSLLVMMLQIFDSDVSVDSVSTKKVLHAFIVFGDTLADYFHMLLDPILRLYERNDVSIGIKESIMITIGRLSMVINLSEYASRIIHPVMRMLSCNNASLIRVSMDTVCALIYQLNVDFAIFIPMIDKCLKMNGVTHETYSILVEQFLQEQPLPIKLNPYEKYDKPKLDVVASAADITSKKLPVNQEILRNAWEASQRSTKDDWQEWIRRLGVALLRESPSHALRACAALAAAYQPLARDLFNASFVSCWSELYDHFQEELVKSIEIALTSPHISPEIIQILLNLAEFMEHDDKPLPIDIRTLGAYAAKCHAFAKALHYKELEFIEEELVTKPSVDTIEALISINNQLQQPDAAIGILKHAQQHDKMNLKETWYEKLQRWEDALSAYEKREAAGAGNFEITMGKLRCLHALGEWDRLSQLAQENWIHAGHDARRYIAPLSVAAAWGLGQWEQMDEYISVMKSESPDKAFFNAIVALHRSQFEEAASYITRARDLLDTELTALVGESYNRAYSVAVRVQMLSELEEIITYKKAEDKPEVREMIKKTWVRRLKGCQRNVDVWQRMLRIRSLVISPRDNMEMWIKFANLCRKSGRISLAKKSLNLLLEDDENLDNSLVLKKTHPSIVYANLKFLWAVDDKRKALNSMQEFTSQLISDINVDPALFVQSTSVNTQKSQEEIQYYFHLLARCYHKQGQWQQEIENNWSEGSFDGVLQSYMYATQFDSKWYKAWHSWALANFEAVKFLEQSEEQIPSAAYEQYIIPAVKGFFKSIALSKGNLQDTLRLLNLWFKFGNNSNVINTLNVGISTVNIDIWLDVIPQLIARIHASSLSVRKSVHQLLSDVGRAHPQALVYPLTVAAKSQSSARQNAALAIMDSLKTHSPRLVEQARLVSHELIRAAILWHEQWHEGLEEASRLYFGDHNIEGMFAVLRPLHEMLERGPETLREISFQQAFGRDLVEARDCCIRFEQTGDISDLNQAWDLYYQVFKKIRKQLPQLTTLDLQYVSPKLLHVHDLELAVPGTYVSGKPVIRIVKFYPTFNVITSKQRPRRLSIKGSDGKDYQYVLKGHEDIRQDERVMQLFGLCNNLLLADPETFKRLLSIQRYPVIPLSPDSGLLGWVLDSDTLHVLIRDYRESRKILLNIEHRLIIQMAPDYDRLTLLQKVEVFEYALLSTTGQDLYRVLWLKSRSSEAWLNRRTNYSRTLAVMSMVGYILGLGDRHPSNLMLDRYTGNIIHIDFGDCFEVAMHREKFPEKIPFRLTRMLVNAMEVSGIEGTFRITCEHVMRVLRTNKESVMAVLEAFVYDPLINWRLAPAYSPSIDEKQSNEPNTLLGETIDGLHRKRLNEEGITLEERQKPEILNQRAITVLNRVSNKLTGRDFKPQQQLDVPSQVEKLILQATSIENLCLCYIGWCSFW

SEQ ID NO: 149851 - DNA, 7800 bp, Saccharomyces cerevisiae
  CDS (246)..(7670)
aatagagactgacatatatggcagcaattaaaattggaagaaatgtaatgacagtaggaaagaccaatttttatcatcgtgacaccaatcacttccttaactgagctttacttgtatttatttacaggtagattaggagcagtagaaagggaaaatataccgggtgcataaagagcatagtcattaagatcaaatagttatctttctcaaagagatttctgatctttactttccccatatgaaaaatgaataaatacattaacaaatacaccacgccacctaacttattgtctttacgacaaagggccgaaggcaaacacagaacaagaaagaaacttacacacaaatcgcactcccacgatgatgagatgtcaactacttcaaacacagattccaatcacaatgggcccaatgactctggtagagtgatcactggttctgctggtcatattggtaaaatatcctttgtagattcagaactagatacaacattttctactttaaatttgatttttgataaacttaaaagcgatgtgccacaagaacgagcctctggcgctaatgaattaagcactactttgacctcattagcaagggaagtatctgctgagcaatttcaaaggtttagcaacagtttaaacaataagatatttgaacttattcacgggtttacttcaagtgagaagataggtggtattcttgctgttgatactctgatctcattctacctgagtacagaggagctgccaaaccaaacttcaagactggcgaactatttacgtgttttaattccatccagtgacattgaagttatgagattagcggctaacaccttaggtagattgaccgtgccaggtggtacattaacatcagatttcgtcgaatttgaggtcagaacttgcattgattggcttactctgacagcagataataactcatcgagctctaagttggaatacaggagacatgctgcgctattaatcataaaggcattagcagacaattcaccctatcttttatacccttacgttaactctatcttagacaatatttgggtgccattaagggatgcaaagttaattatacgattagatgccgcagtggcattgggtaaatgtcttactattattcaggatagagaccctgctttgggaaaacagtggtttcaaagattatttcaaggttgtacacatggcttaagtctcaatacgaatgattcagtgcatgctactctgttggtatttcgagaattactcagcttgaaagcaccttatctcagggataaatatgatgatatttacaaatctactatgaagtacaaggaatataaatttgatgttataaggagagaagtttatgctattttacctcttttagctgcttttgaccctgccattttcacaaagaaatatctcgataggataatggttcattatttaagatatttgaagaacatcgatatgaatgctgcaaataattcggataaaccttttatattagtttctataggtgatattgcatttgaagttggttcgagcatttcaccctatatgacacttattctggataatattagggaaggcttaagaacgaaattcaaagttagaaaacaattcgagaaggatttattttattgcattggtaaattagcttgtgctttgggcccagcttttgctaagcacttgaacaaagatcttcttaatttgatgttaaactgtccaatgtccgaccatatgcaggagactttaatgatccttaacgagaaaataccctctttggaatctaccgttaattcgaggatactaaatttactgtcgatatccttatctggtgaaaaatttattcaatcaaaccaatacgattttaataatcaattttccattgaaaaggctcgtaaatcaagaaaccaaagtttcatgaaaaaaactggtgaatctaatgacgatattacagatgcccaaattttgattcagtgttttaaaatgctgcaactaattcatcatcaatattccttgacggagtttgttaggcttataaccatttcttacattgagcatgaggattcgtctgtcagaaaattggcagcattaacgtcgtgtgatttatttatcaaagacgatatatgtaaacaaacatcagttcatgctttacactcggtttctgaagtgctaagtaagctattaatgatcgcaataactgatccggttgcagaaattagattggaaattcttcagcatttggggtcaaattttgatcctcaattggcccaaccagacaatttacgcctacttttcatggcgctgaacgatgagatttttggtattcaattggaagctatcaaaataataggcagattgagttctgtcaaccccgcttatgtagttccttctttgaggaaaactttactggaactattaacgcaattgaagttctcaaatatgccaaaaaaaaaggaggaaagtgcaactctattatgtacgctgataaattccagcgatgaagtagcgaaaccttatattgatcctattctagacgtcattcttcctaaatgccaggatgcttcatctgccgtagcatccaccgctttaaaggttttgggtgaactatctgttgttggaggaaaagaaatgacgcgttacttaaaggaattgatgccattgatcattaacacatttcaggaccaatcaaactcttttaaaagagatgccgccttaacaacattaggacagctggctgcttcctctggttatgttgttggccctttactagactacccagagttacttggcattttgataaatattcttaagactgaaaacaaccctcatatcaggcgtggaactgttcgtttgattggtatattaggcgctcttgatccatataagcacagagaaatagaagtcacatcaaactcaaagagttcagtagagcaaaatgctccttcaatcgacatcgcattgctaatgcaaggggtatctccatccaacgatgaatattaccccactgtagttatccacaatctgatgaagatattgaatgatccatcgttgtcaatccatcacacggctgctattcaagctattatgcatatttttcaaaaccttggtttacgatgtgtctcctttttggatcaaattattccaggtatcattttagtcatgcgttcatgcccgccgtcccaacttgacttttattttcagcaactgggatctctcatctcaattgtcaagcaacatattaggccccatgtcgagaaaatttatggtgtgatcagggagtttttcccgatcattaaactacaaatcacaattatttctgtcatagaatcgatatctaaggctctggaaggtgagtttaaaagatttgttcccgagactctaacctttttccttgatattcttgagaacgaccagtctaataaaaggatcgttccgattcgtatattaaaatctttggttacttttgggccgaatctagaagactattcccatttgattatgcctatcgttgttagaatgactgagtattctgctggaagtctaaagaaaatctccattataactttgggtagattagcaaagaatatcaacctctctgaaatgtcatcaagaattgttcaggcgttggtaagaattttgaataatggggatagagaactaacaaaagcaaccatgaatacgctaagtttgctccttttacaactaggtaccgactttgtggtctttgtgccagtgattaacaaggcgttattgaggaataggattcagcattcagtgtacgatcaactggttaataaattactgaacaatgaatgcttgccaacaaatatcatatttgacaaggagaacgaagtacctgaaaggaaaaattatgaagacgaaatgcaagtaacgaaattaccggtaaaccaaaatatcctaaagaatgcatggtattgttctcaacagaagaccaaagaagattggcaagaatggataagaaggctatctattcagcttctaaaggaatcaccttcagcttgtctacgatcctgttcgagtttagtcagcgtttattatccgttggcgagagaattgtttaatgcttcattctcaagttgctgggttgagcttcaaacgtcataccaagaggatttgattcaagcattatgcaaggctttatcatcctctgaaaacccacccgagatttatcaaatgttgttaaatttagtggaatttatggagcacgatgacaaaccattgcctatcccaatccatacattaggtaagtatgcccaaaaatgtcatgcttttgcgaaggcactacattacaaagaggtagaattcttagaagagccgaaaaattcaacaatcgaggcattgattagcattaataatcaacttcaccaaactgattctgctattggtattttgaagcatgcgcaacaacacaatgaattgcagctgaaggaaacttggtatgaaaaacttcaacgttgggaggatgctcttgcagcatataatgagaaggaggcagcaggagaagattcggttgaagtgatgatgggaaaattaagatcgttatatgcccttggagagtgggaagagctttctaaattggcatctgaaaagtggggcacggcaaaacccgaagtgaagaaggcaatggcgcctttggctgccggcgctgcctggggtttggagcaatgggatgaaatagcccagtatactagcgtcatgaaatcgcagtctccagataaagaattctatgatgcaattttatgtttgcataggaataattttaagaaggcggaagttcacatctttaatgcaagggatcttctagttactgaattgtcagctcttgttaatgaaagctacaatagagcatataatgttgttgttagagcgcagattatagcagagttggaggaaatcatcaaatataagaagttgccacaaaattcagataaacgtctaactatgagagaaacttggaataccagattactgggctgtcaaaaaaatattgatgtgtggcaaagaattctgcgtgtcagatcattggtgataaagccaaaggaggatgctcaagtgaggattaagtttgccaacttatgcagaaaatcgggtaggatggcgctagctaaaaaagtcttaaatacattgcttgaagaaacagatgacccagatcatcctaatactgctaaggcatcccctccagttgtttatgcacaactgaagtacttgtgggctacggggttgcaagatgaggctttgaagcaattaattaatttcacatctagaatggctcatgatttaggtttggatccaaataatatgatagctcaaagcgttcctcaacaaagcaaaagagtccctcgtcacgttgaagattatactaagcttttagctcgttgtttcttgaagcaaggagaatggagagtttgcttacagcctaaatggagattgagcaatccagattcgatcctaggctcctatttgctcgctacacattttgacaacacatggtacaaagcgtggcataactgggcactggccaattttgaagtcatttctatgctaacatctgtctctaaaaagaaacaggaaggaagtgatgcttcctcggtaactgatattaatgagtttgataatggcatgatcggcgtcaatacatttgatgctaaggaagttcattactcttctaatttaatacacaggcacgtaattccagcaattaagggtttttttcattccatttctttatcagaatcaagctctcttcaagatgcattaaggttattaactttatggtttacttttggtggtattccagaagcaacccaagctatgcacgagggtttcaacctaatccaaataggcacatggttagaagtgttgccacagttaatttctagaattcatcaacccaatcaaattgttagtaggtcattactctccctattatctgatctaggtaaggctcatccgcaggcattagtgtaccccttaatggttgcgattaaatccgaatctctctcacgacagaaagcagctttgtccatcatagaaaagatgagaatacatagtccagttttggtcgaccaggctgaacttgtcagccacgaattgatacgtatggcggtgctttggcatgagcaatggtatgagggtctggatgacgccagtaggcagttttttggagaacataataccgaaaaaatgtttgctgctttagagcctctgtacgaaatgctgaagagaggaccggaaactttgagggaaatatcgttccaaaattcttttggtagggacttgaatgacgcttacgaatggctgatgaattacaaaaaatctaaagatgttagtaatttaaaccaagcgtgggacatttactataatgttttcaggaaaattggtaaacagttgccacaattacaaactcttgaactacaacatgtgtcgccaaaactactatctgcgcatgatttggaattggctgtccccgggacccgtgcaagtggtggaaaaccaattgttaaaatatctaaattcgagccagtattttcagtaatctcatccaaacaaagaccgagaaagttttgtatcaagggtagtgatggtaaagattataagtatgtgttgaaaggacatgaagacattagacaggatagcttggtcatgcaattattcggactagttaacacgcttttgcaaaatgacgctgagtgctttagaaggcatctagatatccagcaatatccagcaatcccattatctccgaagtctgggttactgggttgggtaccgaatagtgacacgttccatgtattaattagggagcatagagaagccaaaaaaattcctttaaacattgagcattgggtcatgttacaaatggcacctgattatgacaatttaacgttgttgcagaaagtagaagtcttcacttacgccctaaataatacggagggacaagatctttataaggtgttatggctgaagagtaggtcatcggaaacgtggttggagcgtagaactacttacactcgatcgctagccgtgatgtccatgaccggttatatattggggttaggtgaccgccaccctagtaatttgatgttggatagaatcactgggaaagtcattcatattgattttggtgattgtttcgaggctgctatattaagagaaaaattccccgaaaaagtaccttttagattaactagaatgttaacatatgcaatggaagtgagtggaattgaaggtagcttccgtattacttgtgagaatgttatgaaggtacttagagataacaagggttcattaatggcaatccttgaagcttttgctttcgatcctttgatcaattggggttttgacttaccaacaaagaaaattgaggaagaaacgggcattcaacttcccgtgatgaatgccaatgagctattgagtaatggggctattaccgaagaagaagttcaaagggtggaaaacgagcacaagaatgccattcgaaatgcaagggccatgttggtattgaagcgcattactgacaaattaacggggaacgatataagaaggtttaatgacttggacgttccagaacaagtggataaactaatccaacaagccacatcagtggaaaacctatgccaacattatatcggttggtgtccattctggtagttttaatgtattgaaaatcacttagttgtatatagcctgtaaaagtgttgtataaaaatgcatctcattcattaatgtttagttccgagcgtgacgttactaactgcgaaaaaagttccttcgactagta

SEQ ID NO: 149852 - protein, 2474 aa, Saccharomyces cerevisiae
MNKYINKYTTPPNLLSLRQRAEGKHRTRKKLTHKSHSHDDEMSTTSNTDSNHNGPNDSGRVITGSAGHIGKISFVDSELDTTFSTLNLIFDKLKSDVPQERASGANELSTTLTSLAREVSAEQFQRFSNSLNNKIFELIHGFTSSEKIGGILAVDTLISFYLSTEELPNQTSRLANYLRVLIPSSDIEVMRLAANTLGRLTVPGGTLTSDFVEFEVRTCIDWLTLTADNNSSSSKLEYRRHAALLIIKALADNSPYLLYPYVNSILDNIWVPLRDAKLIIRLDAAVALGKCLTIIQDRDPALGKQWFQRLFQGCTHGLSLNTNDSVHATLLVFRELLSLKAPYLRDKYDDIYKSTMKYKEYKFDVIRREVYAILPLLAAFDPAIFTKKYLDRIMVHYLRYLKNIDMNAANNSDKPFILVSIGDIAFEVGSSISPYMTLILDNIREGLRTKFKVRKQFEKDLFYCIGKLACALGPAFAKHLNKDLLNLMLNCPMSDHMQETLMILNEKIPSLESTVNSRILNLLSISLSGEKFIQSNQYDFNNQFSIEKARKSRNQSFMKKTGESNDDITDAQILIQCFKMLQLIHHQYSLTEFVRLITISYIEHEDSSVRKLAALTSCDLFIKDDICKQTSVHALHSVSEVLSKLLMIAITDPVAEIRLEILQHLGSNFDPQLAQPDNLRLLFMALNDEIFGIQLEAIKIIGRLSSVNPAYVVPSLRKTLLELLTQLKFSNMPKKKEESATLLCTLINSSDEVAKPYIDPILDVILPKCQDASSAVASTALKVLGELSVVGGKEMTRYLKELMPLIINTFQDQSNSFKRDAALTTLGQLAASSGYVVGPLLDYPELLGILINILKTENNPHIRRGTVRLIGILGALDPYKHREIEVTSNSKSSVEQNAPSIDIALLMQGVSPSNDEYYPTVVIHNLMKILNDPSLSIHHTAAIQAIMHIFQNLGLRCVSFLDQIIPGIILVMRSCPPSQLDFYFQQLGSLISIVKQHIRPHVEKIYGVIREFFPIIKLQITIISVIESISKALEGEFKRFVPETLTFFLDILENDQSNKRIVPIRILKSLVTFGPNLEDYSHLIMPIVVRMTEYSAGSLKKISIITLGRLAKNINLSEMSSRIVQALVRILNNGDRELTKATMNTLSLLLLQLGTDFVVFVPVINKALLRNRIQHSVYDQLVNKLLNNECLPTNIIFDKENEVPERKNYEDEMQVTKLPVNQNILKNAWYCSQQKTKEDWQEWIRRLSIQLLKESPSACLRSCSSLVSVYYPLARELFNASFSSCWVELQTSYQEDLIQALCKALSSSENPPEIYQMLLNLVEFMEHDDKPLPIPIHTLGKYAQKCHAFAKALHYKEVEFLEEPKNSTIEALISINNQLHQTDSAIGILKHAQQHNELQLKETWYEKLQRWEDALAAYNEKEAAGEDSVEVMMGKLRSLYALGEWEELSKLASEKWGTAKPEVKKAMAPLAAGAAWGLEQWDEIAQYTSVMKSQSPDKEFYDAILCLHRNNFKKAEVHIFNARDLLVTELSALVNESYNRAYNVVVRAQIIAELEEIIKYKKLPQNSDKRLTMRETWNTRLLGCQKNIDVWQRILRVRSLVIKPKEDAQVRIKFANLCRKSGRMALAKKVLNTLLEETDDPDHPNTAKASPPVVYAQLKYLWATGLQDEALKQLINFTSRMAHDLGLDPNNMIAQSVPQQSKRVPRHVEDYTKLLARCFLKQGEWRVCLQPKWRLSNPDSILGSYLLATHFDNTWYKAWHNWALANFEVISMLTSVSKKKQEGSDASSVTDINEFDNGMIGVNTFDAKEVHYSSNLIHRHVIPAIKGFFHSISLSESSSLQDALRLLTLWFTFGGIPEATQAMHEGFNLIQIGTWLEVLPQLISRIHQPNQIVSRSLLSLLSDLGKAHPQALVYPLMVAIKSESLSRQKAALSIIEKMRIHSPVLVDQAELVSHELIRMAVLWHEQWYEGLDDASRQFFGEHNTEKMFAALEPLYEMLKRGPETLREISFQNSFGRDLNDAYEWLMNYKKSKDVSNLNQAWDIYYNVFRKIGKQLPQLQTLELQHVSPKLLSAHDLELAVPGTRASGGKPIVKISKFEPVFSVISSKQRPRKFCIKGSDGKDYKYVLKGHEDIRQDSLVMQLFGLVNTLLQNDAECFRRHLDIQQYPAIPLSPKSGLLGWVPNSDTFHVLIREHREAKKIPLNIEHWVMLQMAPDYDNLTLLQKVEVFTYALNNTEGQDLYKVLWLKSRSSETWLERRTTYTRSLAVMSMTGYILGLGDRHPSNLMLDRITGKVIHIDFGDCFEAAILREKFPEKVPFRLTRMLTYAMEVSGIEGSFRITCENVMKVLRDNKGSLMAILEAFAFDPLINWGFDLPTKKIEEETGIQLPVMNANELLSNGAITEEEVQRVENEHKNAIRNARAMLVLKRITDKLTGNDIRRFNDLDVPEQVDKLIQQATSVENLCQHYIGWCPFW

SEQ ID NO: 149853 - DNA, 23 bp, Artificial sequence
  primer
atggaaccgcatgaggagcagat

SEQ ID NO: 149854 - DNA, 23 bp, Artificial sequence
  primer
tcaccagaatgggcaccatccaa

SEQ ID NO: 149855 - protein, 2925 aa, Artificial sequence
  consensus sequence
  Variant (2)..(15): Xaa in position 2 to 15 is any amino acid
  Variant (16)..(17): Xaa in position 16 to 17 is any or no amino acid
  Variant (19)..(31): Xaa in position 19 to 31 is any amino acid
  Variant (32)..(46): Xaa in position 32 to 46 is any or no amino acid
  Variant (48)..(48): Xaa in position 48 is any amino acid
  Variant (49)..(51): Xaa in position 49 to 51 is any or no amino acid
  Variant (53)..(58): Xaa in position 53 to 58 is any amino acid
  Variant (59)..(59): Xaa in position 59 is any or no amino acid
  Variant (61)..(67): Xaa in position 61 to 67 is any amino acid
  Variant (68)..(68): Xaa in position 68 is any or no amino acid
  Variant (70)..(74): Xaa in position 70 to 74 is any amino acid
  Variant (77)..(78): Xaa in position 77 to 78 is any amino acid
  Variant (80)..(82): Xaa in position 80 to 82 is any amino acid
  Variant (85)..(95): Xaa in position 85 to 95 is any amino acid
  Variant (96)..(99): Xaa in position 96 to 99 is any or no amino acid
  Variant (101)..(104): Xaa in position 101 to 104 is any amino acid
  Variant (106)..(111): Xaa in position 106 to 111 is any amino acid
  Variant (112)..(113): Xaa in position 112 to 113 is any or no amino acid
  Variant (115)..(120): Xaa in position 115 to 120 is any amino acid
  Variant (122)..(124): Xaa in position 122 to 124 is any amino acid
  Variant (127)..(127): Xaa in position 127 is any amino acid
  Variant (130)..(132): Xaa in position 130 to 132 is any amino acid
  Variant (134)..(139): Xaa in position 134 to 139 is any amino acid
  Variant (140)..(140): Xaa in position 140 is any or no amino acid
  Variant (142)..(143): Xaa in position 142 to 143 is any amino acid
  Variant (145)..(149): Xaa in position 145 to 149 is any amino acid
  Variant (153)..(157): Xaa in position 153 to 157 is any amino acid
  Variant (158)..(166): Xaa in position 158 to 166 is any or no amino acid
  Variant (168)..(169): Xaa in position 168 to 169 is any amino acid
  Variant (171)..(171): Xaa in position 171 is any amino acid
  Variant (174)..(174): Xaa in position 174 is any amino acid
  Variant (176)..(180): Xaa in position 176 to 180 is any amino acid
  Variant (182)..(184): Xaa in position 182 to 184 is any amino acid
  Variant (186)..(198): Xaa in position 186 to 198 is any amino acid
  Variant (200)..(204): Xaa in position 200 to 204 is any amino acid
  Variant (206)..(209): Xaa in position 206 to 209 is any amino acid
  Variant (212)..(213): Xaa in position 212 to 213 is any amino acid
  Variant (215)..(218): Xaa in position 215 to 218 is any amino acid
  Variant (219)..(227): Xaa in position 219 to 227 is any or no amino acid
  Variant (229)..(231): Xaa in position 229 to 231 is any amino acid
  Variant (232)..(238): Xaa in position 232 to 238 is any or no amino acid
  Variant (240)..(258): Xaa in position 240 to 258 is any amino acid
  Variant (259)..(302): Xaa in position 259 to 302 is any or no amino acid
  Variant (306)..(306): Xaa in position 306 is any amino acid
  Variant (309)..(311): Xaa in position 309 to 311 is any amino acid
  Variant (314)..(350): Xaa in position 314 to 350 is any amino acid
  Variant (351)..(433): Xaa in position 351 to 433 is any or no amino acid
  Variant (435)..(435): Xaa in position 435 is any amino acid
  Variant (438)..(443): Xaa in position 438 to 443 is any amino acid
  Variant (445)..(448): Xaa in position 445 to 448 is any amino acid
  Variant (450)..(459): Xaa in position 450 to 459 is any amino acid
  Variant (461)..(469): Xaa in position 461 to 469 is any amino acid
  Variant (470)..(478): Xaa in position 470 to 478 is any or no amino acid
  Variant (480)..(482): Xaa in position 480 to 482 is any amino acid
  Variant (484)..(485): Xaa in position 484 to 485 is any amino acid
  Variant (487)..(488): Xaa in position 487 to 488 is any amino acid
  Variant (490)..(495): Xaa in position 490 to 495 is any amino acid
  Variant (496)..(496): Xaa in position 496 is any or no amino acid
  Variant (498)..(508): Xaa in position 498 to 508 is any amino acid
  Variant (510)..(520): Xaa in position 510 to 520 is any amino acid
  Variant (521)..(575): Xaa in position 521 to 575 is any or no amino acid
  Variant (577)..(577): Xaa in position 577 is any amino acid
  Variant (579)..(581): Xaa in position 579 to 581 is any amino acid
  Variant (583)..(584): Xaa in position 583 to 584 is any amino acid
  Variant (586)..(597): Xaa in position 586 to 597 is any amino acid
  Variant (598)..(598): Xaa in position 598 is any or no amino acid
  Variant (600)..(606): Xaa in position 600 to 606 is any amino acid
  Variant (607)..(607): Xaa in position 607 is any or no amino acid
  Variant (610)..(615): Xaa in position 610 to 615 is any amino acid
  Variant (617)..(623): Xaa in position 617 to 623 is any amino acid
  Variant (625)..(629): Xaa in position 625 to 629 is any amino acid
  Variant (631)..(633): Xaa in position 631 to 633 is any amino acid
  Variant (636)..(638): Xaa in position 636 to 638 is any amino acid
  Variant (640)..(641): Xaa in position 640 to 641 is any amino acid
  Variant (643)..(674): Xaa in position 643 to 674 is any amino acid
  Variant (675)..(700): Xaa in position 675 to 700 is any or no amino acid
  Variant (703)..(704): Xaa in position 703 to 704 is any amino acid
  Variant (706)..(707): Xaa in position 706 to 707 is any amino acid
  Variant (709)..(709): Xaa in position 709 is any amino acid
  Variant (711)..(713): Xaa in position 711 to 713 is any amino acid
  Variant (714)..(714): Xaa in position 714 is any or no amino acid
  Variant (716)..(717): Xaa in position 716 to 717 is any amino acid
  Variant (719)..(734): Xaa in position 719 to 734 is any amino acid
  Variant (736)..(737): Xaa in position 736 to 737 is any amino acid
  Variant (739)..(740): Xaa in position 739 to 740 is any amino acid
  Variant (742)..(760): Xaa in position 742 to 760 is any amino acid
  Variant (761)..(774): Xaa in position 761 to 774 is any or no amino acid
  Variant (776)..(777): Xaa in position 776 to 777 is any amino acid
  Variant (779)..(780): Xaa in position 779 to 780 is any amino acid
  Variant (784)..(788): Xaa in position 784 to 788 is any amino acid
  Variant (790)..(794): Xaa in position 790 to 794 is any amino acid
  Variant (796)..(798): Xaa in position 796 to 798 is any amino acid
  Variant (800)..(801): Xaa in position 800 to 801 is any amino acid
  Variant (803)..(805): Xaa in position 803 to 805 is any amino acid
  Variant (806)..(807): Xaa in position 806 to 807 is any or no amino acid
  Variant (810)..(811): Xaa in position 810 to 811 is any amino acid
  Variant (814)..(820): Xaa in position 814 to 820 is any amino acid
  Variant (823)..(825): Xaa in position 823 to 825 is any amino acid
  Variant (829)..(829): Xaa in position 829 is any amino acid
  Variant (831)..(832): Xaa in position 831 to 832 is any amino acid
  Variant (834)..(835): Xaa in position 834 to 835 is any amino acid
  Variant (837)..(840): Xaa in position 837 to 840 is any amino acid
  Variant (844)..(846): Xaa in position 844 to 846 is any amino acid
  Variant (852)..(852): Xaa in position 852 is any amino acid
  Variant (854)..(854): Xaa in position 854 is any amino acid
  Variant (858)..(862): Xaa in position 858 to 862 is any amino acid
  Variant (865)..(865): Xaa in position 865 is any amino acid
  Variant (867)..(872): Xaa in position 867 to 872 is any amino acid
  Variant (874)..(874): Xaa in position 874 is any amino acid
  Variant (877)..(878): Xaa in position 877 to 878 is any amino acid
  Variant (880)..(895): Xaa in position 880 to 895 is any amino acid
  Variant (897)..(898): Xaa in position 897 to 898 is any amino acid
  Variant (900)..(903): Xaa in position 900 to 903 is any amino acid
  Variant (905)..(905): Xaa in position 905 is any amino acid
  Variant (908)..(914): Xaa in position 908 to 914 is any amino acid
  Variant (915)..(919): Xaa in position 915 to 919 is any or no amino acid
  Variant (921)..(925): Xaa in position 921 to 925 is any amino acid
  Variant (926)..(928): Xaa in position 926 to 928 is any or no amino acid
  Variant (930)..(930): Xaa in position 930 is any amino acid
  Variant (933)..(933): Xaa in position 933 is any amino acid
  Variant (935)..(935): Xaa in position 935 is any amino acid
  Variant (936)..(937): Xaa in position 936 to 937 is any or no amino acid
  Variant (939)..(947): Xaa in position 939 to 947 is any amino acid
  Variant (948)..(948): Xaa in position 948 is any or no amino acid
  Variant (950)..(958): Xaa in position 950 to 958 is any amino acid
  Variant (959)..(961): Xaa in position 959 to 961 is any or no amino acid
  Variant (963)..(966): Xaa in position 963 to 966 is any amino acid
  Variant (967)..(967): Xaa in position 967 is any or no amino acid
  Variant (970)..(971): Xaa in position 970 to 971 is any amino acid
  Variant (974)..(975): Xaa in position 974 to 975 is any amino acid
  Variant (979)..(983): Xaa in position 979 to 983 is any amino acid
  Variant (985)..(985): Xaa in position 985 is any amino acid
  Variant (987)..(988): Xaa in position 987 to 988 is any amino acid
  Variant (990)..(992): Xaa in position 990 to 992 is any amino acid
  Variant (995)..(995): Xaa in position 995 is any amino acid
  Variant (998)..(999): Xaa in position 998 to 999 is any amino acid
  Variant (1001)..(1005): Xaa in position 1001 to 1005 is any amino acid
  Variant (1006)..(1006): Xaa in position 1006 is any or no amino acid
  Variant (1008)..(1011): Xaa in position 1008 to 1011 is any amino acid
  Variant (1012)..(1013): Xaa in position 1012 to 1013 is any or no amino acid
  Variant (1015)..(1015): Xaa in position 1015 is any amino acid
  Variant (1018)..(1021): Xaa in position 1018 to 1021 is any amino acid
  Variant (1023)..(1023): Xaa in position 1023 is any amino acid
  Variant (1031)..(1064): Xaa in position 1031 to 1064 is any amino acid
  Variant (1065)..(1109): Xaa in position 1065 to 1109 is any or no amino acid
  Variant (1112)..(1113): Xaa in position 1112 to 1113 is any amino acid
  Variant (1115)..(1115): Xaa in position 1115 is any amino acid
  Variant (1117)..(1118): Xaa in position 1117 to 1118 is any amino acid
  Variant (1120)..(1121): Xaa in position 1120 to 1121 is any amino acid
  Variant (1122)..(1122): Xaa in position 1122 is any or no amino acid
  Variant (1125)..(1128): Xaa in position 1125 to 1128 is any amino acid
  Variant (1130)..(1132): Xaa in position 1130 to 1132 is any amino acid
  Variant (1134)..(1135): Xaa in position 1134 to 1135 is any amino acid
  Variant (1137)..(1138): Xaa in position 1137 to 1138 is any amino acid
  Variant (1140)..(1142): Xaa in position 1140 to 1142 is any amino acid
  Variant (1145)..(1147): Xaa in position 1145 to 1147 is any amino acid
  Variant (1149)..(1150): Xaa in position 1149 to 1150 is any amino acid
  Variant (1153)..(1154): Xaa in position 1153 to 1154 is any amino acid
  Variant (1156)..(1159): Xaa in position 1156 to 1159 is any amino acid
  Variant (1161)..(1164): Xaa in position 1161 to 1164 is any amino acid
  Variant (1166)..(1174): Xaa in position 1166 to 1174 is any amino acid
  Variant (1175)..(1175): Xaa in position 1175 is any or no amino acid
  Variant (1177)..(1178): Xaa in position 1177 to 1178 is any amino acid
  Variant (1180)..(1180): Xaa in position 1180 is any amino acid
  Variant (1183)..(1184): Xaa in position 1183 to 1184 is any amino acid
  Variant (1186)..(1187): Xaa in position 1186 to 1187 is any amino acid
  Variant (1190)..(1190): Xaa in position 1190 is any amino acid
  Variant (1195)..(1199): Xaa in position 1195 to 1199 is any amino acid
  Variant (1201)..(1213): Xaa in position 1201 to 1213 is any amino acid
  Variant (1214)..(1233): Xaa in position 1214 to 1233 is any or no amino acid
  Variant (1235)..(1239): Xaa in position 1235 to 1239 is any amino acid
  Variant (1241)..(1241): Xaa in position 1241 is any amino acid
  Variant (1243)..(1247): Xaa in position 1243 to 1247 is any amino acid
  Variant (1249)..(1250): Xaa in position 1249 to 1250 is any amino acid
  Variant (1254)..(1263): Xaa in position 1254 to 1263 is any amino acid
  Variant (1265)..(1266): Xaa in position 1265 to 1266 is any amino acid
  Variant (1268)..(1269): Xaa in position 1268 to 1269 is any amino acid
  Variant (1271)..(1281): Xaa in position 1271 to 1281 is any amino acid
  Variant (1282)..(1282): Xaa in position 1282 is any or no amino acid
  Variant (1284)..(1288): Xaa in position 1284 to 1288 is any amino acid
  Variant (1291)..(1295): Xaa in position 1291 to 1295 is any amino acid
  Variant (1297)..(1297): Xaa in position 1297 is any amino acid
  Variant (1300)..(1301): Xaa in position 1300 to 1301 is any amino acid
  Variant (1303)..(1304): Xaa in position 1303 to 1304 is any amino acid
  Variant (1306)..(1318): Xaa in position 1306 to 1318 is any amino acid
  Variant (1319)..(1322): Xaa in position 1319 to 1322 is any or no amino acid
  Variant (1324)..(1325): Xaa in position 1324 to 1325 is any amino acid
  Variant (1327)..(1329): Xaa in position 1327 to 1329 is any amino acid
  Variant (1331)..(1340): Xaa in position 1331 to 1340 is any amino acid
  Variant (1342)..(1344): Xaa in position 1342 to 1344 is any amino acid
  Variant (1346)..(1346): Xaa in position 1346 is any amino acid
  Variant (1348)..(1348): Xaa in position 1348 is any amino acid
  Variant (1350)..(1350): Xaa in position 1350 is any amino acid
  Variant (1352)..(1356): Xaa in position 1352 to 1356 is any amino acid
  Variant (1357)..(1366): Xaa in position 1357 to 1366 is any or no amino acid
  Variant (1368)..(1377): Xaa in position 1368 to 1377 is any amino acid
  Variant (1379)..(1379): Xaa in position 1379 is any amino acid
  Variant (1380)..(1380): Xaa in position 1380 is any or no amino acid
  Variant (1384)..(1388): Xaa in position 1384 to 1388 is any amino acid
  Variant (1390)..(1409): Xaa in position 1390 to 1409 is any amino acid
  Variant (1411)..(1419): Xaa in position 1411 to 1419 is any amino acid
  Variant (1421)..(1444): Xaa in position 1421 to 1444 is any amino acid
  Variant (1445)..(1481): Xaa in position 1445 to 1481 is any or no amino acid
  Variant (1483)..(1484): Xaa in position 1483 to 1484 is any amino acid
  Variant (1486)..(1489): Xaa in position 1486 to 1489 is any amino acid
  Variant (1491)..(1492): Xaa in position 1491 to 1492 is any amino acid
  Variant (1495)..(1503): Xaa in position 1495 to 1503 is any amino acid
  Variant (1506)..(1506): Xaa in position 1506 is any amino acid
  Variant (1509)..(1509): Xaa in position 1509 is any amino acid
  Variant (1511)..(1512): Xaa in position 1511 to 1512 is any amino acid
  Variant (1514)..(1515): Xaa in position 1514 to 1515 is any amino acid
  Variant (1518)..(1518): Xaa in position 1518 is any amino acid
  Variant (1523)..(1523): Xaa in position 1523 is any amino acid
  Variant (1527)..(1527): Xaa in position 1527 is any amino acid
  Variant (1529)..(1530): Xaa in position 1529 to 1530 is any amino acid
  Variant (1533)..(1534): Xaa in position 1533 to 1534 is any amino acid
  Variant (1536)..(1537): Xaa in position 1536 to 1537 is any amino acid
  Variant (1539)..(1541): Xaa in position 1539 to 1541 is any amino acid
  Variant (1545)..(1546): Xaa in position 1545 to 1546 is any amino acid
  Variant (1548)..(1548): Xaa in position 1548 is any amino acid
  Variant (1552)..(1552): Xaa in position 1552 is any amino acid
  Variant (1555)..(1561): Xaa in position 1555 to 1561 is any amino acid
  Variant (1563)..(1568): Xaa in position 1563 to 1568 is any amino acid
  Variant (1570)..(1575): Xaa in position 1570 to 1575 is any amino acid
  Variant (1577)..(1577): Xaa in position 1577 is any amino acid
  Variant (1579)..(1583): Xaa in position 1579 to 1583 is any amino acid
  Variant (1593)..(1593): Xaa in position 1593 is any amino acid
  Variant (1596)..(1596): Xaa in position 1596 is any amino acid
  Variant (1597)..(1597): Xaa in position 1597 is any or no amino acid
  Variant (1601)..(1604): Xaa in position 1601 to 1604 is any amino acid
  Variant (1607)..(1608): Xaa in position 1607 to 1608 is any amino acid
  Variant (1610)..(1611): Xaa in position 1610 to 1611 is any amino acid
  Variant (1613)..(1613): Xaa in position 1613 is any amino acid
  Variant (1615)..(1615): Xaa in position 1615 is any amino acid
  Variant (1624)..(1624): Xaa in position 1624 is any amino acid
  Variant (1627)..(1634): Xaa in position 1627 to 1634 is any amino acid
  Variant (1635)..(1642): Xaa in position 1635 to 1642 is any or no amino acid
  Variant (1644)..(1644): Xaa in position 1644 is any amino acid
  Variant (1647)..(1647): Xaa in position 1647 is any amino acid
  Variant (1651)..(1651): Xaa in position 1651 is any amino acid
  Variant (1653)..(1653): Xaa in position 1653 is any amino acid
  Variant (1655)..(1656): Xaa in position 1655 to 1656 is any amino acid
  Variant (1659)..(1659): Xaa in position 1659 is any amino acid
  Variant (1661)..(1661): Xaa in position 1661 is any amino acid
  Variant (1663)..(1675): Xaa in position 1663 to 1675 is any amino acid
  Variant (1676)..(1682): Xaa in position 1676 to 1682 is any or no amino acid
  Variant (1684)..(1684): Xaa in position 1684 is any amino acid
  Variant (1688)..(1689): Xaa in position 1688 to 1689 is any amino acid
  Variant (1691)..(1692): Xaa in position 1691 to 1692 is any amino acid
  Variant (1695)..(1696): Xaa in position 1695 to 1696 is any amino acid
  Variant (1698)..(1709): Xaa in position 1698 to 1709 is any amino acid
  Variant (1710)..(1716): Xaa in position 1710 to 1716 is any or no amino acid
  Variant (1718)..(1718): Xaa in position 1718 is any amino acid
  Variant (1723)..(1723): Xaa in position 1723 is any amino acid
  Variant (1727)..(1727): Xaa in position 1727 is any amino acid
  Variant (1729)..(1730): Xaa in position 1729 to 1730 is any amino acid
  Variant (1732)..(1738): Xaa in position 1732 to 1738 is any amino acid
  Variant (1740)..(1750): Xaa in position 1740 to 1750 is any amino acid
  Variant (1752)..(1753): Xaa in position 1752 to 1753 is any amino acid
  Variant (1756)..(1756): Xaa in position 1756 is any amino acid
  Variant (1761)..(1763): Xaa in position 1761 to 1763 is any amino acid
  Variant (1765)..(1769): Xaa in position 1765 to 1769 is any amino acid
  Variant (1771)..(1779): Xaa in position 1771 to 1779 is any amino acid
  Variant (1780)..(1796): Xaa in position 1780 to 1796 is any or no amino acid
  Variant (1798)..(1799): Xaa in position 1798 to 1799 is any amino acid
  Variant (1801)..(1802): Xaa in position 1801 to 1802 is any amino acid
  Variant (1804)..(1804): Xaa in position 1804 is any amino acid
  Variant (1806)..(1807): Xaa in position 1806 to 1807 is any amino acid
  Variant (1809)..(1814): Xaa in position 1809 to 1814 is any amino acid
  Variant (1816)..(1822): Xaa in position 1816 to 1822 is any amino acid
  Variant (1824)..(1825): Xaa in position 1824 to 1825 is any amino acid
  Variant (1827)..(1827): Xaa in position 1827 is any amino acid
  Variant (1831)..(1831): Xaa in position 1831 is any amino acid
  Variant (1833)..(1835): Xaa in position 1833 to 1835 is any amino acid
  Variant (1839)..(1839): Xaa in position 1839 is any amino acid
  Variant (1843)..(1845): Xaa in position 1843 to 1845 is any amino acid
  Variant (1847)..(1848): Xaa in position 1847 to 1848 is any amino acid
  Variant (1850)..(1850): Xaa in position 1850 is any amino acid
  Variant (1852)..(1852): Xaa in position 1852 is any amino acid
  Variant (1857)..(1857): Xaa in position 1857 is any amino acid
  Variant (1859)..(1859): Xaa in position 1859 is any amino acid
  Variant (1862)..(1873): Xaa in position 1862 to 1873 is any amino acid
  Variant (1874)..(1884): Xaa in position 1874 to 1884 is any or no amino acid
  Variant (1886)..(1887): Xaa in position 1886 to 1887 is any amino acid
  Variant (1890)..(1890): Xaa in position 1890 is any amino acid
  Variant (1892)..(1892): Xaa in position 1892 is any amino acid
  Variant (1894)..(1895): Xaa in position 1894 to 1895 is any amino acid
  Variant (1897)..(1898): Xaa in position 1897 to 1898 is any amino acid
  Variant (1901)..(1907): Xaa in position 1901 to 1907 is any amino acid
  Variant (1910)..(1911): Xaa in position 1910 to 1911 is any amino acid
  Variant (1913)..(1918): Xaa in position 1913 to 1918 is any amino acid
  Variant (1920)..(1920): Xaa in position 1920 is any amino acid
  Variant (1924)..(1924): Xaa in position 1924 is any amino acid
  Variant (1930)..(1933): Xaa in position 1930 to 1933 is any amino acid
  Variant (1935)..(1938): Xaa in position 1935 to 1938 is any amino acid
  Variant (1940)..(1941): Xaa in position 1940 to 1941 is any amino acid
  Variant (1942)..(1948): Xaa in position 1942 to 1948 is any or no amino acid
  Variant (1950)..(1959): Xaa in position 1950 to 1959 is any amino acid
  Variant (1960)..(1971): Xaa in position 1960 to 1971 is any or no amino acid
  Variant (1973)..(1973): Xaa in position 1973 is any amino acid
  Variant (1975)..(1976): Xaa in position 1975 to 1976 is any amino acid
  Variant (1978)..(1979): Xaa in position 1978 to 1979 is any amino acid
  Variant (1981)..(1982): Xaa in position 1981 to 1982 is any amino acid
  Variant (1984)..(1990): Xaa in position 1984 to 1990 is any amino acid
  Variant (1991)..(2001): Xaa in position 1991 to 2001 is any or no amino acid
  Variant (2003)..(2005): Xaa in position 2003 to 2005 is any amino acid
  Variant (2007)..(2008): Xaa in position 2007 to 2008 is any amino acid
  Variant (2010)..(2011): Xaa in position 2010 to 2011 is any amino acid
  Variant (2012)..(2066): Xaa in position 2012 to 2066 is any or no amino acid
  Variant (2070)..(2072): Xaa in position 2070 to 2072 is any amino acid
  Variant (2074)..(2075): Xaa in position 2074 to 2075 is any amino acid
  Variant (2077)..(2077): Xaa in position 2077 is any amino acid
  Variant (2079)..(2081): Xaa in position 2079 to 2081 is any amino acid
  Variant (2083)..(2093): Xaa in position 2083 to 2093 is any amino acid
  Variant (2094)..(2096): Xaa in position 2094 to 2096 is any or no amino acid
  Variant (2098)..(2099): Xaa in position 2098 to 2099 is any amino acid
  Variant (2101)..(2102): Xaa in position 2101 to 2102 is any amino acid
  Variant (2105)..(2109): Xaa in position 2105 to 2109 is any amino acid
  Variant (2113)..(2113): Xaa in position 2113 is any amino acid
  Variant (2117)..(2117): Xaa in position 2117 is any amino acid
  Variant (2120)..(2121): Xaa in position 2120 to 2121 is any amino acid
  Variant (2125)..(2140): Xaa in position 2125 to 2140 is any amino acid
  Variant (2141)..(2186): Xaa in position 2141 to 2186 is any or no amino acid
  Variant (2189)..(2190): Xaa in position 2189 to 2190 is any amino acid
  Variant (2194)..(2194): Xaa in position 2194 is any amino acid
  Variant (2197)..(2197): Xaa in position 2197 is any amino acid
  Variant (2199)..(2202): Xaa in position 2199 to 2202 is any amino acid
  Variant (2203)..(2207): Xaa in position 2203 to 2207 is any or no amino acid
  Variant (2212)..(2212): Xaa in position 2212 is any amino acid
  Variant (2221)..(2222): Xaa in position 2221 to 2222 is any amino acid
  Variant (2224)..(2234): Xaa in position 2224 to 2234 is any amino acid
  Variant (2236)..(2243): Xaa in position 2236 to 2243 is any amino acid
  Variant (2246)..(2246): Xaa in position 2246 is any amino acid
  Variant (2248)..(2248): Xaa in position 2248 is any amino acid
  Variant (2253)..(2253): Xaa in position 2253 is any amino acid
  Variant (2256)..(2260): Xaa in position 2256 to 2260 is any amino acid
  Variant (2261)..(2261): Xaa in position 2261 is any or no amino acid
  Variant (2263)..(2268): Xaa in position 2263 to 2268 is any amino acid
  Variant (2271)..(2273): Xaa in position 2271 to 2273 is any amino acid
  Variant (2275)..(2276): Xaa in position 2275 to 2276 is any amino acid
  Variant (2286)..(2286): Xaa in position 2286 is any amino acid
  Variant (2289)..(2289): Xaa in position 2289 is any amino acid
  Variant (2292)..(2295): Xaa in position 2292 to 2295 is any amino acid
  Variant (2296)..(2296): Xaa in position 2296 is any or no amino acid
  Variant (2298)..(2300): Xaa in position 2298 to 2300 is any amino acid
  Variant (2302)..(2303): Xaa in position 2302 to 2303 is any amino acid
  Variant (2305)..(2310): Xaa in position 2305 to 2310 is any amino acid
  Variant (2313)..(2314): Xaa in position 2313 to 2314 is any amino acid
  Variant (2317)..(2317): Xaa in position 2317 is any amino acid
  Variant (2320)..(2322): Xaa in position 2320 to 2322 is any amino acid
  Variant (2324)..(2324): Xaa in position 2324 is any amino acid
  Variant (2331)..(2331): Xaa in position 2331 is any amino acid
  Variant (2336)..(2336): Xaa in position 2336 is any amino acid
  Variant (2338)..(2338): Xaa in position 2338 is any amino acid
  Variant (2343)..(2343): Xaa in position 2343 is any amino acid
  Variant (2347)..(2348): Xaa in position 2347 to 2348 is any amino acid
  Variant (2351)..(2352): Xaa in position 2351 to 2352 is any amino acid
  Variant (2354)..(2356): Xaa in position 2354 to 2356 is any amino acid
  Variant (2358)..(2360): Xaa in position 2358 to 2360 is any amino acid
  Variant (2362)..(2362): Xaa in position 2362 is any amino acid
  Variant (2366)..(2367): Xaa in position 2366 to 2367 is any amino acid
  Variant (2369)..(2370): Xaa in position 2369 to 2370 is any amino acid
  Variant (2372)..(2373): Xaa in position 2372 to 2373 is any amino acid
  Variant (2374)..(2377): Xaa in position 2374 to 2377 is any or no amino acid
  Variant (2380)..(2380): Xaa in position 2380 is any amino acid
  Variant (2382)..(2382): Xaa in position 2382 is any amino acid
  Variant (2385)..(2388): Xaa in position 2385 to 2388 is any amino acid
  Variant (2393)..(2394): Xaa in position 2393 to 2394 is any amino acid
  Variant (2396)..(2401): Xaa in position 2396 to 2401 is any amino acid
  Variant (2403)..(2410): Xaa in position 2403 to 2410 is any amino acid
  Variant (2417)..(2417): Xaa in position 2417 is any amino acid
  Variant (2420)..(2420): Xaa in position 2420 is any amino acid
  Variant (2423)..(2424): Xaa in position 2423 to 2424 is any amino acid
  Variant (2426)..(2427): Xaa in position 2426 to 2427 is any amino acid
  Variant (2432)..(2434): Xaa in position 2432 to 2434 is any amino acid
  Variant (2435)..(2436): Xaa in position 2435 to 2436 is any or no amino acid
  Variant (2438)..(2438): Xaa in position 2438 is any amino acid
  Variant (2440)..(2441): Xaa in position 2440 to 2441 is any amino acid
  Variant (2445)..(2445): Xaa in position 2445 is any amino acid
  Variant (2447)..(2451): Xaa in position 2447 to 2451 is any amino acid
  Variant (2453)..(2453): Xaa in position 2453 is any amino acid
  Variant (2459)..(2459): Xaa in position 2459 is any amino acid
  Variant (2461)..(2462): Xaa in position 2461 to 2462 is any amino acid
  Variant (2464)..(2468): Xaa in position 2464 to 2468 is any amino acid
  Variant (2469)..(2469): Xaa in position 2469 is any or no amino acid
  Variant (2471)..(2478): Xaa in position 2471 to 2478 is any amino acid
  Variant (2481)..(2481): Xaa in position 2481 is any amino acid
  Variant (2488)..(2492): Xaa in position 2488 to 2492 is any amino acid
  Variant (2495)..(2495): Xaa in position 2495 is any amino acid
  Variant (2497)..(2498): Xaa in position 2497 to 2498 is any amino acid
  Variant (2500)..(2502): Xaa in position 2500 to 2502 is any amino acid
  Variant (2509)..(2509): Xaa in position 2509 is any amino acid
  Variant (2513)..(2514): Xaa in position 2513 to 2514 is any amino acid
  Variant (2527)..(2528): Xaa in position 2527 to 2528 is any amino acid
  Variant (2530)..(2532): Xaa in position 2530 to 2532 is any amino acid
  Variant (2534)..(2534): Xaa in position 2534 is any amino acid
  Variant (2536)..(2536): Xaa in position 2536 is any amino acid
  Variant (2538)..(2538): Xaa in position 2538 is any amino acid
  Variant (2541)..(2541): Xaa in position 2541 is any amino acid
  Variant (2543)..(2544): Xaa in position 2543 to 2544 is any amino acid
  Variant (2549)..(2550): Xaa in position 2549 to 2550 is any amino acid
  Variant (2554)..(2554): Xaa in position 2554 is any amino acid
  Variant (2558)..(2560): Xaa in position 2558 to 2560 is any amino acid
  Variant (2563)..(2563): Xaa in position 2563 is any amino acid
  Variant (2565)..(2565): Xaa in position 2565 is any amino acid
  Variant (2568)..(2570): Xaa in position 2568 to 2570 is any amino acid
  Variant (2572)..(2574): Xaa in position 2572 to 2574 is any amino acid
  Variant (2575)..(2575): Xaa in position 2575 is any or no amino acid
  Variant (2577)..(2577): Xaa in position 2577 is any amino acid
  Variant (2580)..(2580): Xaa in position 2580 is any amino acid
  Variant (2583)..(2584): Xaa in position 2583 to 2584 is any amino acid
  Variant (2587)..(2587): Xaa in position 2587 is any amino acid
  Variant (2594)..(2594): Xaa in position 2594 is any amino acid
  Variant (2598)..(2598): Xaa in position 2598 is any amino acid
  Variant (2605)..(2606): Xaa in position 2605 to 2606 is any amino acid
  Variant (2609)..(2610): Xaa in position 2609 to 2610 is any amino acid
  Variant (2612)..(2612): Xaa in position 2612 is any amino acid
  Variant (2614)..(2614): Xaa in position 2614 is any amino acid
  Variant (2617)..(2619): Xaa in position 2617 to 2619 is any amino acid
  Variant (2625)..(2625): Xaa in position 2625 is any amino acid
  Variant (2629)..(2629): Xaa in position 2629 is any amino acid
  Variant (2631)..(2632): Xaa in position 2631 to 2632 is any amino acid
  Variant (2636)..(2636): Xaa in position 2636 is any amino acid
  Variant (2642)..(2642): Xaa in position 2642 is any amino acid
  Variant (2666)..(2667): Xaa in position 2666 to 2667 is any amino acid
  Variant (2670)..(2671): Xaa in position 2670 to 2671 is any amino acid
  Variant (2681)..(2681): Xaa in position 2681 is any amino acid
  Variant (2683)..(2684): Xaa in position 2683 to 2684 is any amino acid
  Variant (2688)..(2688): Xaa in position 2688 is any amino acid
  Variant (2691)..(2692): Xaa in position 2691 to 2692 is any amino acid
  Variant (2701)..(2702): Xaa in position 2701 to 2702 is any amino acid
  Variant (2707)..(2708): Xaa in position 2707 to 2708 is any amino acid
  Variant (2712)..(2713): Xaa in position 2712 to 2713 is any amino acid
  Variant (2715)..(2715): Xaa in position 2715 is any amino acid
  Variant (2719)..(2719): Xaa in position 2719 is any amino acid
  Variant (2722)..(2722): Xaa in position 2722 is any amino acid
  Variant (2726)..(2726): Xaa in position 2726 is any amino acid
  Variant (2729)..(2729): Xaa in position 2729 is any amino acid
  Variant (2731)..(2731): Xaa in position 2731 is any amino acid
  Variant (2734)..(2734): Xaa in position 2734 is any amino acid
  Variant (2739)..(2740): Xaa in position 2739 to 2740 is any amino acid
  Variant (2744)..(2745): Xaa in position 2744 to 2745 is any amino acid
  Variant (2747)..(2770): Xaa in position 2747 to 2770 is any amino acid
  Variant (2771)..(2843): Xaa in position 2771 to 2843 is any or no amino acid
  Variant (2845)..(2845): Xaa in position 2845 is any amino acid
  Variant (2848)..(2849): Xaa in position 2848 to 2849 is any amino acid
  Variant (2851)..(2852): Xaa in position 2851 to 2852 is any amino acid
  Variant (2854)..(2856): Xaa in position 2854 to 2856 is any amino acid
  Variant (2861)..(2861): Xaa in position 2861 is any amino acid
  Variant (2863)..(2868): Xaa in position 2863 to 2868 is any amino acid
  Variant (2869)..(2894): Xaa in position 2869 to 2894 is any or no amino acid
  Variant (2896)..(2896): Xaa in position 2896 is any amino acid
  Variant (2898)..(2899): Xaa in position 2898 to 2899 is any amino acid
  Variant (2902)..(2903): Xaa in position 2902 to 2903 is any amino acid
  Variant (2906)..(2906): Xaa in position 2906 is any amino acid
  Variant (2910)..(2911): Xaa in position 2910 to 2911 is any amino acid
  Variant (2917)..(2918): Xaa in position 2917 to 2918 is any amino acid
  Variant (2923)..(2923): Xaa in position 2923 is any amino acid
LXXXXXXXXXXXXXXXXLXXXXXXXXXXXXXXXXXXXXXXXXXXXXEXXXXFXXXXXXXIXXXXXXXXDXXXXXGGXXAXXXLIXXXXXXXXXXXXXXXRXXXXLXXXXXXXXDXXXXXXAXXXLGXLAXXXGXXXXXXXVXXEXXXXXEWLXXXXXXXXXXXXXXEXXRXAAXLXXXXXAXXXPXXXXXXXXXXXXXIXXXXXDXXXXIRXXAXXXXXXXXXXXXXRXXXXXXXXXXWXXXXXXXXXXXXXXXXXXXXXXXXXXXXXXXXXXXXXXXXXXXXXXXXXXXXXXXXXXXXXXXIHGXLLXXXELXXXXXXXXXXXXXXXXXXXXXXXXXXXXXXXXXXXXXXXXXXXXXXXXXXXXXXXXXXXXXXXXXXXXXXXXXXXXXXXXXXXXXXXXXXXXXXXXXXXXXXXXXXXXXXXXXXXXXXXXPXLAXXXXXXFXXXXLXXXXXXXXXXLXXXXXXXXXXXXXXXXXXFXXXGXXAXXVXXXXXXXYXXXXXXXXXXXLXXXXXXXXXXXXXXXXXXXXXXXXXXXXXXXXXXXXXXXXXXXXXXXXXXXXXXXXXXXXXXXXXXFXCXXXLXXAXXXXXXXXXXXXXLXXXXXXXXLSXXXXXXLXXXXXXXPXXXXXIXXXLLXXXSXXLXXXXXXXXXXXXXXXXXXXXXXXXXXXXXXXXXXXXXXXXXXXXXXXXXXXXXXXXXXALXXLXXFXFXXXXLXXFXXXXXXXXXXXXXXXXRXXAXXTXXXXXXXXXXXXXXXXXXXXXXXXXXXXXXXXXVXXVXXKLLXXXXXDXXXXXRXXXLXXLXXXXXFDXXLAXXXXXXXLFXXXNDEXFXXRXXAXXXXGRLXXXNPAYVXPXLRKXXXXXLTXLXXXXXXRXKEXXAXXXXXXXXXXXXXXXXYXXPXXXXLXPKXXXXXXXXXXXXVXXXXXXXXGXLAXVXXXGXXXXXXXXXXLXXXXXXXXXXXXDXXXXXKRXXALXXLGQXXXXXGXVXXPXXXYPXLLXXLXXXXXXEXXXXXXRXETXXXXGXLGALDPYXXXXXXXXXXXXXXXXXXXXXXXXXXXXXXXXXXXXXXXXXXXXXXXXXXXXXXXXXXXXXXXXXXXXXXXXXXXXXXXYYXXVXIXXLXXXILXXXXLXXXHXXVXXAXXXIFXXXGXXCVXXLXXXXPXXXXVXXXXXXXXXXEXXFXQLXXLXXIVXQHIRXXXXXIXXXXXXXXXXXXXXXXXXXXXXXXXXXXXXXXXQXXXXXLXEXXXXXLXXEFKXXXXXXXXXXLXXLXXDXXXXXXXXXXXXLXXXXXFGXXXXXYXHLXXPXXVXXXXXXXXXXXXXXXXXAXXTXXXLXXXXXXXXXXSXXXHXLXRXLXXXXXXXXXXXXXXXLXXXXXXXXXXLXXQLGXXXXXFXXXXXXXXXXXXXXXXXXXXLXXXXXXXXXLXXXXXXXXXXXXXXXXXXXXXXXXXXXXXXXXXXXXXXXXXXXXXXXXXXXXXXXXXXXXXKXXVXXXXLXXAWXXXXXXXXXDWXEWXRXXSXXLLXESPSXALRXCXXLAXXYXXLXXXLFNXXFXSCWXELXXXXXXXLXXXXXXAXXXXXXPXEXXXXXLNLAEFMEHXDKXXLPIXXXXLGXXAXXCXAXAKALHYKEXEFXXXXXXXXXXXXXXXXEXLIXINNXLXQXXAAXGXLXXXXXXXXXXXXXXXXXXXXWXEKLXXWXXALXXYXXXXXXXXXXXXXXXXXXXGXMRCLXALGXWXXLXXXXXXXWXXXXXXXXXXXAXXAAXAAWGXXXWXXXXXYXXXXXXXXXXXXXXXXXXXXXXXXXXDXXFXXAXLXXHXXXXXXAXXXXXXXRXXLXTELXAXXXESYXRAYXXXVXXQXLXELEEXIXYKXXXXXXXXXXXXXXXXXXXXXXXWXXRLXGXQXXVXXWQXXXXXXXLVXXPXXXXXXWXKFAXLCRKSXXXXLXXXXLXXXXXXXXXLXXXXXXXXXXXXXXXXXXXXXXPXVXXAXXKXXWXXXXXXXXXXXXXXXXXXAXXXLXXFXXXXXXXXXXXXXXXXXXXXXXXXXXXXXXXXXXXXXXXXXXXXXXXXXXXXXXXXXLLAXXXLXXGXWXXXLXXXXXXXXXXXXXXLXXYXXATXXXXXWYKXAWHXWAXXNFEXXXXXXXXXXXXXXXXXXXXXXXXXXXXXXXXXXXXXXXXXXXXXXXXXXXXXXXXXXXXXXPAXXGFFXSIXLXXXXXXXXXSLQDXLRLLTLWFXXGXXXXXXXXXXXGXXXXXXXXWLXVXPQLIXRIXXXXXXVXXXXXXLLXXXGXXHPQALVYPLXVAXKSXXXXXRXXXAXXIXXXXXXHSXXLVXQAXXXSXELIRVAXLWHEXWXEGLEXASRXXFGXXNXXXMXXXLXPLHXXLXXGXXXXXXTLXEXSFXXXXGRDLXXAXXXXXXYXXXXXXXXLNQAWDXYYXVFXXIXXQLPQXXXXXLXLXXVSPXLXXXXXLXLAVPGXYXXGXXXXXXIXXXXXXXXVIXSKQRPRXXXXXGSXGXXYXXXLKGHEDXRQDXXVMQLFGLVNTLLXXDXXXFXRXLXIQXYXXIPLSXXSGLXGWVXXXDTXHXLIXXXRXXXXIXLNXEHXXMLXMAPDYDXLTLXQKVEVFXXALXXTXGXDLXXXLWLKSXSSEXWXXRRTXYTRSLXVMSMVGYILGLGDRHPSNLMLDRXXGKXXHIDFGDCFEXAXXREKXPEXXPFRLTRMLXXAMEVXXIEGXXRXTCEXVMXVLRXNKXSXMAXLEAFXXDPLXXWXXXXXXXXXXXXXXXXXXXXXXXXXXXXXXXXXXXXXXXXXXXXXXXXXXXXXXXXXXXXXXXXXXXXXXXXXXXXXXXXXXXXXXXXXXXXXXXXXNXRAXXVXXRXXXKLTGXDXXXXXXXXXXXXXXXXXXXXXXXXXXXXXXXXLXVXXQVXXLIXQATXXENLCQXXIGWCXFW

SEQ ID NO: 149856 - protein, 59 aa, Artificial sequence
  protein pattern
  Variant (2)..(2): Xaa in position 2 is any amino acid
  Variant (7)..(7): Xaa in position 7 is Thr or Val
  Variant (22)..(23): Xaa in position 22 to 23 is Leu or Met
  Variant (24)..(24): Xaa in position 24 is Asp or Asn
  Variant (26)..(26): Xaa in position 26 is any amino acid
  Variant (27)..(27): Xaa in position 27 is Ser or Thr
  Variant (29)..(29): Xaa in position 29 is any amino acid
  Variant (30)..(30): Xaa in position 30 is Ile or Val
  Variant (31)..(31): Xaa in position 31 is Ile, Leu or Val
  Variant (41)..(41): Xaa in position 41 is Ala or Val
  Variant (43)..(43): Xaa in position 43 is Ile or Met
  Variant (44)..(44): Xaa in position 44 is any amino acid
  Variant (48)..(48): Xaa in position 48 is Phe or Tyr
  Variant (51)..(51): Xaa in position 51 is Lys or Arg
  Variant (52)..(52): Xaa in position 52 is Ile or Val
LXVMSMXGYILGLGDRHPSNLXXXRXXGXXXHIDFGDCFEXAXXREKXPEXXPFRLTRM

SEQ ID NO: 149857 - protein, 60 aa, Artificial sequence
  protein pattern
  Variant (5)..(5): Xaa in position 5 is Ile or Leu
  Variant (9)..(9): Xaa in position 9 is Glu, Asn or Ser
  Variant (10)..(10): Xaa in position 10 is any amino acid
  Variant (18)..(18): Xaa in position 18 is Cys or Val
  Variant (23)..(24): Xaa in position 23 to 24 is any amino acid
  Variant (25)..(25): Xaa in position 25 is Asp or Asn
  Variant (26)..(26): Xaa in position 26 is any amino acid
  Variant (27)..(27): Xaa in position 27 is Asp or Glu
  Variant (28)..(28): Xaa in position 28 is Cys, Ser or Thr
  Variant (29)..(29): Xaa in position 29 is Phe or Tyr
  Variant (30)..(30): Xaa in position 30 is any amino acid
  Variant (32)..(32): Xaa in position 32 is any amino acid
  Variant (34)..(34): Xaa in position 34 is Asp, Glu, Asn, Ser or Thr
  Variant (35)..(35): Xaa in position 35 is Ile or Val
  Variant (36)..(37): Xaa in position 36 to 37 is any amino acid
  Variant (38)..(38): Xaa in position 38 is Phe or Tyr
  Variant (39)..(39): Xaa in position 39 is Ala, Pro or Thr
  Variant (40)..(40): Xaa in position 40 is any amino acid
  Variant (45)..(45): Xaa in position 45 is Pro, Gln or Thr
  Variant (46)..(46): Xaa in position 46 is any amino acid
  Variant (47)..(47): Xaa in position 47 is Ser, Thr or Val
  Variant (49)..(49): Xaa in position 49 is Ile, Leu or Met
  Variant (50)..(50): Xaa in position 50 is Ile or Leu
  Variant (53)..(53): Xaa in position 53 is Leu or Val
  Variant (54)..(54): Xaa in position 54 is Glu, Pro, Ser or Thr
  Variant (55)..(55): Xaa in position 55 is any amino acid
  Variant (56)..(56): Xaa in position 56 is Cys, Ser or Thr
  Variant (59)..(59): Xaa in position 59 is Phe, Ile or Leu
GHEDXRQDXXVMQLFGLXNTLLXXXXXXXXRXLXXXXXXXIPLSXXXGXXGWXXXXDTXH

SEQ ID NO: 149858 - protein, 61 aa, Artificial sequence
  protein pattern
  Variant (2)..(2): Xaa in position 2 is any amino acid
  Variant (5)..(5): Xaa in position 5 is any amino acid
  Variant (6)..(6): Xaa in position 6 is Phe, Ile, Leu, Met or Val
  Variant (9)..(9): Xaa in position 9 is any amino acid
  Variant (13)..(14): Xaa in position 13 to 14 is any or no amino acid
  Variant (16)..(18): Xaa in position 16 to 18 is any amino acid
  Variant (20)..(20): Xaa in position 20 is any amino acid
  Variant (21)..(22): Xaa in position 21 to 22 is any or no amino acid
  Variant (25)..(25): Xaa in position 25 is Ile, Leu, Met or Val
  Variant (29)..(30): Xaa in position 29 to 30 is any amino acid
  Variant (31)..(31): Xaa in position 31 is Ala or Val
  Variant (32)..(32): Xaa in position 32 is Leu or Met
  Variant (33)..(33): Xaa in position 33 is Ala, Asp, Glu or Asn
  Variant (34)..(34): Xaa in position 34 is any amino acid
  Variant (36)..(36): Xaa in position 36 is any amino acid
  Variant (38)..(38): Xaa in position 38 is any amino acid
  Variant (41)..(42): Xaa in position 41 to 42 is any amino acid
  Variant (43)..(43): Xaa in position 43 is Ile, Leu or Val
  Variant (49)..(49): Xaa in position 49 is any amino acid
  Variant (50)..(50): Xaa in position 50 is Asn or Ser
  Variant (53)..(53): Xaa in position 53 is any amino acid
  Variant (55)..(55): Xaa in position 55 is Phe or Leu
  Variant (56)..(56): Xaa in position 56 is Asp or Glu
  Variant (59)..(59): Xaa in position 59 is any amino acid
  Variant (60)..(60): Xaa in position 60 is Ala, Asn, Gln, Ser or Thr
NXEHXXMLXMAPXXDXXXLXXXQKXEVFXXXXXXTXGXDLXXXLWLKSXXSEXWXXRRXXY

SEQ ID NO: 149859 - protein, 57 aa, Artificial sequence
  protein pattern
  Variant (3)..(3): Xaa in position 3 is any amino acid
  Variant (6)..(7): Xaa in position 6 to 7 is any amino acid
  Variant (8)..(8): Xaa in position 8 is Ala, Cys or Val
  Variant (10)..(10): Xaa in position 10 is any amino acid
  Variant (15)..(15): Xaa in position 15 is any amino acid
  Variant (17)..(17): Xaa in position 17 is Ile or Val
  Variant (22)..(22): Xaa in position 22 is any amino acid
  Variant (24)..(24): Xaa in position 24 is His or Tyr
  Variant (26)..(26): Xaa in position 26 is Ala or Gly
  Variant (29)..(29): Xaa in position 29 is Asp or Glu
  Variant (32)..(32): Xaa in position 32 is Gln or Arg
  Variant (33)..(33): Xaa in position 33 is any amino acid
  Variant (34)..(34): Xaa in position 34 is Phe or Tyr
  Variant (36)..(36): Xaa in position 36 is Gly, Ser, Thr or Val
  Variant (37)..(37): Xaa in position 37 is Asp or Glu
  Variant (38)..(38): Xaa in position 38 is any amino acid
  Variant (39)..(39): Xaa in position 39 is Asp or Asn
  Variant (40)..(42): Xaa in position 40 to 42 is any amino acid
  Variant (44)..(44): Xaa in position 44 is Phe, Ile or Leu
  Variant (45)..(46): Xaa in position 45 to 46 is any amino acid
  Variant (47)..(47): Xaa in position 47 is Leu or Val
  Variant (48)..(48): Xaa in position 48 is any amino acid
  Variant (52)..(53): Xaa in position 52 to 53 is any amino acid
  Variant (54)..(54): Xaa in position 54 is Leu or Met
  Variant (55)..(56): Xaa in position 55 to 56 is any amino acid
  Variant (57)..(57): Xaa in position 57 is Ala, Glu or Gly
LVXQAXXXSXELIRXAXLWHEXWXEXLEXASXXXFXXXXXXXMXXXXXPLHXXXXXX

SEQ ID NO: 149860 - protein, 46 aa, Artificial sequence
  protein pattern
  Variant (2)..(3): Xaa in position 2 to 3 is any amino acid
  Variant (4)..(8): Xaa in position 4 to 8 is any or no amino acid
  Variant (12)..(12): Xaa in position 12 is Asn, Ser or Thr
  Variant (13)..(13): Xaa in position 13 is Phe or Tyr
  Variant (15)..(15): Xaa in position 15 is any amino acid
  Variant (19)..(19): Xaa in position 19 is any amino acid
  Variant (22)..(22): Xaa in position 22 is any amino acid
  Variant (23)..(23): Xaa in position 23 is Met or Val
  Variant (24)..(24): Xaa in position 24 is Ile or Leu
  Variant (25)..(25): Xaa in position 25 is His or Arg
  Variant (26)..(26): Xaa in position 26 is any amino acid
  Variant (28)..(28): Xaa in position 28 is Lys or Arg
  Variant (29)..(29): Xaa in position 29 is Asp, Glu or Gly
  Variant (31)..(31): Xaa in position 31 is Leu or Val
  Variant (32)..(32): Xaa in position 32 is any amino acid
  Variant (34)..(34): Xaa in position 34 is Ile, Met or Val
  Variant (35)..(35): Xaa in position 35 is Leu or Met
  Variant (39)..(39): Xaa in position 39 is Ala, Ile or Val
  Variant (40)..(40): Xaa in position 40 is any amino acid
  Variant (44)..(44): Xaa in position 44 is Ile or Leu
  Variant (45)..(45): Xaa in position 45 is any amino acid
VXXXXXXXIEGXXRXTCEXVMXXXXXNXXSXXAXXEAFXXDPLXXW

SEQ ID NO: 149861 - protein, 29 aa, Artificial sequence
  protein pattern
  Variant (2)..(3): Xaa in position 2 to 3 is any amino acid
  Variant (5)..(5): Xaa in position 5 is Ile or Val
  Variant (6)..(6): Xaa in position 6 is Asp, Glu, Asn or Gln
  Variant (7)..(7): Xaa in position 7 is any amino acid
  Variant (9)..(9): Xaa in position 9 is Ile, Leu or Val
  Variant (10)..(10): Xaa in position 10 is any amino acid
  Variant (11)..(11): Xaa in position 11 is Asp, Glu or Gln
  Variant (14)..(15): Xaa in position 14 to 15 is any amino acid
  Variant (17)..(17): Xaa in position 17 is Asn, Arg or Ser
  Variant (18)..(18): Xaa in position 18 is Ile or Leu
  Variant (20)..(21): Xaa in position 20 to 21 is any amino acid
  Variant (22)..(22): Xaa in position 22 is Phe, Trp or Tyr
  Variant (23)..(23): Xaa in position 23 is Ile or Val
  Variant (27)..(27): Xaa in position 27 is Pro or Ser
VXXQXXXLXXXATXXEXXCXXXXGWCXFW

SEQ ID NO: 149862 - protein, 29 aa, Artificial sequence
  protein pattern
  Variant (3)..(3): Xaa in position 3 is Ile or Leu
  Variant (4)..(4): Xaa in position 4 is Ala, Asp, Asn, Pro or Ser
  Variant (5)..(7): Xaa in position 5 to 7 is any amino acid
  Variant (9)..(9): Xaa in position 9 is Ala or Gly
  Variant (10)..(11): Xaa in position 10 to 11 is any amino acid
  Variant (13)..(13): Xaa in position 13 is any amino acid
  Variant (14)..(14): Xaa in position 14 is His, Lys or Arg
  Variant (15)..(15): Xaa in position 15 is any amino acid
  Variant (16)..(16): Xaa in position 16 is His or Arg
  Variant (17)..(17): Xaa in position 17 is Ala, Ser or Val
  Variant (18)..(18): Xaa in position 18 is Phe or Tyr
  Variant (25)..(25): Xaa in position 25 is any amino acid
  Variant (27)..(27): Xaa in position 27 is any amino acid
  Variant (28)..(28): Xaa in position 28 is Glu or Lys
  Variant (29)..(29): Xaa in position 29 is Phe or Tyr
LPXXXXXLXXXAXXXXXXAKALHYXEXXX

SEQ ID NO: 149863 - protein, 19 aa, Artificial sequence
  protein pattern
  Variant (5)..(5): Xaa in position 5 is Ile or Leu
  Variant (8)..(8): Xaa in position 8 is any amino acid
  Variant (11)..(12): Xaa in position 11 to 12 is Lys or Arg
  Variant (14)..(14): Xaa in position 14 is any amino acid
  Variant (15)..(15): Xaa in position 15 is Lys or Arg
  Variant (17)..(17): Xaa in position 17 is Ile or Leu
  Variant (18)..(18): Xaa in position 18 is any amino acid
  Variant (19)..(19): Xaa in position 19 is Ala, Gln or Ser
QAWDXYYXVFXXIXXQXXX

SEQ ID NO: 149864 - protein, 60 aa, Artificial sequence
  protein pattern
  Variant (3)..(8): Xaa in position 3 to 8 is any amino acid
  Variant (9)..(9): Xaa in position 9 is Ser or Thr
  Variant (10)..(10): Xaa in position 10 is any amino acid
  Variant (11)..(11): Xaa in position 11 is Asp or Glu
  Variant (14)..(14): Xaa in position 14 is any amino acid
  Variant (15)..(15): Xaa in position 15 is Asp or Glu
  Variant (17)..(19): Xaa in position 17 to 19 is any amino acid
  Variant (20)..(20): Xaa in position 20 is Phe, Ile, Leu or Met
  Variant (21)..(21): Xaa in position 21 is Ala, Gly or Ser
  Variant (22)..(24): Xaa in position 22 to 24 is any amino acid
  Variant (25)..(25): Xaa in position 25 is Ile, Leu or Met
  Variant (26)..(26): Xaa in position 26 is any amino acid
  Variant (27)..(27): Xaa in position 27 is Glu or Gln
  Variant (29)..(29): Xaa in position 29 is Ala, Pro or Ser
  Variant (30)..(31): Xaa in position 30 to 31 is any amino acid
  Variant (32)..(32): Xaa in position 32 is Ala, Cys or Ser
  Variant (33)..(33): Xaa in position 33 is Ile or Leu
  Variant (35)..(35): Xaa in position 35 is Ala or Ser
  Variant (37)..(37): Xaa in position 37 is any amino acid
  Variant (38)..(38): Xaa in position 38 is Ala, Gly, Asn, Ser, Thr or Val
  Variant (39)..(39): Xaa in position 39 is Ile or Leu
  Variant (40)..(40): Xaa in position 40 is Ala or Val
  Variant (41)..(41): Xaa in position 41 is Ala, Asp, Gly, Asn, Gln, Ser or Thr
  Variant (42)..(42): Xaa in position 42 is any amino acid
  Variant (43)..(43): Xaa in position 43 is His or Tyr
  Variant (44)..(45): Xaa in position 44 to 45 is any amino acid
  Variant (46)..(46): Xaa in position 46 is Leu or Met
  Variant (47)..(47): Xaa in position 47 is Ala, Leu or Pro
  Variant (48)..(48): Xaa in position 48 is any amino acid
  Variant (49)..(49): Xaa in position 49 is Asp, Glu or Gly
  Variant (52)..(52): Xaa in position 52 is Ala or Asn
  Variant (53)..(53): Xaa in position 53 is any amino acid
  Variant (54)..(54): Xaa in position 54 is Ala, Gly or Ser
  Variant (56)..(56): Xaa in position 56 is any amino acid
  Variant (57)..(57): Xaa in position 57 is Cys or Ser
  Variant (58)..(58): Xaa in position 58 is Cys or Val
  Variant (60)..(60): Xaa in position 60 is Ala, Asp, Gly, Asn, Ser, Thr or Val
AWXXXXXXXXXDWXXWXXXXXXXXXXXSXXXXXRXCXXXXXXXXXXXXXLFXXXFXXXWX

SEQ ID NO: 149865 - protein, 51 aa, Artificial sequence
  protein pattern
  Variant (2)..(4): Xaa in position 2 to 4 is any amino acid
  Variant (6)..(7): Xaa in position 6 to 7 is any amino acid
  Variant (9)..(9): Xaa in position 9 is Asp or Glu
  Variant (10)..(10): Xaa in position 10 is any amino acid
  Variant (12)..(14): Xaa in position 12 to 14 is any amino acid
  Variant (15)..(15): Xaa in position 15 is Ile or Leu
  Variant (16)..(16): Xaa in position 16 is any amino acid
  Variant (17)..(17): Xaa in position 17 is Phe, Ile, Leu or Val
  Variant (18)..(18): Xaa in position 18 is His or Arg
  Variant (19)..(19): Xaa in position 19 is Ala, Ser or Thr
  Variant (20)..(20): Xaa in position 20 is Ile or Leu
  Variant (22)..(23): Xaa in position 22 to 23 is any amino acid
  Variant (25)..(25): Xaa in position 25 is any amino acid
  Variant (26)..(26): Xaa in position 26 is Asp, Glu, Asn or Gln
  Variant (27)..(27): Xaa in position 27 is Asp, Asn or Ser
  Variant (28)..(30): Xaa in position 28 to 30 is any amino acid
  Variant (32)..(32): Xaa in position 32 is any amino acid
  Variant (34)..(34): Xaa in position 34 is any amino acid
  Variant (36)..(36): Xaa in position 36 is Asp, Asn or Ser
  Variant (40)..(40): Xaa in position 40 is Lys or Arg
  Variant (41)..(41): Xaa in position 41 is Asn or Ser
  Variant (42)..(42): Xaa in position 42 is Asp, Gly or Asn
  Variant (43)..(43): Xaa in position 43 is Asn, Arg or Ser
  Variant (44)..(44): Xaa in position 44 is Ile, Leu or Met
  Variant (45)..(45): Xaa in position 45 is any amino acid
  Variant (47)..(47): Xaa in position 47 is Ala, Cys or Ser
  Variant (48)..(49): Xaa in position 48 to 49 is any amino acid
  Variant (50)..(50): Xaa in position 50 is Ala, Cys, Ser or Thr
LXXXQXXVXXWXXXXXXXXXVXXPXXXXXXWXKXAXLCRXXXXXXLXXXXL

SEQ ID NO: 149866 - protein, 27 aa, Artificial sequence
  protein pattern
  Variant (3)..(3): Xaa in position 3 is any or no amino acid
  Variant (5)..(5): Xaa in position 5 is any or no amino acid
  Variant (8)..(8): Xaa in position 8 is His or Arg
  Variant (11)..(11): Xaa in position 11 is Lys or Arg
  Variant (12)..(12): Xaa in position 12 is Phe, Ile or Leu
  Variant (13)..(15): Xaa in position 13 to 15 is any amino acid
  Variant (17)..(17): Xaa in position 17 is Gly, Asn or Ser
  Variant (18)..(18): Xaa in position 18 is Asp or Asn
  Variant (20)..(20): Xaa in position 20 is any amino acid
  Variant (21)..(21): Xaa in position 21 is Asp, Glu, Ser or Thr
  Variant (23)..(23): Xaa in position 23 is any amino acid
  Variant (24)..(24): Xaa in position 24 is Phe or Tyr
  Variant (25)..(25): Xaa in position 25 is Ala, Ile, Leu or Val
  Variant (26)..(26): Xaa in position 26 is Leu or Val
VIXSXKQXPRXXXXXGXXGXXYXXXXK

SEQ ID NO: 149867 - protein, 58 aa, Artificial sequence
  protein pattern
  Variant (3)..(4): Xaa in position 3 to 4 is any amino acid
  Variant (6)..(6): Xaa in position 6 is Ala or Ser
  Variant (7)..(7): Xaa in position 7 is any amino acid
  Variant (8)..(8): Xaa in position 8 is Ala, Pro or Ser
  Variant (9)..(13): Xaa in position 9 to 13 is any amino acid
  Variant (14)..(14): Xaa in position 14 is Ile or Leu
  Variant (15)..(15): Xaa in position 15 is Phe or Leu
  Variant (16)..(16): Xaa in position 16 is any amino acid
  Variant (17)..(17): Xaa in position 17 is Ala, Ser or Thr
  Variant (18)..(18): Xaa in position 18 is Ile, Leu, Met or Val
  Variant (19)..(19): Xaa in position 19 is any amino acid
  Variant (22)..(24): Xaa in position 22 to 24 is any amino acid
  Variant (25)..(25): Xaa in position 25 is Ile or Val
  Variant (26)..(26): Xaa in position 26 is Gln or Arg
  Variant (27)..(28): Xaa in position 27 to 28 is any amino acid
  Variant (30)..(30): Xaa in position 30 is Ile, Leu, Met or Val
  Variant (31)..(33): Xaa in position 31 to 33 is any amino acid
  Variant (37)..(37): Xaa in position 37 is Ala, Ser or Val
  Variant (38)..(39): Xaa in position 38 to 39 is any amino acid
  Variant (43)..(43): Xaa in position 43 is His or Tyr
  Variant (45)..(45): Xaa in position 45 is Phe, Ile, Leu, Met or Val
  Variant (47)..(47): Xaa in position 47 is any amino acid
  Variant (48)..(48): Xaa in position 48 is Ile or Leu
  Variant (50)..(54): Xaa in position 50 to 54 is any amino acid
  Variant (55)..(55): Xaa in position 55 is any or no amino acid
  Variant (57)..(57): Xaa in position 57 is any amino acid
  Variant (58)..(58): Xaa in position 58 is Glu, Gly, Ser or Thr
FDXXLXXXXXXXXXXXXXXDEXXXXXXXAXXXXGRLXXXNPAXVXPXXRXXXXXXLXX

SEQ ID NO: 149868 - DNA, 1080 bp, Saccharomyces cerevisiae
  CDS (1)..(1080)
atgggtgttgaacaaatcttaaagagaaagaccggtgtcatcgttggtgaagatgtccacaacttattcacttacgctaaggaacacaagttcgctattccagctattaacgtcacctcttcttctactgccgtcgctgctttagaagctgctagagacagcaagtccccaatcattttgcaaacctctaacggtggtgctgcttacttcgctggtaagggtatctctaacgaaggtcaaaatgcttccatcaagggtgctattgccgctgcccactacatcagatccattgctccagcttacggtatcccagttgtcttacactctgaccactgtgccaagaagttgttgccatggttcgatggtatgttggaagctgatgaagcttacttcaaggaacacggtgaaccattattctcctcccacatgttggatttgtctgaagaaaccgatgaagaaaacatctctacttgtgtcaagtacttcaagagaatggccgctatggaccaatggttagaaatggaaatcggtattaccggtggtgaagaagatggtgttaacaacgaaaacgctgacaaggaagacttgtacaccaagccagaacaagtttacaacgtctacaaggctttgcacccaatctctccaaacttctccattgctgctgctttcggtaactgtcacggtttgtacgctggtgacatcgctttgagaccagaaatcttggctgaacaccaaaagtacaccagagaacaagttggttgcaaggaagaaaagccattgttcttggtcttccacggtggttccggttctactgtccaagaattccacactggtattgacaacggtgttgtcaaggtcaacttggacactgactgtcaatacgcttacttgactggtatcagagactacgtcttgaacaagaaggactacataatgtccccagtcggtaacccagaaggtccagaaaagccaaacaagaagttcttcgacccaagagtctgggttagagaaggtgaaaagaccatgggtgctaagatcaccaagtctttggaaactttccgtaccactaacactttataa

SEQ ID NO: 149869 - protein, 359 aa, Saccharomyces cerevisiae
MGVEQILKRKTGVIVGEDVHNLFTYAKEHKFAIPAINVTSSSTAVAALEAARDSKSPIILQTSNGGAAYFAGKGISNEGQNASIKGAIAAAHYIRSIAPAYGIPVVLHSDHCAKKLLPWFDGMLEADEAYFKEHGEPLFSSHMLDLSEETDEENISTCVKYFKRMAAMDQWLEMEIGITGGEEDGVNNENADKEDLYTKPEQVYNVYKALHPISPNFSIAAAFGNCHGLYAGDIALRPEILAEHQKYTREQVGCKEEKPLFLVFHGGSGSTVQEFHTGIDNGVVKVNLDTDCQYAYLTGIRDYVLNKKDYIMSPVGNPEGPEKPNKKFFDPRVWVREGEKTMGAKITKSLETFRTTNTL

SEQ ID NO: 149870 - DNA, 1083 bp, Aspergillus fumigatus
  CDS (1)..(1083)
atgggtatcctcgacaagctttcccgcaagtccggcgtcattgtcggcgatgacgtcctccgtctcttcgagtacgctcaggagaagaactttgcgattcccgccgttaacgtcacctcttcctccaccgtcgtcgcttgccttgaggccgctcgcgaccagaactgccccatcattctccaggtctctcagggtggtgctgcctactttgccggaaagggtgtcagcaacgatggccagaaggcctccatcgctggttctatcgccgctgcccactacatccgcagcattgctccctcctacggcattcccgtcgtcctccacaccgaccactgcgccaagaagctgcttccttggctcgacggtatgctcgatgaggatgagcgctacttcaagcagcacggcgagcccctcttctccagccacatgattgatctgtctgaggagcccgttgactacaacattgaaaccaccgccaagtacctgaagcgtgctgctcccatgaagcagtggctcgagatggaaatcggtatcactggtggtgaggaggacggtgtcaacaacgaggacgttgacaacaactccctgtacactcagcccgaggacatcctggccatctacaacgctctcgcccccatcagcccctacttctccattgccgctggtttcggtaatgtgcacggtgtctacaagcccggcaacgtccgtctgcaccccgagcttctgagcaagcaccaggcctacgtcaaggagaagatcggctccaacaaggacaagcccgtctacttcgtcttccacggtggctctggttccaccaaggaggaatacaagcaggcgatcagctacggtgtcgtcaaggtcaacctcgacaccgatatgcagtacgcctacatgtctggtgtccgtgactacattctcaacaagaaggactacctcatgagcgctgtcggcaaccccgacggcgaggacaagcccaacaagaagtacttcgatccccgtgtgtgggttcgcgagggtgagaagaccatgagcaagcgtgtgcaggttgctctggaggacttcaacactgctggccagctgtaa

SEQ ID NO: 149871 - protein, 360 aa, Aspergillus fumigatus
MGILDKLSRKSGVIVGDDVLRLFEYAQEKNFAIPAVNVTSSSTVVACLEAARDQNCPIILQVSQGGAAYFAGKGVSNDGQKASIAGSIAAAHYIRSIAPSYGIPVVLHTDHCAKKLLPWLDGMLDEDERYFKQHGEPLFSSHMIDLSEEPVDYNIETTAKYLKRAAPMKQWLEMEIGITGGEEDGVNNEDVDNNSLYTQPEDILAIYNALAPISPYFSIAAGFGNVHGVYKPGNVRLHPELLSKHQAYVKEKIGSNKDKPVYFVFHGGSGSTKEEYKQAISYGVVKVNLDTDMQYAYMSGVRDYILNKKDYLMSAVGNPDGEDKPNKKYFDPRVWVREGEKTMSKRVQVALEDFNTAGQL

SEQ ID NO: 149872 - DNA, 1080 bp, Dichelobacter nodosus VCS1703A
  CDS (1)..(1080): transl_table=11
atgacaaaaattttggacagtatcaaagccggcgtagtcaccggtgatgacgtgcaaaaaatcttctctattgccaaacaaaataattttgcgctgccggcgatgaattgcgtgggcaccaattccgtcaatgccgcgttagaaactgccgcccgcgttcgcgcgccattaattattcaattttccaacggcggcgcggcttttttcgccggcaaaggtttaaaaccagttgatggacaacgtcccgacgttttaggcgccattgccgccgcacaacatattcacactttagccgcggcttacggcgttcccgttattttgcatacggatcattgcgcgaaaaaattattgccgtggttggacggtttgcttgacgccggcgaagcgttttatcaacaacacggtaaaccgcttttttcatcacatatgcttgatttatcagaagaaccgctaaaagaaaatattgaaatttgtcaacgttatctcgaacgcatggcaaaaatcgatatgacgctggaaattgaattgggttgcaccggcggtgaagaagacggcgtggataataccggagtggataacgcaatgctttatacacaaccagaagatgtagcatttgcttatcaagaactgcgcaaaatcagcccgcggtttacaattgcggcggcatttggcaacgtgcacggcgtttacaaacccggcaacgtaaaattaacgccaaaaattttggataattcgcaaaaatacgtttcccaaaaatttggtttgccagaaaaatcattggatttcgttttccacggcggatccggttcgagtttgtccgatattcgcgaagccatcagttatggcgttgttaaaatgaatattgatacagatacgcaatgggcggcttgggaaggcgttttagaattttatcggaaaaatgaagcgtatttacaaggacaattgggcaatcccgaaggcgaagataaacccaataagaaattctatgatccgcgcgcgtggttgcggcaatcagaaaattttatttctcaacgtttggaacaagcttttgacgatttaaactgccgcgatgttttgtaa

SEQ ID NO: 149873 - protein, 359 aa, Dichelobacter nodosus VCS1703A
MTKILDSIKAGVVTGDDVQKIFSIAKQNNFALPAMNCVGTNSVNAALETAARVRAPLIIQFSNGGAAFFAGKGLKPVDGQRPDVLGAIAAAQHIHTLAAAYGVPVILHTDHCAKKLLPWLDGLLDAGEAFYQQHGKPLFSSHMLDLSEEPLKENIEICQRYLERMAKIDMTLEIELGCTGGEEDGVDNTGVDNAMLYTQPEDVAFAYQELRKISPRFTIAAAFGNVHGVYKPGNVKLTPKILDNSQKYVSQKFGLPEKSLDFVFHGGSGSSLSDIREAISYGVVKMNIDTDTQWAAWEGVLEFYRKNEAYLQGQLGNPEGEDKPNKKFYDPRAWLRQSENFISQRLEQAFDDLNCRDVL

SEQ ID NO: 149874 - DNA, 1065 bp, Mesorhizobium loti MAFF303099
  CDS (1)..(1065): transl_table=11
ttggctcgcatcacactgagacaattgctcgatcacgccgccgaatacggctatggcgtgccggccttcaacatgaacaacatggaacaaggcctcgccatcatggaggcggcggaagagaccaaatcgcctgtcatcctgcaggcaagccgcggtgcgcgtgcctatgccaatgacgtggtgctggccaagctgatcgacgcgctggtcgaaatccaccccgacatcccggtctgcatgcatctcgaccatggcaacaacgaagccacctgcgtcaccgcgatccagtacggcttcacctcggtgatgatggacggctcgctcaaggaagacggcaagtcgccggccgactacgcctacaattcgggcatcaccaagcgcgtcgtcgacatggcgcattggggcggcgtgtctgtcgaaggcgagatcggtgtgctgggatcgctggagagcggcggcggcgagcaggaagacggtcacggcgtcgaaggcgcgatcagccacgaccagctcttgaccgatccggaacaggcggtggagttcgtcaaggacacgcatgtcgatgcgttggccgtggccatgggcaccagccatggcgcctacaaattctcgcgcaagccggacggcgcggtgctggcgatgaacgtcatcgaggagatccacaggcgcctgcccaacatgcatctggtcatgcacggctcgtcctcggtgccggaggatctgcaggagatcatcaacaaatatggtggccagatgaagccgacctggggcgtgccggtggaggagatccagcgcggcatcaagcatggcgtgcgcaagatcaacatcgacaccgacaaccgcatggcgctgaccggcgcgatccgcaaagtgctgaccgagaacccgagcgagttcgacccgcgcaaatatctgacgccggcaatggctgcgatgcgcaagctctgcaaggagcgcttcgagcaattcggcaccgccggcaacgcaccgaagatcaagccgctgccggtctcggaaatggccaagcgctacaagtcgggcagcctcgacccgaaattcggctga

SEQ ID NO: 149875 - protein, 354 aa, Mesorhizobium loti MAFF303099
MARITLRQLLDHAAEYGYGVPAFNMNNMEQGLAIMEAAEETKSPVILQASRGARAYANDVVLAKLIDALVEIHPDIPVCMHLDHGNNEATCVTAIQYGFTSVMMDGSLKEDGKSPADYAYNSGITKRVVDMAHWGGVSVEGEIGVLGSLESGGGEQEDGHGVEGAISHDQLLTDPEQAVEFVKDTHVDALAVAMGTSHGAYKFSRKPDGAVLAMNVIEEIHRRLPNMHLVMHGSSSVPEDLQEIINKYGGQMKPTWGVPVEEIQRGIKHGVRKINIDTDNRMALTGAIRKVLTENPSEFDPRKYLTPAMAAMRKLCKERFEQFGTAGNAPKIKPLPVSEMAKRYKSGSLDPKFG

SEQ ID NO: 149876 - DNA, 1080 bp, Pasteurella multocida subsp. multocida str. Pm70
  CDS (1)..(1080): transl_table=11
atggctaaattattagatattgtaaaacccggcgttgttactggtgatgatgttcagaaagtatttgcatatgcaaaagcaaacaattttgcgattccagcggtaaactgcgtgggttcagactctgtaaatgccgtattagaaaccgcagcacgtgtcaaagcacctgtgattattcaattctcaaatggtggtgcacaattttatgctggtaaaggcttaaaaccagcaagtggtgcacgtacagatgtactgggtgccattgcaggggcaaaacatgttcacgcgttggcagaagaatatggtgtaccggtgattttacatactgaccatgcagcgaaaaaacttcttccatggattgacggtttattagaggcgggtgaagaacattttgctgaaacaggcaaaccattattctcttctcacatgattgatctttctgaagaacctatggaagaaaacatggctatttgccgtgaatacctcgcgcgtatggacaaaatggggatgacgttagaaatcgaaatcggtatcacgggtggtgaagaagatggagttgataactctgatgtagaagaatctaaactttatacgcaaccagaagatgtactttatgtttatgatcaattaaacccagtgagcccgcgtttcacagtcgctgcggcattcggtaacgtacatggtgtttataagccgggtaatgtgaaattaaaaccgtctatcttaggtgcatcacaagaatttgtttctaaagaacgtggtttgccagcgaaatcaatcgactttgtcttccatggtggttcaggctcaagccgtgaagagatccgcgaagcgatcagttacggtgcgatcaaaatgaatatcgataccgacacacaatgggcatcttgggaagggattttgaaattctacaacgcaaatcaagattatcttcaaggtcaattaggtaacccagaaggtcctgatgcaccaaacaaaaaatactatgatccacgtgtttggttacgtaaaatggaagaatccatgtctaaacgtttagaacaatctttcgaagatttgaattgtattgatgttctataa

SEQ ID NO: 149877 - protein, 359 aa, Pasteurella multocida subsp. multocida str. Pm70
MAKLLDIVKPGVVTGDDVQKVFAYAKANNFAIPAVNCVGSDSVNAVLETAARVKAPVIIQFSNGGAQFYAGKGLKPASGARTDVLGAIAGAKHVHALAEEYGVPVILHTDHAAKKLLPWIDGLLEAGEEHFAETGKPLFSSHMIDLSEEPMEENMAICREYLARMDKMGMTLEIEIGITGGEEDGVDNSDVEESKLYTQPEDVLYVYDQLNPVSPRFTVAAAFGNVHGVYKPGNVKLKPSILGASQEFVSKERGLPAKSIDFVFHGGSGSSREEIREAISYGAIKMNIDTDTQWASWEGILKFYNANQDYLQGQLGNPEGPDAPNKKYYDPRVWLRKMEESMSKRLEQSFEDLNCIDVL

SEQ ID NO: 149878 - DNA, 897 bp, Lactococcus lactis subsp. lactis Il1403
  CDS (1)..(897): transl_table=11
atggcaatcgtttcagcagaaaaattcgtacaagccgctcgtgataacggatacgctatcggtggtttcaacacaaacaaccttgaatggactcaagctatcttgcgtgcagcagaagctaaaaagactccagtattgatccaaacttctatgggtgcggctaaatacatgggtggttacaaaatgtgtaaactcctcattgaaactcttgtagaatcaatgggaatcacagttccagttgctattcaccttgaccacggtcattttgatgatgctttggaatgtatcgaagttggttactcatcattgatgtttgatggttcacatcttccaatcgaagaaaaccttaaacttgctgaagaagtaatcgctaaagctcatgctaaaggcatctcagttgaatgtgaagttggttcaattggtggtgaagaagacggtatcgttggtgaaggtgaacttgctcctatcgatgatgcagttgcaatggctaaacttggtgttgacttccttgcagcaggtatcggtaacattcacggtccttacccagaaaactggaaaggtcttcacatcgatcaccttgaaaaattgaacaaagcacttgttgaagctatgggacacaatgtgccaatcgtacttcacggtggttctggtatccctgatgatcaaatcagagaagctatcgctaatggtgtagctaaagttaacgttaatactgaatgccaacttgctttcgcagctgctactcgtaaattcgttaatgaatttgatgctaatgaagcagaatacatgaagaaaaaacttttcgacccacgtaaattcttgaaacctggtttcgatgcaattactgcgtctgttgaagaacgtatcgatgtattcggttcagctaacaaagcttaa

SEQ ID NO: 149879 - protein, 298 aa, Lactococcus lactis subsp. lactis Il1403
MAIVSAEKFVQAARDNGYAIGGFNTNNLEWTQAILRAAEAKKTPVLIQTSMGAAKYMGGYKMCKLLIETLVESMGITVPVAIHLDHGHFDDALECIEVGYSSLMFDGSHLPIEENLKLAEEVIAKAHAKGISVECEVGSIGGEEDGIVGEGELAPIDDAVAMAKLGVDFLAAGIGNIHGPYPENWKGLHIDHLEKLNKALVEAMGHNVPIVLHGGSGIPDDQIREAIANGVAKVNVNTECQLAFAAATRKFVNEFDANEAEYMKKKLFDPRKFLKPGFDAITASVEERIDVFGSANKA

SEQ ID NO: 149880 - DNA, 1155 bp, Escherichia coli O157:H7 EDL933
  CDS (1)..(1155): transl_table=11
gtgagcgaacgcagacgcagcacatgcaacttgaagtatgacgagtataaggcccgacgatacaggacaagagacatgtctaagatttttgatttcgtaaaacctggcgtaatcactggtgatgacgtacagaaagttttccaggtagcaaaagaaaacaacttcgcactgccagcagtaaactgcgtcggtactgactccatcaacgccgtactggaaactgctgctaaagttaaagcgccggttatcgttcagttctccaacggtggtgcttcctttatcgctggtaaaggcgtgaaatctgacgttccgcagggtgctgctatcctgggcgcgatctctggtgcgcatcacgttcaccagatggctgaacattatggtgttccggttatcctgcacactgaccactgcgcgaagaaactgctgccgtggatcgacggtctgctggacgcgggtgaaaaacacttcgcagctaccggtaagccgctgttctcttctcacatgatcgacctgtctgaagaatctctgcaagagaacatcgaaatctgctctaaatacctggagcgcatgtccaaaatcggcatgactctggaaatcgaactgggttgcaccggtggtgaagaagacggcgtggacaacagccacatggacgcttctgcactgtacacccagccggaagacgttgattacgcatacaccgaactgagcaaaatcagcccgcgtttcaccatcgcagcgtccttcggtaacgtacacggtgtttacaagccgggtaacgtggttctgactccgaccatcctgcgtgattctcaggaatatgtttctaagaaacacaacctgccgcacaacagcctgaacttcgtattccacggtggttccggttctactgctcaggaaatcaaagactccgtaagctacggcgtagtgaaaatgaacatcgataccgatacccaatgggcaacctgggaaggcgttctgaactactacaaagcgaacgaagcttatctgcagggtcagctgggtaacccgaaaggcgaagatcagccgaacaagaaatactacgatccgcgcgtatggctgcgtgccggtcagacttcgatgatcgctcgtctggaaaaagcattccaggaactgaacgcgatcgacgttctgtaa

SEQ ID NO: 149881 - protein, 384 aa, Escherichia coli O157:H7 EDL933
MSERRRSTCNLKYDEYKARRYRTRDMSKIFDFVKPGVITGDDVQKVFQVAKENNFALPAVNCVGTDSINAVLETAAKVKAPVIVQFSNGGASFIAGKGVKSDVPQGAAILGAISGAHHVHQMAEHYGVPVILHTDHCAKKLLPWIDGLLDAGEKHFAATGKPLFSSHMIDLSEESLQENIEICSKYLERMSKIGMTLEIELGCTGGEEDGVDNSHMDASALYTQPEDVDYAYTELSKISPRFTIAASFGNVHGVYKPGNVVLTPTILRDSQEYVSKKHNLPHNSLNFVFHGGSGSTAQEIKDSVSYGVVKMNIDTDTQWATWEGVLNYYKANEAYLQGQLGNPKGEDQPNKKYYDPRVWLRAGQTSMIARLEKAFQELNAIDVL

SEQ ID NO: 149882 - DNA, 867 bp, Clostridium perfringens str. 13
  CDS (1)..(867): transl_table=11
atggcattagttaacgcaaaagaaatgttaaataaagcaagagaaggaaaatacgctgttggtcaattcaacataaacaacttagaatggacaaaagctatattattaactgctcaagaaaataactcaccagttatattaggagtatcagaaggtgctgctaaatacatgtgtggattcaaaacaatagttggaatggttaacggaatgttagaagaattaaaaataactgttcctgtagcattacacttagatcacggtagctaccaaggagctatagatgctatggatgctggattctcatcagtaatgttcgatggatcacactactcaatcgaagaaaacatagttaaaactaaagaaataatcaacttagctgctgctaaaaacgtatcagttgaagctgaagttggatcaatcggtggagaagaagacggtgttgttggagctggtgaaatcgctgatcctgctgaatgtaaacaaatcgctgaattaggagttactatgttagctgctggtatcggaaacattcacggaaaataccctgcaaactgggctggattaaacttcgaagctttagctaacattaaagctgctactggagatatgcctttagtattacacggtggtactggaatcccttcagatatgatcgcagaagctatatcattaggagtatcaaaaataaatgttaatactgagtgtcaattatcatttgctgaagctactcgtaaatatatagaagctggaaaagacttagaaggaaaaggatttgacccaagaaaattattaaatcctggattcgaagctataaaagctacagttaaagaaaaaatggaattattcggttcagtaaacagagcttaa

SEQ ID NO: 149883 - protein, 288 aa, Clostridium perfringens str. 13
MALVNAKEMLNKAREGKYAVGQFNINNLEWTKAILLTAQENNSPVILGVSEGAAKYMCGFKTIVGMVNGMLEELKITVPVALHLDHGSYQGAIDAMDAGFSSVMFDGSHYSIEENIVKTKEIINLAAAKNVSVEAEVGSIGGEEDGVVGAGEIADPAECKQIAELGVTMLAAGIGNIHGKYPANWAGLNFEALANIKAATGDMPLVLHGGTGIPSDMIAEAISLGVSKINVNTECQLSFAEATRKYIEAGKDLEGKGFDPRKLLNPGFEAIKATVKEKMELFGSVNRA

SEQ ID NO: 149884 - DNA, 1080 bp, Yersinia pestis KIM
  CDS (1)..(1080): transl_table=11
atgtctaaaatttttgatttcgtaaaaccaggtgtcatcacaggtgatgacgtgcagaaagttttcgcagtagcaaaagaaaataactttgctctgccagcagttaactgtgtaggcactgactctatcaacgcagtgctggaaaccgcagccaaagtgcgcgcacctgttatcgttcagttctccaacggcggcgctgcgtttatcgcaggtaaaggcgtgaagactgatgctccacaaggtgctgcaatcttgggtgctatttctggtgcacaccatgtacatcagatggctgaacattacggtgttccggttattctgcacaccgaccattgcgcgaagaaattactgccatggttagatggtttactggatgcgggtgagaaacactttgcggcgaccggcaagccactgttctcttctcacatgatcgacctgtctgaagagtctctggaagagaacattgaaatttgcagcaagtacctgactcgtatgtcaaaaatcggtatgacactggaaattgaactgggttgtactggtggtgaagaagatggtgtggataacagccacatggacgcttcttctctgtacactcagccacaagatgttgattacgcatacgaaaaactgaacgctatcagcccacgtttcaccatcgctgcctcttttggtaacgtacacggtgtttacaagccaggtaacgttaaactgaccccaactattctgcgcgattctcaggattatgtttccaagaaacacaatctgccgcataacagcctgaacttcgtgttccatggcgggtctggttctactgctgaagagatcaaagaagcagtaagctacggcgtagttaaaatgaatatcgacaccgatacccagtgggcaacgtgggaaggtattctgaactattacaaaaagaacgaaggctatctgcaaggccaactgggtaacccagaaggtgctgacaagccgaacaagaaatactacgatccacgcgtatggttgcgtgctgcccaggtgacaatgattactcgtctggaactggcattcaaagaactgaacgccatcgacgtactgtaa

SEQ ID NO: 149885 - protein, 359 aa, Yersinia pestis KIM
MSKIFDFVKPGVITGDDVQKVFAVAKENNFALPAVNCVGTDSINAVLETAAKVRAPVIVQFSNGGAAFIAGKGVKTDAPQGAAILGAISGAHHVHQMAEHYGVPVILHTDHCAKKLLPWLDGLLDAGEKHFAATGKPLFSSHMIDLSEESLEENIEICSKYLTRMSKIGMTLEIELGCTGGEEDGVDNSHMDASSLYTQPQDVDYAYEKLNAISPRFTIAASFGNVHGVYKPGNVKLTPTILRDSQDYVSKKHNLPHNSLNFVFHGGSGSTAEEIKEAVSYGVVKMNIDTDTQWATWEGILNYYKKNEGYLQGQLGNPEGADKPNKKYYDPRVWLRAAQVTMITRLELAFKELNAIDVL

SEQ ID NO: 149886 - DNA, 1068 bp, Bifidobacterium longum NCC2705
  CDS (1)..(1068): transl_table=11
atgacgatcgcaacaccggaacgctatgccgaaatgctcgaggccgcccgccgaggcggttacgcctatccagccatcaacgtaaccagctcacagacactgaatgctgcgttgaagggcttcgcagacgccgagtccgacggcatcatccagatttccgtgggaggcgcggcctacgtctccggcaggggggtcaatgatcgcgttaccggctcgctggcgctggcggctttcgcacatgaagtggctgcgaaatacccgaacatcaccatcgctctgcacaccgatcactgcgccaagcagtatctggatgagtgggcgcgtcctctgctcgcgcatgaggccgatcaggtggcacgaggccaggagcctacattccagtcgcatatgtgggatggctccaccgtgccgctcaaggaaaatctggacatcgccgaggaactgctcgacaagtcgcagaaggcgcacaccgtgctcgaaatcgaaatcggcgcggtcggcggtgaggaagacggtcactccgccgaaatcaatgaaaagctgtattccactccggaagatggcctcgaagtcgcccgccgactgggtttgggcgaacgtggccggtacatggccgctttcacattcggcaatgtgcatggtgcctacaagcccggcgtggtcaagctgcgtccgtcgctactcggcgacattcaggcgcgtgtggcgcgcgcggtggccgaaggcgagttgcctagcgcggccggcatagtcgatttccccaacggcaagccgtttgagctggtgttccacggcggctccggttcacgcccggaagaaatcgccgaagctgtaagctacggcgtgatcaagatgaacatcgacaccgatacccagtacgccttcacccgtccaatcgccgaccacgtgttcgagaactacgacaaggtgctgaagatcgacggcgaagtgggcgagaagaagttctacgatccgcgttcttggggccgtaaggctgaggattccatgtccgcccgcgtggtcgaggcttgccggcagctgggttccgcgggcaaagcgctcaaatag

SEQ ID NO: 149887 - protein, 355 aa, Bifidobacterium longum NCC2705
MTIATPERYAEMLEAARRGGYAYPAINVTSSQTLNAALKGFADAESDGIIQISVGGAAYVSGRGVNDRVTGSLALAAFAHEVAAKYPNITIALHTDHCAKQYLDEWARPLLAHEADQVARGQEPTFQSHMWDGSTVPLKENLDIAEELLDKSQKAHTVLEIEIGAVGGEEDGHSAEINEKLYSTPEDGLEVARRLGLGERGRYMAAFTFGNVHGAYKPGVVKLRPSLLGDIQARVARAVAEGELPSAAGIVDFPNGKPFELVFHGGSGSRPEEIAEAVSYGVIKMNIDTDTQYAFTRPIADHVFENYDKVLKIDGEVGEKKFYDPRSWGRKAEDSMSARVVEACRQLGSAGKALK

SEQ ID NO: 149888 - DNA, 1035 bp, Corynebacterium efficiens YS-314
  CDS (1)..(1035): transl_table=11
atgccaatcgcaactcccgaggtctataacgagatgctcgatcgcgccaaggagggcggcttcgccttccccgcgatcaactgcacgtcctcggaaaccatcaacgctgcgctgaagggcttcgctgaggcggagtccgacggcatcatccagttctccaccggtggtgctgagttcggttccggcctggctgtgaagaacaaggtcaagggtgctgtcgcactggccgccttcgcccacgaggctgccaagagctacggcatcaacgtcgccctgcacaccgaccactgccagaaggaggtcctcgacgagttcgtgcgaccactgctggccatctcccaggagcgcgttgaccgcggcgagctgcccctcttccagtcccacatgtgggatggttccgctgtcccgatcgatgagaacctctccatcgcccaggagctgctggccaagtccaaggcagccaacatcatcctcgagatcgagatcggtgttgtcggtggcgaggaggacggcgtcgaggccaaggccggcgccaacctctacaccacccctgaggacttcgagaagaccatcgacgccctcggcaccggtgagaacggccgttacctgctggccgccaccttcggcaacgtccacggcgtgtacaagccgggcaatgtgaagctgcgtccggagatcctcctcgagggtcagcaggtcgcccgcaagaagctcggcctggccgatgacgcgctgccgttcgacttcgtcttccacggtggctccggctccgagaaggagaagatcgaggaggccctgcgttatggtgtcatcaagatgaacgtggacaccgacacccagtacgccttcacccgcccgatcgcatcccacatgttcgagaactacgacggtgtgctgaagatcgacggtgaggtcggaaacaagaaggcctacgacccacgctcctacctgaagaaggctgagcagtccatgtccgagcgcgtcatcgagtcctgccaggacctccactccgtgggcaagaccaccgccaagtag

SEQ ID NO: 149889 - protein, 344 aa, Corynebacterium efficiens YS-314
MPIATPEVYNEMLDRAKEGGFAFPAINCTSSETINAALKGFAEAESDGIIQFSTGGAEFGSGLAVKNKVKGAVALAAFAHEAAKSYGINVALHTDHCQKEVLDEFVRPLLAISQERVDRGELPLFQSHMWDGSAVPIDENLSIAQELLAKSKAANIILEIEIGVVGGEEDGVEAKAGANLYTTPEDFEKTIDALGTGENGRYLLAATFGNVHGVYKPGNVKLRPEILLEGQQVARKKLGLADDALPFDFVFHGGSGSEKEKIEEALRYGVIKMNVDTDTQYAFTRPIASHMFENYDGVLKIDGEVGNKKAYDPRSYLKKAEQSMSERVIESCQDLHSVGKTTAK

SEQ ID NO: 149890 - DNA, 1164 bp, Escherichia coli CFT073
  CDS (1)..(1164): transl_table=11
gtgactggggtgagcgaacgcagacgcagcacatgcaacttgaagtatgacgagtataaggcccgacgatacaggacaagagacatgtctaagatttttgatttcgtaaaacctggcgtaatcactggtgatgacgtacagaaagttttccaggtagcaaaagaaaacaacttcgcactgccagcagtaaactgcgtcggtactgactccatcaacgccgtactggaaaccgcagctaaagttaaagcgccggttatcgttcagttctccaacggtggtgcttcttttatcgctggtaaaggcgtgaaatctgacgttccgcagggcgctgctatcctgggtgcgatctctggtgcgcatcacgttcaccagatggctgaacattatggtgttccggttatcctgcacaccgaccactgcgcgaagaaactgctgccgtggatcgacggtctgctggacgcgggtgaaaaacacttcgctgctaccggtaagccgctgttctcttctcacatgattgacctgtctgaagaatctctgcaagagaacattgaaatctgctctaaatacctggagcgcatgtccaaaatcggcatgactctggaaatcgaactgggttgcaccggtggtgaagaagacggcgtggacaacagccacatggacgcttctgcactgtacacccagccggaagacgttgattacgcatacaccgagctgagcaaaatcagcccgcgtttcaccatcgctgcgtccttcggtaacgtacacggagtttacaagccgggtaacgttgttctgactccgaccatcctgcgcgactctcaggaatatgtttctaagaaacacaacctgccgcacaacagcctgaacttcgtattccacggtggttccggttctactgctcaggaaatcaaagactccgtaagctacggcgtagtgaaaatgaacatcgataccgatacccaatgggcaacctgggaaggtgttctgaactactacaaagaaaacgaagcttacctgcaaggccagctgggcaacccgaaaggcgaagatcagccgaacaagaaatactacgatccgcgcgtatggctgcgtgccggtcagacttcgatgatcgctcgtctggaaaaagcattccaggaactgaacgcgatcgacgttctgtaa

SEQ ID NO: 149891 - protein, 387 aa, Escherichia coli CFT073
MTGVSERRRSTCNLKYDEYKARRYRTRDMSKIFDFVKPGVITGDDVQKVFQVAKENNFALPAVNCVGTDSINAVLETAAKVKAPVIVQFSNGGASFIAGKGVKSDVPQGAAILGAISGAHHVHQMAEHYGVPVILHTDHCAKKLLPWIDGLLDAGEKHFAATGKPLFSSHMIDLSEESLQENIEICSKYLERMSKIGMTLEIELGCTGGEEDGVDNSHMDASALYTQPEDVDYAYTELSKISPRFTIAASFGNVHGVYKPGNVVLTPTILRDSQEYVSKKHNLPHNSLNFVFHGGSGSTAQEIKDSVSYGVVKMNIDTDTQWATWEGVLNYYKENEAYLQGQLGNPKGEDQPNKKYYDPRVWLRAGQTSMIARLEKAFQELNAIDVL

SEQ ID NO: 149892 - DNA, 891 bp, Mycoplasma penetrans HF-2
  CDS (1)..(891): transl_table=4
atgattactaatactaaatacccttttgtaagtatgacaaaaatgttagcagatgctaaaaaaggaaaatatgcagttgctcacattaatacaaataatttagaatgaacaaaagcaattttaacaactgctcaagaaacaaatactccaattattattggtttatctgaaggagctgctaaataccaatgtggttataaaactgtagctgctatgactgctgcaatgattgaaaatttaaagataactgttccagttgtaatgcatttagatcatggttcatacaatgcttgtattgaagctattgaagctggatttagttcagttatgtttgatggatcacatgaaccatttgcagacaactacaaaaaagttaatgacttactttcaattattggaaatagagacattagcttagaggctgaagttggaacaattggtggtgaagaagatgggattgttggtaatggtgaattagctgatcctgctgaatgtgaaaaaattgctaaattacctattactgtattagctgctggaattggtaatatccatggtttataccctgaaaactgagctggattaaactttgaacaattacaaaaagtaagttcagtaattggtaacattggtgttactttacatggtggtacaggtattcctgatgaccaaatcaaaaaggcaattgaattaggtgttgtaaaaattaatgtaaacacagaatgtcaagtagctttccaagaagcaactagaaaatatgttgaagaaggtaaagatttagacactgttaaaaaaggtttcgatcctagaaaattattaaaaccaggatatgaagctattaaagctaaaattttagaaaaaataactttatttggttctattaacaaagcttaa

SEQ ID NO: 149893 - protein, 296 aa, Mycoplasma penetrans HF-2
MITNTKYPFVSMTKMLADAKKGKYAVAHINTNNLEWTKAILTTAQETNTPIIIGLSEGAAKYQCGYKTVAAMTAAMIENLKITVPVVMHLDHGSYNACIEAIEAGFSSVMFDGSHEPFADNYKKVNDLLSIIGNRDISLEAEVGTIGGEEDGIVGNGELADPAECEKIAKLPITVLAAGIGNIHGLYPENWAGLNFEQLQKVSSVIGNIGVTLHGGTGIPDDQIKKAIELGVVKINVNTECQVAFQEATRKYVEEGKDLDTVKKGFDPRKLLKPGYEAIKAKILEKITLFGSINKA

SEQ ID NO: 149894 - DNA, 1077 bp, Vibrio parahaemolyticus RIMD 2210633
  CDS (1)..(1077): transl_table=11
atgtctaagatcttcgacttcgtaaaaccaggtgttatctctggcgatgacgttcagaaagtatttgaagttgcaaaagaaaaccactttgcacttccagcagtaaactgtgttggtactgactctgtaaacgcagtacttgaagcagctgcaaaagttaaagctccagttatcgttcagttctctaacggtggcgctgctttctttgctggtaaaggtctaaaacttgaaggtcaagaagctcaaatcctaggtgctgttgctggtgcgaaatacgttcacgctgtagctgaagcttacggtgttccagtaatcctacacactgaccacgctgctaagaaacttctaccatggatcgacggtctactagacgctggtgaagagtacttcgcgcaaactggtaaacctctattctcttctcacatgatcgacctttctgaagagtctctagaagagaacatcgaaatttctgctaagtacctagagcgcatggctaaaatgaacatgactctagaaatcgaacttggttgtactggtggtgaagaagacggcgttgacaactctgatatggacgcgtctgagctatacacttctccagaagacgttgcatacgcatacgagaaactaaacgctatcagccaccgtttcactatcgcagcatctttcggtaacgtacacggcgtttacaagccaggtaacgttgttctaactccaactatcctacgtgactctcaagcgtacgtttctgagaaattcggtcttccagcgaactctctaaacttcgtattccacggtggttctggttcttctctagaagaaatccgtgaatctatcggctacggtgttatcaaaatgaacatcgatacagatacacagtgggcaacttgggatggtatccgtcagtacgaagctgaaaaccacgattacctacaaggtcaaatcggtaacccaactggcgaagacgcgccaaacaagaagtactacgatccacgcgtatggctacgcgctggtcaagcttcaatggttactcgtcttgagcaagcatttgctgaccttaacgcaatcgacgtactataa

SEQ ID NO: 149895 - protein, 358 aa, Vibrio parahaemolyticus RIMD 2210633
MSKIFDFVKPGVISGDDVQKVFEVAKENHFALPAVNCVGTDSVNAVLEAAAKVKAPVIVQFSNGGAAFFAGKGLKLEGQEAQILGAVAGAKYVHAVAEAYGVPVILHTDHAAKKLLPWIDGLLDAGEEYFAQTGKPLFSSHMIDLSEESLEENIEISAKYLERMAKMNMTLEIELGCTGGEEDGVDNSDMDASELYTSPEDVAYAYEKLNAISHRFTIAASFGNVHGVYKPGNVVLTPTILRDSQAYVSEKFGLPANSLNFVFHGGSGSSLEEIRESIGYGVIKMNIDTDTQWATWDGIRQYEAENHDYLQGQIGNPTGEDAPNKKYYDPRVWLRAGQASMVTRLEQAFADLNAIDVL

SEQ ID NO: 149896 - DNA, 1023 bp, Streptomyces avermitilis MA-4680
  CDS (1)..(1023): transl_table=11
atgcccatcgcaacccccgaggtctacaacgagatgctcgaccgggcgaaggcaggcaagttcgcctacccggccatcaacgtgacctcgacccagaccctgcacgctgcgctgcgcggcttcgcggaggccgagagcgacggcatcgtccagatctccaccggtggtgcggagttcctgggtggtcagtacaagaaggacatggtcaccggcgccgtggcgctggccgagttcgcgcacatcgtcgccgagaagtacccggtcacggtcgccctgcacacggaccactgcccgaaggacaagctcgacgggtacgtccgtccgctgctcgcgatctccgaggagcgcgtcaaggccggccggaacccgctgttccagtcgcacatgtgggacggctcggcggagaccctcgccgacaacctggccatcgcgcaggagctgctcgagaaggcccgcgccgcgaagatcatcctcgaggtggagatcaccccgaccggcggcgaggaagacggcgtcacccacgagatcaacgactcgctgtacacgacggtcgaggacgcgatccgcacggcggaggcgctgggcctgggcgagaagggccgctacctgctggccgcgtccttcggcaacgtgcacggtgtgtacaagccgggcaacgtcgtgctccgcccggagctcctgaaggagctcaacgagggcgtggccgcgaagttcggcaaggccgacccgttcgacttcgtcttccacggcggctccggctccacggaggccgagatccgcacggccctggagaacggcgtcgtcaagatgaacatcgacaccgacacccagtacgcgttcacgcgtccggtcgccgaccacatgttccgcaactacgacggcgtcctgaaggtcgacggcgaggtcggcgacaagaagacctacgacccgcgtacgtggggcaagctggccgaggcgtcgatggccaagcgcgtcacggaggcctgcgcgaacctgcgctcgacgggcacgaagatcaagtaa

SEQ ID NO: 149897 - protein, 340 aa, Streptomyces avermitilis MA-4680
MPIATPEVYNEMLDRAKAGKFAYPAINVTSTQTLHAALRGFAEAESDGIVQISTGGAEFLGGQYKKDMVTGAVALAEFAHIVAEKYPVTVALHTDHCPKDKLDGYVRPLLAISEERVKAGRNPLFQSHMWDGSAETLADNLAIAQELLEKARAAKIILEVEITPTGGEEDGVTHEINDSLYTTVEDAIRTAEALGLGEKGRYLLAASFGNVHGVYKPGNVVLRPELLKELNEGVAAKFGKADPFDFVFHGGSGSTEAEIRTALENGVVKMNIDTDTQYAFTRPVADHMFRNYDGVLKVDGEVGDKKTYDPRTWGKLAEASMAKRVTEACANLRSTGTKIK

SEQ ID NO: 149898 - DNA, 1071 bp, Wigglesworthia glossinidia endosymbiont of Glossina brevipalpis
  CDS (1)..(1071): transl_table=11
atgtctaacattttagattcaataaatacaggcgtgatttatggaaaagatatagaaaaattattttcttttgctaaagaaaaaaaatttgctataccagcaataaattgtattggtactgattctataaatgcagcgttagaggccgcatctatatatagatctccaattataattcaattttctcatggagggtcatcatttatagcaggaaaaaaaatgaattgcaacaaaggtgcaattttaggagcgatatctggagctttgcatgttcataacatatcaaaagaatacaaaataccagtaatattacataccgatcattgttctaaaaacattttaccttggatagatgaactattaaaagaaagtgaaaaaagattttttaattttggaaagccattattttcttctcatatgatagatttatcttcagaaccattggaagaaaatataaaaattagtaaaaaatatttagaaaaaatgaaaagattgaatattattctagaaatagaactagggtgtactggaggtgaagaagatggaatcataggggaaaaagcaaatgataataaattatacaccaacccaaaagatgtttgttatgcatatgaaaatttaacaaaagttggatcaaatttcattgtagcagcttcttttggaaactgtcacggagtatataatccaggaaatgtaaaattaaaaccttgtatattacagttgtctcaagaatatgtttctaaaaaatttagattaaataaaaatccattaaatcttgtttttcacggaggatcaggatcttcatatgaagatataaaaaaatctattgaatatggagtaataaaaatgaatattgatacagatacacaatgggcaacatggaatggagttttaaatttttataaaaaaaataaaaattatcttaaatctcaattgggaaatccggaaggtaaaaataaaccaaataaaaaattttatgacccaagaaattggattagtcatgctaaaaattctatgataataaaattaaaaagcatatttaaattattaaattctataaatgttttataa

SEQ ID NO: 149899 - protein, 356 aa, Wigglesworthia glossinidia endosymbiont of Glossina brevipalpis
MSNILDSINTGVIYGKDIEKLFSFAKEKKFAIPAINCIGTDSINAALEAASIYRSPIIIQFSHGGSSFIAGKKMNCNKGAILGAISGALHVHNISKEYKIPVILHTDHCSKNILPWIDELLKESEKRFFNFGKPLFSSHMIDLSSEPLEENIKISKKYLEKMKRLNIILEIELGCTGGEEDGIIGEKANDNKLYTNPKDVCYAYENLTKVGSNFIVAASFGNCHGVYNPGNVKLKPCILQLSQEYVSKKFRLNKNPLNLVFHGGSGSSYEDIKKSIEYGVIKMNIDTDTQWATWNGVLNFYKKNKNYLKSQLGNPEGKNKPNKKFYDPRNWISHAKNSMIIKLKSIFKLLNSINVL

SEQ ID NO: 149900 - DNA, 1077 bp, Haemophilus ducreyi 35000HP
  CDS (1)..(1077): transl_table=11
atggcattattagatatcgtaaaacccggtgtagtaacaggcgatgatgttcaaaaaatctttgcgtatgctaaagcaaataattttgcaattccagccgttaactgtgtaggttctaattcagtcaataccgttttagaaactgctgcacgcgttaaagcccccgttattattcaattttcgaatggtggggcttcattttatgcaggcaaaggcatcaaaccaacaagcggggcaagggcggatgtattaggtgcgattgctggtgctaagcaagtacatttactggctgaagaatatggtgtgcccgttatcttacataccgatcacgctgccaaaaaattattaccttggatcgatagcctattagaagcaagtgagaaacattttgctgaaacgggtaaaccattattttcttcacatatgcttgatttatctgaagaaccaatggaagagaatatggcgatttgccgtgaataccttgcacgaatgagcaaaatggatatgacgctagaaatcgaaattggtattaccggcggtgaagaagatggcgttgataattctaatgtagatgagtcgcgtttatatactcaacccgaagatgtattatatgtttatgatcaattacatccgatcagcccgcgatttaccatagcggcagcctttgggaatgtacacggtgtttataaaccaggtaatgtgaagttaaaaccatctattttaggtgattcacaagaatttgtgtctgcacaacgtaatttacctgcaaaatcaattaattttgtgttccatggtggctcaggatcatcacgcgaagagatccgccaagcgatcagttatggtgcaatcaaaatgaatattgatactgatacacaatgggcatcgtgggacggtattttaaacttctacaaagcaaatgaagcatatctgcaaggtcaattaggcaatccggacggccctagcgcaccaaacaaaaaatattatgatccacgtgtttggttacgtaaaatggaagaatctatgtcaaaacgcttagaacaatctttcgaagacttaaactgcataaatgtattataa

SEQ ID NO: 149901 - protein, 358 aa, Haemophilus ducreyi 35000HP
MALLDIVKPGVVTGDDVQKIFAYAKANNFAIPAVNCVGSNSVNTVLETAARVKAPVIIQFSNGGASFYAGKGIKPTSGARADVLGAIAGAKQVHLLAEEYGVPVILHTDHAAKKLLPWIDSLLEASEKHFAETGKPLFSSHMLDLSEEPMEENMAICREYLARMSKMDMTLEIEIGITGGEEDGVDNSNVDESRLYTQPEDVLYVYDQLHPISPRFTIAAAFGNVHGVYKPGNVKLKPSILGDSQEFVSAQRNLPAKSINFVFHGGSGSSREEIRQAISYGAIKMNIDTDTQWASWDGILNFYKANEAYLQGQLGNPDGPSAPNKKYYDPRVWLRKMEESMSKRLEQSFEDLNCINVL

SEQ ID NO: 149902 - DNA, 1077 bp, Candidatus Blochmannia floridanus
  CDS (1)..(1077): transl_table=11
atggttaaaatttgtaattttattaaacctggggtggttgttggcgatgatgtacagagattatttaatttagcaaaaaaaaataattttgcattacctgctgtgaattgtattggtatggattcaattaatgctgctttagaagcggctgctaatatgaaatctccaattattttacaattttctagacaaggatcagcgtttatggctggatatggtttaaatcaccggagttgttctgcatctgttttaggagctgtcgctggtagtttatatgtacatcatatatctagtcattatggtattccagtgattttgcatactgatcattgtacaaaaaaattcttaccgtggattgataatttattagatttaagtgagaagaatttttatgaaactggacgtccgttattttcctctcatatgattgatttatctaaagaatctttagaagaaaatattaaagttagctcagtatatttaaatagaatggataaattaaaaatgactttagaaatagagttaggatatactggaggggaagaagatggtattaataatgataatgtagatctttctttgttatatactactccagaagatgtagcgtatgcttatgaaaaattacatgttattagcccaagatttatgattgctgcttcttttggtaatgtgcatggagtatatcgaccgggtaatgttcatttagatcctaatattcttcatatgactcaacggtatatttcaaaaaagttcgggttacctaaaaattatttaaatctagtatttcatggaggatctggttctactgtagaagaaattaaagagtcaattggatatggaatagtaaaattaaatattgatactgatatacaatgggctacttggtctggggttctaggatattatcaaaaaaataaagattttttgaaaactcaattaggtaatgtatatggagatgaccaaccaaataaaaaattttatgatcctagatcatggattagggcaggtcaagaatcaatgattaaatatttagaagaaatgtttgttatattgaatgcaactgatgttttataa

SEQ ID NO: 149903 - protein, 358 aa, Candidatus Blochmannia floridanus
MVKICNFIKPGVVVGDDVQRLFNLAKKNNFALPAVNCIGMDSINAALEAAANMKSPIILQFSRQGSAFMAGYGLNHRSCSASVLGAVAGSLYVHHISSHYGIPVILHTDHCTKKFLPWIDNLLDLSEKNFYETGRPLFSSHMIDLSKESLEENIKVSSVYLNRMDKLKMTLEIELGYTGGEEDGINNDNVDLSLLYTTPEDVAYAYEKLHVISPRFMIAASFGNVHGVYRPGNVHLDPNILHMTQRYISKKFGLPKNYLNLVFHGGSGSTVEEIKESIGYGIVKLNIDTDIQWATWSGVLGYYQKNKDFLKTQLGNVYGDDQPNKKFYDPRSWIRAGQESMIKYLEEMFVILNATDVL

SEQ ID NO: 149904 - DNA, 1077 bp, Vibrio vulnificus YJ016
  CDS (1)..(1077): transl_table=11
atgtctaagatcttcgatttcgtaaaaccaggtgttatctctggtgatgacgttcagaaagtatttgaagtagcaaaagaaaacaacttcgctcttccagctgtaaacgtagtaaacactgactcaatcaacggtgttcttgaagcagcttctaaagtgaaagcgccagttgttgttcagttctctaacggcggtgctgctttcttcgctggtaaaggcgtgaaacttgaaggtcaaggtgctcaaatccttggtgctatcgctggtgcgaaatacgtacacgcagttgctgaagcttacggtgtgccagtaatcctacacactgaccacgctgctaagaagctacttccatggatcgacggtctactagacgcaggtgaagagttcttcgctcaaactggtaagcctctattctcttctcatatgattgacctttctgaagagtctctagaagagaacatcgaaatctgtgctaagtacctagcgcgtatggaaaaaatgggtatgactctagagtttgaactaggttgtactggtggtgaagaagacggcgtagacaactctcacatggatcagtctgagctatacacttctccagaagacgttgcttacgcttacgagaaactgatcccaatcagccaccgtttcactatcgcagcatctttcggtaacgtgcacggtgtttaccaagcaggtaacgttgttctaactccaactatcctacgtgattctcaagcttactgttcagagaaatttggtattgctccaaacgcactaaacttcgtattccacggtggttctggttcttctgaagcagaaatcaaagagtctatcagctacggtgttatcaaaatgaacatcgatactgatactcagtgggcaacttgggatggtattcgtcaatacgaagcgaagaaccacgattacctacaaggtcaaatcggtaacccaactggcgaatctgcgccaaacaagaaatactacgatccacgtgtatggctacgtgctggccaagagtcaatggttgctcgtctagagaaagcattcgctgaccttaacgcagttgacgtactgtaa

SEQ ID NO: 149905 - protein, 358 aa, Vibrio vulnificus YJ016
MSKIFDFVKPGVISGDDVQKVFEVAKENNFALPAVNVVNTDSINGVLEAASKVKAPVVVQFSNGGAAFFAGKGVKLEGQGAQILGAIAGAKYVHAVAEAYGVPVILHTDHAAKKLLPWIDGLLDAGEEFFAQTGKPLFSSHMIDLSEESLEENIEICAKYLARMEKMGMTLEFELGCTGGEEDGVDNSHMDQSELYTSPEDVAYAYEKLIPISHRFTIAASFGNVHGVYQAGNVVLTPTILRDSQAYCSEKFGIAPNALNFVFHGGSGSSEAEIKESISYGVIKMNIDTDTQWATWDGIRQYEAKNHDYLQGQIGNPTGESAPNKKYYDPRVWLRAGQESMVARLEKAFADLNAVDVL

SEQ ID NO: 149906 - DNA, 1035 bp, Corynebacterium diphtheriae NCTC 13129
  CDS (1)..(1035): transl_table=11
atgcctatcgcaacaccagaggtctacaacgagatgcttgaccgcgctaaggcaggcggattcgcctacccagccatcaactgcacctcctctgaaaccatcaacgcagcattgcgtggatttgctgaggcggagtccgacggcatcatccagttctctacaggtggcgcagaatttggctccggtctatccgttaagaacaaggttgcaggcgcttgcgcactggcagccttcgctcatgaggcagcaaagcactacggcatcaacgtcgcattgcacaccgaccactgccagaaggaagttcttgacgagtacgttcgcccactcatcgccatctcccaagagcgcgtagaccgcggcgagcagccactattccagtcccacatgtgggatggttccgcaattccaatcgacgagaacctcgtcattgcgcaggagctgctggagaaggcacgcaaggcccacatcattcttgaagctgagatcggtgttgttggcggcgaagaagacggtgttgaagccaaggctggcgctaacctctacacctctccagaggactttgaaaagaccatcgacgctctcggcaccggtgaaaagggccgctacctgctcgccgctaccttcggcaacgttcacggtgtgtacaagccaggtaacgtcaagctgcgcccagaggttctccttgagggccagaaggttgctcgcgagaagttgggtctggatgactccgcactcccattcgacttcgtcttccacggtggctccggctccgagaaggaaaagatcgaagaggcactcggctacggcgttatcaagatgaacgttgacaccgacacccagtacgcattcacccgcccagtcgtcacccacatgttcaccaactacgacggtgtactcaagatcgacggcgaagtaggaaacaagaaggtctacgacccacgctcctacatgaagaaggctgagcaggctatggctgaccgtatcatcgaggcctgccaggatctgcactctgttggaaccactttgagcaagtaa

SEQ ID NO: 149907 - protein, 344 aa, Corynebacterium diphtheriae NCTC 13129
MPIATPEVYNEMLDRAKAGGFAYPAINCTSSETINAALRGFAEAESDGIIQFSTGGAEFGSGLSVKNKVAGACALAAFAHEAAKHYGINVALHTDHCQKEVLDEYVRPLIAISQERVDRGEQPLFQSHMWDGSAIPIDENLVIAQELLEKARKAHIILEAEIGVVGGEEDGVEAKAGANLYTSPEDFEKTIDALGTGEKGRYLLAATFGNVHGVYKPGNVKLRPEVLLEGQKVAREKLGLDDSALPFDFVFHGGSGSEKEKIEEALGYGVIKMNVDTDTQYAFTRPVVTHMFTNYDGVLKIDGEVGNKKVYDPRSYMKKAEQAMADRIIEACQDLHSVGTTLSK

SEQ ID NO: 149908 - DNA, 1086 bp, Rhodopseudomonas palustris CGA009
  CDS (1)..(1086): transl_table=11
atggcgcgcatcactctgaggcaattgctggatcacgccgccgagcacggctacggcgtgcccgcgttcaacatcaacaacatggagcagggcctcgcgatcatggaggcggcggcgctggtcgacgcgccggtgatcatccaggcgtcgcgcggcgcccgctcctacgccaacgacatcatgctggcgaagatgatcgacgcgctggccgaaatgtatccggacatcccgctgtgtatgcatcaggaccacggcaacgacgaagccacctgcgccaccgcgatccgctacggcttcacctcggtgatgatggacggctcgctcaaggccgacgccaagaccgccgccgattatcagtacaacgtcgacatcacccgccgcgtcgtcgacatggcgcactgggtcggcgcctcggtggaaggtgagctcggcgtgctcggctcgctggagcatggcggcggcgagcaggaagacggccacggcgtcgagggcaaggtcagccgcgagcagctgctgaccgatccggatcaggcggtcgagttcgtgcgcgccaccaaggtcgacgcgctggcgatcgcgatgggcacctcgcacggcgcctacaagttcagccgcaagcccgacggcgacgtgctggccatgaaggtggtcgaagagatccaccgccgcctgccgaacacccatctggtgatgcacggctcgtcgtcggtgccgcaggatctgcaggacatcttcaacgagttcggcggcgcgatgccgcagaccttcggcgtgccggtcgaggaaatcgtgcgtggcatcaagcacggcgtccgcaaggtcaatatcgacaccgactgccgtctggcgatgaccggcgtgttccggaaagtcgcgacccagaacaaggcggagttcgatccgcgcaagttcctgaagcccgcgatggatgcgatgcgcgacatctgcaagctgcgcttcgagcagttcggcaccgccggcaatgcctcgaagatcaaggtcgtgccgatggcggagatggccaagcgctacaagtccggcgcgctcgatccgcagatcggccaggtcgcccgcgccgcggagtaa

SEQ ID NO: 149909 - protein, 361 aa, Rhodopseudomonas palustris CGA009
MARITLRQLLDHAAEHGYGVPAFNINNMEQGLAIMEAAALVDAPVIIQASRGARSYANDIMLAKMIDALAEMYPDIPLCMHQDHGNDEATCATAIRYGFTSVMMDGSLKADAKTAADYQYNVDITRRVVDMAHWVGASVEGELGVLGSLEHGGGEQEDGHGVEGKVSREQLLTDPDQAVEFVRATKVDALAIAMGTSHGAYKFSRKPDGDVLAMKVVEEIHRRLPNTHLVMHGSSSVPQDLQDIFNEFGGAMPQTFGVPVEEIVRGIKHGVRKVNIDTDCRLAMTGVFRKVATQNKAEFDPRKFLKPAMDAMRDICKLRFEQFGTAGNASKIKVVPMAEMAKRYKSGALDPQIGQVARAAE

SEQ ID NO: 149910 - DNA, 1083 bp, Magnaporthe grisea 70-15
  CDS (1)..(1083)
atgggtgtcttcagcgagctcggtctcaagcccggcgtcctctacggcgaggaggtctacaagctgtttgagcacgccaagaagaatgtctacgccattcctgccatcaacgtgacctcgtcgtccaccattatcgcctcccttgaggccgcccgcgactccaagtcccccatcatcctgcaaatgtcacaaggtggtgccgcctacttcgccggcaagggtgtctccaacaccaaccaggaggcctcgatcgctggtgccgttgctgccgcccacttcatccgctcgattgctcccatctacggcgtcccggtcgtccttcacaccgaccactgcgccaagaagctcctcccgtggctcgacggcatgctcgatgccgacgaggctttccacaaggagaacggcacccctctgttcagctcgcacatgatcgacctgtctgaggagccccgtgactggaacatcgagaccactgccaagtacctcaagcgtgctgcccccatgaagcagtggctcgagatggagattggtctgaccggtggtgaggaggatggtgtcaacaacgaggatgtcgacaacaactccctctacacccagcccgaggacatctttgccatccaccaggccctgagccccatctccaagtacttctccatcgccgcaggcttcggcaacgtccacggcgtgtacaagcccggcaacgttcgtcttcaccctgagctgcttgacaagcaccagaagtacgttattgagaagctcggctgcgaggagaagaagcctatcttcttcgtcttccacggtggctccggctccggcgactccgagttccaggaggccatcagctacggtgtcatcaaggtcaacctcgacactgacctgcagtgggcctacctgagcggtatccgtgactacgtcaccagcaagatcgagtacctcaactcgcaggtcggcaaccctgacggcgctgacaagcccaacaagaagtactacgacccccgcgtctgggttcgtgagggtgagaagaccatgaaggcccgcatccagcaggctctgaaggtcttcaacgccgagaacaccatctaa

SEQ ID NO: 149911 - protein, 360 aa, Magnaporthe grisea 70-15
MGVFSELGLKPGVLYGEEVYKLFEHAKKNVYAIPAINVTSSSTIIASLEAARDSKSPIILQMSQGGAAYFAGKGVSNTNQEASIAGAVAAAHFIRSIAPIYGVPVVLHTDHCAKKLLPWLDGMLDADEAFHKENGTPLFSSHMIDLSEEPRDWNIETTAKYLKRAAPMKQWLEMEIGLTGGEEDGVNNEDVDNNSLYTQPEDIFAIHQALSPISKYFSIAAGFGNVHGVYKPGNVRLHPELLDKHQKYVIEKLGCEEKKPIFFVFHGGSGSGDSEFQEAISYGVIKVNLDTDLQWAYLSGIRDYVTSKIEYLNSQVGNPDGADKPNKKYYDPRVWVREGEKTMKARIQQALKVFNAENTI

SEQ ID NO: 149912 - DNA, 1083 bp, Gibberella zeae PH-1
  CDS (1)..(1083)
atgggtgtccaagaagtcctcagtcgcaagtccggtgtcatcgtcggtgacgatgtcctccgtctcttcgagtacgctcgcgagcacaagttcgctatccccgccattaacgtcacctcctcttctaccgtcgtcgctgcccttgaggctgcccgcgatgccaaggctcccgtcatccttcagttctctcagggtggtgccgcctactttgctggcaagggtgttagcaacggtgaccaggctgcttccattgccggctctgtcgctgctgcccactacgtccgctctcttgctcccacctacggcatccccgtcgtccttcacaccgatcactgcgccaagaagctcctcccttggctcgatggcatgctcgatgccgacgaggcttacttcaaggagaagggcgagcccctattctcctcccacatgattgatctttccgaggagcccgttgagtggaacattgagaccaccgccaagtacctcaagcgcgctgcccccatgaagcagtggctcgagatggagattggcatcactggtggtgaggaggacggtgttaacaacgaggatgttgacaacaactctctctacactcagcccgaggatatcctcaacatctacaacactctctcccccatctccccctacttctctatcgccgctggctttggtaacgtccacggtgtttacaagcctggcaacgtcaagctccaccccgagcttctcggcaagcaccaggcccacgtcaaggaggccctcaagtccgacaacgacaagcctgtcttctttgtcttccacggtggctccggctcctccaagaaggagtacctcgacgccattggcttcggtgttgtcaaggttaacgtcgatactgacatgcagttcgcttactgctctggtatccgagactacatggtcaacaagcgtgagtacgttaacaccactgtcggcaaccccgatggcgaggacaagcccaacaagaagtacttcgacccccgtgtctgggttcgtgagggtgagaagaccatgtctaagcgtgttgctgaggctctcgaggacttcaacaccgccaaccagctataa

SEQ ID NO: 149913 - protein, 360 aa, Gibberella zeae PH-1
MGVQEVLSRKSGVIVGDDVLRLFEYAREHKFAIPAINVTSSSTVVAALEAARDAKAPVILQFSQGGAAYFAGKGVSNGDQAASIAGSVAAAHYVRSLAPTYGIPVVLHTDHCAKKLLPWLDGMLDADEAYFKEKGEPLFSSHMIDLSEEPVEWNIETTAKYLKRAAPMKQWLEMEIGITGGEEDGVNNEDVDNNSLYTQPEDILNIYNTLSPISPYFSIAAGFGNVHGVYKPGNVKLHPELLGKHQAHVKEALKSDNDKPVFFVFHGGSGSSKKEYLDAIGFGVVKVNVDTDMQFAYCSGIRDYMVNKREYVNTTVGNPDGEDKPNKKYFDPRVWVREGEKTMSKRVAEALEDFNTANQL

SEQ ID NO: 149914 - DNA, 1086 bp, Candida glabrata CBS 138
  CDS (1)..(1086)
atgggtgtccaagaagttttgaagagaaagaccggtgtcatcgtcggtgacgacgttagagccttgttcgactacgctaaggaacacaagttcgctatcccagctatcaacgttacttcttcttccactgttgttgctgctttggaagctgctagagacgctaagtccccaatcatcttgcaaacctccaacggtggtgctgcttacttcgctggtaagggtgtctccaacgacggccaaaacgcttccatcagaggttccatcgctgctgctcactacatcagatccattgctccagcttacggtatcccagttgtcttgcactctgaccactgtgctaagaagctattgccatggtacgatggtatgttggaagctgacgaagcttacttcaaggaacacggtgaaccattgttctcctcccacatgttggacttgtccgaagaaaccgatgacgaaaacatcgctacttgtgtcaagtacttcaagagaatggccgctatgaaccaatggttggaaatggaaatcggtatcaccggtggtgaagaagatggtgttaacaacgaacacgttgacaaggaatccttgtacaccaagccagaaaccgttttcgccgtccacgaagctttggccccaatctctccaaacttctccatcgctgccgctttcggtaacgtccacggtgtctaccaagccggtaacgtcgtcttgtccccagaaatcttggctgaccaccaaaagtacgccgctgaaaagaccggtgccccagctggctctaagccattgtacttggtcttccacggtggttctggttccacccaagaagaattcaacaccggtatcaacaacggtgttgtcaaggtcaacttggacactgactgtcaatacgcttacttgaccggtatcagagactacgtcttgaacaagaaggactacatcatgtccatggtcggtaacccagaaggtgctgacaagccaaacaagaagttcttcgacccaagagtctgggttagagaaggtgaaaagaccatgtccaagagaatctctgaagctttggacgtcttccacaccaagaacactttgtaa

SEQ ID NO: 149915 - protein, 361 aa, Candida glabrata CBS 138
MGVQEVLKRKTGVIVGDDVRALFDYAKEHKFAIPAINVTSSSTVVAALEAARDAKSPIILQTSNGGAAYFAGKGVSNDGQNASIRGSIAAAHYIRSIAPAYGIPVVLHSDHCAKKLLPWYDGMLEADEAYFKEHGEPLFSSHMLDLSEETDDENIATCVKYFKRMAAMNQWLEMEIGITGGEEDGVNNEHVDKESLYTKPETVFAVHEALAPISPNFSIAAAFGNVHGVYQAGNVVLSPEILADHQKYAAEKTGAPAGSKPLYLVFHGGSGSTQEEFNTGINNGVVKVNLDTDCQYAYLTGIRDYVLNKKDYIMSMVGNPEGADKPNKKFFDPRVWVREGEKTMSKRISEALDVFHTKNTL

SEQ ID NO: 149916 - DNA, 1083 bp, Debaryomyces hansenii CBS767
  CDS (1)..(1083)
atgtcagctacagacgttttatcaagaaaatccggtgtcctttacggggatgatgtccgtcaattattcttatacgcacaaaagaagggatttgctattccagccattaatgtcacttcttcttccacagttgtttctgctttagaagctgctagagattctaagtctccaatcattttgcaaacttctcaaggtggtgctgcatactttgctggtaagggtgttgacaacaagaaccaagaagcttctattcaaggttctattgctgctgctcactacatcagagccattgctccagcatacggtgttccagttgttttacacactgaccactgtgctaagaaattattaccatggttcgatggtatgttaaaggctgatgaagaattcttcaacaagaccggtgaaccattgttctcatctcacatgttggatttatctgaagaatccgatgaagaaaacattagtacctgtgtcaagtacttcgaaaggatgcacaagatgggtcaattcttagaaatggaaatcggtattaccggtggtgaagaagatggtgtcaacaacgaaaacgtccaacaggactctttatacaccttgccagaaaccgtctacaaggtttttgaagcattgagcccaattggaccaaacttctccattgctgctgctttcggtaacgttcacggtgtctacaagccaggtaacgtccaattgagaccatctatcttaggtgaccaccaaaaatacgccaaggaaaagtccggttcttctactgacaccccaattttcttggttttccacggtggttctggttcttcccaagccgatttcgatgaagccatttctcatggtgttgttaaggttaacttagatactgattgtcaatacgcatacttgaccggtatccgtgactacgtcttaaacaagaaggattaccttatgtctccagttggtaacccagaaggtgaagacaaaccaaacaagaagtactttgacccaagagtctgggttagagaaggtgaaaagactatgtccgctagaatcactgaaggtttagaaatcttccacaccaagggtcaactctaa

SEQ ID NO: 149917 - protein, 360 aa, Debaryomyces hansenii CBS767
MSATDVLSRKSGVLYGDDVRQLFLYAQKKGFAIPAINVTSSSTVVSALEAARDSKSPIILQTSQGGAAYFAGKGVDNKNQEASIQGSIAAAHYIRAIAPAYGVPVVLHTDHCAKKLLPWFDGMLKADEEFFNKTGEPLFSSHMLDLSEESDEENISTCVKYFERMHKMGQFLEMEIGITGGEEDGVNNENVQQDSLYTLPETVYKVFEALSPIGPNFSIAAAFGNVHGVYKPGNVQLRPSILGDHQKYAKEKSGSSTDTPIFLVFHGGSGSSQADFDEAISHGVVKVNLDTDCQYAYLTGIRDYVLNKKDYLMSPVGNPEGEDKPNKKYFDPRVWVREGEKTMSARITEGLEIFHTKGQL

SEQ ID NO: 149918 - DNA, 1095 bp, Yarrowia lipolytica CLIB122
  CDS (1)..(1095)
atgcctgttactgacgtccttaagcgaaagtccggtgtcatcgtcggcgacgatgtccgagccctcttcgagtacgcccgagagcacaagttcgccctccccgccgtcaacgtgacctcttcgtccaccgttgtcgccgttcttgagtctgcccgagccaacaagtcccccgtcatcatccagatgtcccagggtggcgctgcctactttgctggcaagggtgtcgacaacaaggatcagaccgcctccatccagggagccattgccgctgcccagttcatccgaaccattgctcccgtttacggcattcccgtcatcgtccacaccgaccactgtgcccgaaagctgctcccctggctcgacggtatgctcgacgccgatgaggagtacttcaagactcacggtgagcccctcttctcttcacacatggtggatctctccgaggaggagcaccccgagaacatcgccaccaccgccgagtacttcaagcgagccgccaagatgaaccagtggctcgagatggagattggtgtcaccggaggtgaggaggatggtgttgacaacactggtgtcgacaactccaagctctacacccagcccgaggacatttacgccgtctactccgccctcgctcccatctcccccaacttctccattgccgctgccttcggtaacgtgcacggtgtctacaaggtcggcaacgtcaagctgcaccccgagctcctcgagaagcaccaggcttactccgccgagaaggttggctctcccgagaagcacggcaacggaaagcctctcttcctcgtcttccacggtggatccggttcttccgactccgactacaagattgccattgataacggtgttgtcaaggtcaacctcgatactgatctgcagtacgcttaccttgttggtatcagagactacattctctccaagaaggactacctcatgcagcaggtcggcaaccccgagggtgatgacaagcccaacaagaagtacttcgacccccgtgtctgggtccgagagggtgagaagaccatggccaagcgactcgactctgcctttgaggttttcaacgccaagaacaccttgtaa

SEQ ID NO: 149919 - protein, 364 aa, Yarrowia lipolytica CLIB122
MPVTDVLKRKSGVIVGDDVRALFEYAREHKFALPAVNVTSSSTVVAVLESARANKSPVIIQMSQGGAAYFAGKGVDNKDQTASIQGAIAAAQFIRTIAPVYGIPVIVHTDHCARKLLPWLDGMLDADEEYFKTHGEPLFSSHMVDLSEEEHPENIATTAEYFKRAAKMNQWLEMEIGVTGGEEDGVDNTGVDNSKLYTQPEDIYAVYSALAPISPNFSIAAAFGNVHGVYKVGNVKLHPELLEKHQAYSAEKVGSPEKHGNGKPLFLVFHGGSGSSDSDYKIAIDNGVVKVNLDTDLQYAYLVGIRDYILSKKDYLMQQVGNPEGDDKPNKKYFDPRVWVREGEKTMAKRLDSAFEVFNAKNTL

SEQ ID NO: 149920 - DNA, 1083 bp, Aspergillus nidulans FGSC A4
  CDS (1)..(1083)
atgggtgtcctcgagaagctgtcccgcaagaccggtgtcatcgtcggtgatgacgttctccgtctcttcgagtacgctcaggagcacaacttcgctatccccgccattaacgtcacctcctcttccaccgtcgttgcctgtctcgaggctgctcgcgaccagaactgccccgttatcctccaggtttcccagggtggtgctgctttcttcgccggcaagggcgttagcaacgatggccaggccgcttccattgccggtggtatcgccgctgctcactacatccgcagcattgcccccagctacggcatccccgtcgttctccacaccgaccactgcgccaagaagctcctcccctggctcgatggtctcctcgacgccgacgaggcttacttcaagcagcacggcgagcccctcttctcttcccacatgattgatctgtctgaggagcctgtcgactacaacatcgacaccaccgctaagtacctcaagcgtgctgctcccatgaagcagtggctcgagatggaaattggtatcaccggtggtgaggaggacggtgtcaacaacgagagcgttgataacaactccctctacacccagcctgaggacatcctcgccatccacaacgccctctccaagatcagcccttacttctccattgccgctggtttcggtaatgtgcacggtgtctacaagcccggcaacgtccgcctccaccctgaactcctcagcaagcaccaggcctacgttaaggagcagactggctccaagaaggacaagcccgtcttcttcgtcttccacggcggttctggctcttccaaggaggagtacaaggaggctatcagctacggtgtcgtcaaggtcaacctcgacactgacatgcagtacgcctacctcagtggtgtccgtgactacgtcctcaacaagaaggactaccttatgtcaactgttggcaaccctgacggcgaggacaagcccaacaagaagttctttgacccccgcgtgtggattcgtgagggtgagaagaccatgagcaagcgtgtccaggttgctcttgaggacttcaacactgctggcaagctctaa

SEQ ID NO: 149921 - protein, 360 aa, Aspergillus nidulans FGSC A4
MGVLEKLSRKTGVIVGDDVLRLFEYAQEHNFAIPAINVTSSSTVVACLEAARDQNCPVILQVSQGGAAFFAGKGVSNDGQAASIAGGIAAAHYIRSIAPSYGIPVVLHTDHCAKKLLPWLDGLLDADEAYFKQHGEPLFSSHMIDLSEEPVDYNIDTTAKYLKRAAPMKQWLEMEIGITGGEEDGVNNESVDNNSLYTQPEDILAIHNALSKISPYFSIAAGFGNVHGVYKPGNVRLHPELLSKHQAYVKEQTGSKKDKPVFFVFHGGSGSSKEEYKEAISYGVVKVNLDTDMQYAYLSGVRDYVLNKKDYLMSTVGNPDGEDKPNKKFFDPRVWIREGEKTMSKRVQVALEDFNTAGKL

SEQ ID NO: 149922 - DNA, 1080 bp, Candida albicans SC5314
  CDS (1)..(1080): transl_table=12
atggctcctccagcagttttaagtaaatccggtgttatctacggtaaagacgtcaaagacttgtttgactatgctcaagaaaaaggttttgccattccagctatcaatgtcacttcatcctcaactgttgttgctgctttagaagctgccagagacaacaaggctccaatcatcttgcaaacttctcaaggtggtgctgcctactttgccggtaaaggtgtcgacaacaaagatcaagctgcttccattgctggttcaattgctgccgctcactacattagagccattgctccaacttatggtatcccagttgttttacacactgatcactgtgccaaaaaattattgccatggtttgatggtatgttgaaagccgatgaagaattctttgctaagaccggtactccattgttctcatcccacatgttggatttatctgaagaaaccgatgacgaaaacattgctacttgtgccaaatatttcgaaagaatggctaaaatgggtcaatggttagaaatggaaattggtatcactggtggtgaagaagatggtgtcaacaacgaacacgttgaaaaagatgctttatacacttctccagaaactgttttcgctgtctacgaatctttacacaagatttctccaaacttttctattgctgctgcttttggtaacgtccacggtgtttacaaaccaggtaatgtgcaattgagaccagaaatcttgggtgaccaccaagtttacgctaagaaacaaattggtactgatgctaaacacccattatacttggttttccacggtggttctggttctactcaagaagaattcaacactgctatcaagaatggtgttgtcaaggtcaacttggacactgattgtcaatatgcttacttgactggtatcagagattacgtcaccaacaagattgaatacttgaaagcaccagttggtaacccagaaggtgctgacaaaccaaacaagaaatactttgacccaagagtctgggttagagaaggtgaaaagaccatgtccaagagaattgctgaagctttggatattttccacaccaaaggacaattgtaa

SEQ ID NO: 149923 - protein, 359 aa, Candida albicans SC5314
MAPPAVLSKSGVIYGKDVKDLFDYAQEKGFAIPAINVTSSSTVVAALEAARDNKAPIILQTSQGGAAYFAGKGVDNKDQAASIAGSIAAAHYIRAIAPTYGIPVVLHTDHCAKKLLPWFDGMLKADEEFFAKTGTPLFSSHMLDLSEETDDENIATCAKYFERMAKMGQWLEMEIGITGGEEDGVNNEHVEKDALYTSPETVFAVYESLHKISPNFSIAAAFGNVHGVYKPGNVQLRPEILGDHQVYAKKQIGTDAKHPLYLVFHGGSGSTQEEFNTAIKNGVVKVNLDTDCQYAYLTGIRDYVTNKIEYLKAPVGNPEGADKPNKKYFDPRVWVREGEKTMSKRIAEALDIFHTKGQL

SEQ ID NO: 149924 - DNA, 1077 bp, Ustilago maydis 521
  CDS (1)..(1077)
atgggtgttcttgacattgttcccgccggtgttgtctccggaaaggacgtttacaaggtcttcgactacgctcgtcagaacaagtttgccatccccgccttcaacgttacttcgtcctcggtcgccatctcggctctcgaggctgctcgtgatgccaagtcgcccctgatccttcaggtctcacagggaggtgccgccaactttgccggcaagggtctctctaactcgaaccaggaggcctcgatcatcggtgccaaggccgccgctctcttcattcgcgccgttgctccctcgtacggtgtccctgttatcatgcactcggaccactgcgccaagaagctgcttccttggtttgatggcatgctcgccgccgacgaggagtactacaaggagcacaacgagccgctcttttcgtcgcacatgctcgacttatccgaggagtccaaggaggagaacatcgagacctgcctcaagtacctcaagcgcatggctcctctcggcatctggctcgagatggagatcggcattactggtggtgaagaggacggtgttaacaacgagggtgttgacaacgcctcgctctacacccagcccgaggacatctgggacatctaccgccagttctccgagattacccccaacttctccatcgccgccggtttcggtaacgttcacggtgtctacaagcccggaaacgtctcgctgcagcccgagctgctcggcaagcaccaggagcacgtccgcgctcagatcaagagcgacaaggagaacccggtcttcttcgtcttccacggcggatccggttccgagaagcacgagatcagcaccgccgtcagccacggtgtggtcaagatgaacgtcgacaccgacacgcagtgggcctacctgctcggtatccgcgactacatcttgaacaagaaggactacctcatgagccaggtcggcaaccccgatggcgccgacaagcctaacaagaagttcttcgaccctcgtgtttgggttcgcgagggtgagaagaccatggctacgcgttgcaaagaggcctttactgaccttggctccactggcaagctctaa

SEQ ID NO: 149925 - protein, 358 aa, Ustilago maydis 521
MGVLDIVPAGVVSGKDVYKVFDYARQNKFAIPAFNVTSSSVAISALEAARDAKSPLILQVSQGGAANFAGKGLSNSNQEASIIGAKAAALFIRAVAPSYGVPVIMHSDHCAKKLLPWFDGMLAADEEYYKEHNEPLFSSHMLDLSEESKEENIETCLKYLKRMAPLGIWLEMEIGITGGEEDGVNNEGVDNASLYTQPEDIWDIYRQFSEITPNFSIAAGFGNVHGVYKPGNVSLQPELLGKHQEHVRAQIKSDKENPVFFVFHGGSGSEKHEISTAVSHGVVKMNVDTDTQWAYLLGIRDYILNKKDYLMSQVGNPDGADKPNKKFFDPRVWVREGEKTMATRCKEAFTDLGSTGKL

SEQ ID NO: 149926 - DNA, 1080 bp, Cryptococcus neoformans var. neoformans B-3501A
  CDS (1)..(1080)
atgtctggtgctctctctgtcgtccccgctggtgttgtcactggtgacaacgtccgaaagcttttcaagtacgctaaggacaacaagttcgctatccccgctatcaacgtcacctcttcttctgttgtcaacgctgtccttgaggctgcccgggacatcaactctcctattatcctccaggtttcccagggtggtgccgctttcttcgccggtaagggcttgaagaacggcaaccaggaggcttccatcgccggtgccgtcgctgctgcccacttcatccgttccgttgctccccattacggcgttcccgtcgtcctccactctgaccactgtgccaagaagctccttccttggttcgatggtatgctcgaggccgacgaggcttacttcaaggagcacggagagcccctcttctcttcccacatgcttgacttgtctgaggagtccaaggaggacaacatcaaggactgtgtcttctacttcaagcgaatggccaaggttaacctctggctcgaaatggaaatcggtatcacaggtggtgaggaggacggtgttgacaacacctctgtcgacaacaactctctctacacccagcccgaggacatctgggatgtctactctgcccttaacgccatctcccccaacttctctatcgctgccggctttggtaacgtccacggtgtctacaagcccggaaacgtcaagctcaggcctgaactcctcggcaagcaccagaagtacacccacgagaagatcggcggtgacgaggagaagcccttgtatcttgtcttccacggtggttccggttctagcaaggaagagatccgagaggctgttgtcaacggcgtcgttaagatgaacgttgacactgacacccaatgggcttacctctgcggtgtccgtgacttcgtcctcaagaagaaggactacctcatgactcaggttggtaaccctgaaggtgccgacaagcccaacaagaagcagtacgacccccgagtctgggttagggagggtgagaagactctcgtcgagcgagtcaaggaggcctgtgtcgacttgggcaacaacaacaggaactaa

SEQ ID NO: 149927 - protein, 359 aa, Cryptococcus neoformans var. neoformans B-3501A
MSGALSVVPAGVVTGDNVRKLFKYAKDNKFAIPAINVTSSSVVNAVLEAARDINSPIILQVSQGGAAFFAGKGLKNGNQEASIAGAVAAAHFIRSVAPHYGVPVVLHSDHCAKKLLPWFDGMLEADEAYFKEHGEPLFSSHMLDLSEESKEDNIKDCVFYFKRMAKVNLWLEMEIGITGGEEDGVDNTSVDNNSLYTQPEDIWDVYSALNAISPNFSIAAGFGNVHGVYKPGNVKLRPELLGKHQKYTHEKIGGDEEKPLYLVFHGGSGSSKEEIREAVVNGVVKMNVDTDTQWAYLCGVRDFVLKKKDYLMTQVGNPEGADKPNKKQYDPRVWVREGEKTLVERVKEACVDLGNNNRN

SEQ ID NO: 149928 - DNA, 1074 bp, Prochlorococcus marinus str. MIT 9301
  CDS (1)..(1074): transl_table=11
atggccctcgttccactaagactacttttagatcacgctgctgagaatggttacggtattccagctttcaatgttaataatcttgaacaagttcaagcaatcatggaagcagcatatgaaactgatagtccagttatcctccaagcttcaagaggggcaagaaattatgcaggagaaattttcttacgtcatctaatccttgccgctacagaaacatatccaaatattccagttgtaatgcaccaagaccatggcaatgagccatcaacatgctattcagcagcaataaatggtttcacatcagtaatgatggatggttctctagaggcagatgcaaaaacacccgcaagttacgaatataatgttgcagttactaaaaaagttgtagattttgctcattcagttggggttagtgttgaaggagaattaggttgcttaggttcattagaaacagggaaaggagaagctgaagatggtcatggttttgaaggtgaactttctacagatatgcttttgactgatcctgaagaagctgcagattttgttgctaaaacaaaagttgatgcattagctattgctataggtacaagtcatggtgcttataaattcacaagaaaacctacaggagaagttcttgcaataagcagaattgctgaaattcataaagcactcccaaatacccatcttgtaatgcatggatctagttcagttcctcaggaatggttggatatcattaacaaatatggtggtgaaatccctcaaacatatggtgttcctgttgaagagattcaagagggaataagaaatggagttagaaaagtcaacattgataccgataacagacttgctttcactgccgcggttagagaggcagcatttgctgataaggcaaactttgacccaagacatttcaacaagcctgctagaaaatacatgaagcaagtttgtcttgatagatacaagcagttctggtgcgaaggtcaagcaagtaagatcaagcaaaacagcaccaattactttgcggatctttacgctaaaggtgatttagatccaaaagtaaaagctactgtctaa

SEQ ID NO: 149929 - protein, 357 aa, Prochlorococcus marinus str. MIT 9301
MALVPLRLLLDHAAENGYGIPAFNVNNLEQVQAIMEAAYETDSPVILQASRGARNYAGEIFLRHLILAATETYPNIPVVMHQDHGNEPSTCYSAAINGFTSVMMDGSLEADAKTPASYEYNVAVTKKVVDFAHSVGVSVEGELGCLGSLETGKGEAEDGHGFEGELSTDMLLTDPEEAADFVAKTKVDALAIAIGTSHGAYKFTRKPTGEVLAISRIAEIHKALPNTHLVMHGSSSVPQEWLDIINKYGGEIPQTYGVPVEEIQEGIRNGVRKVNIDTDNRLAFTAAVREAAFADKANFDPRHFNKPARKYMKQVCLDRYKQFWCEGQASKIKQNSTNYFADLYAKGDLDPKVKATV

SEQ ID NO: 149930 - DNA, 1083 bp, Bradyrhizobium sp. ORS278
  CDS (1)..(1083): transl_table=11
atggcgcggatcacgctcagacaattgctggaccatgccgccgagcggggctacggcgtgccggcgttcaacatcaacaacatggagcaggggctcgcgatcatggaggcggcggccgcggtcgacgcgcccgtgatcatccaggcctcgcgcggcgcgcgctcctatgccggcgacatcatgctgtcgaagatgatcgacgcgctggaggagatgtatccgcagattccgctgtgcctgcaccaggaccacggcaatgacgaggcgacctgcgcgaccgcgatcaaatacggcttcacctcggtgatgatggacggctcgctgaaggccgacgccaagaccgcagcggactatgagtacaacgttgacatcacccgccgcgtcaccgacatggcgcattgggtcggcgcctccgtcgagggcgagctcggcgtgctcggctcgctcgagcacggtggcggcgaacaggaagacggccacggcctggaaggcaaggtcagccgcgaccaattgctcaccgatcccgaccaggccgtcgatttcgtccgcgccaccaaggtggacgcgctggcgatcgcgatgggcacctcgcatggcgcctacaagttctcgcgtcagcccgatggcgagatcctcgccatgaacgtcatcgaggagatccatcgccggctgcccaacacgcacctggtgatgcacggctcctcctccgtgccgcagtcgctgcaggacatgttcaatcagttcggtggcgagatgccgcagacctggggcgtgccggtcgaggagatcgtgcgcggaatccgccacggcgtccgcaaggtcaacatcgataccgactgccggctggcgatgaccgcgatcttccggaaagtcggcgcctcgtcgaagagcgagttcgatccgcgcaagttcctcaagccggcgatggattccatgcgcgagctgtgccgcgagcggttcgagcaattcggcgccgccggcaacgcgtcgaagatcaaggtgctgccgctgtcggagatggccaagcgctatcgctccggcgcgctcgatccgcgcgtcgggggaatgaccgaagctgcgtga

SEQ ID NO: 149931 - protein, 360 aa, Bradyrhizobium sp. ORS278
MARITLRQLLDHAAERGYGVPAFNINNMEQGLAIMEAAAAVDAPVIIQASRGARSYAGDIMLSKMIDALEEMYPQIPLCLHQDHGNDEATCATAIKYGFTSVMMDGSLKADAKTAADYEYNVDITRRVTDMAHWVGASVEGELGVLGSLEHGGGEQEDGHGLEGKVSRDQLLTDPDQAVDFVRATKVDALAIAMGTSHGAYKFSRQPDGEILAMNVIEEIHRRLPNTHLVMHGSSSVPQSLQDMFNQFGGEMPQTWGVPVEEIVRGIRHGVRKVNIDTDCRLAMTAIFRKVGASSKSEFDPRKFLKPAMDSMRELCRERFEQFGAAGNASKIKVLPLSEMAKRYRSGALDPRVGGMTEAA

SEQ ID NO: 149932 - DNA, 1077 bp, Erwinia carotovora subsp. atroseptica SCRI1043
  CDS (1)..(1077): transl_table=11
atgtctaaaatttttgatttcgtaaaacccggtgtcatcactggtgatgacgttcagaaagttttcgcagtagcaaaagaaaacaaattcgctttgccagcagtgaactgtgtcggtaccgactcaatcaatgctgtgctggaagctgcagccaaagtgcgcgcgccggtaatcgttcagttctctaacggcggcgcagcattcaccgcgggtaagggtctgaaagcagaaggccagcaggcggcaattttgggtgcgatttctggcgctcatcatgtgcaccaaatggctgagcattacggcattccggtaattcttcacactgaccactgtgcgaaaaaactgctgccgtggatcgatggcctgctggacgcgggtgaaaaacactttgccgctaccggcaaaccgctgttctcttctcacatgattgacctgtctgaagagtctctggaagagaacatcgaaatttgttctaaatatttggcgcgtatggccaaaattgatatgaccctggaaatcgaactgggttgcactggtggtgaagaagacggtgtggataacagccacatggacgcttctgctctgtacacccagccagaagatgttgattacgcgtacaccaaactgaacgcgattagcccacgtttcactatcgctgcctctttcggtaacgtgcatggcgtatacaagccaggtaacgtgaagctgaccccgaccatcctgcgtgattctcaggaatatgtttccaagaaacataacctgccacacaacagcctggacttcgtgttccacggtggttctggttccagcgctcaggaaatcaaagattcggtcagctacggcgtagtgaaaatgaacatcgataccgacacccagtgggcaacgtgggaaggtatcctgaaatactacaaagaaaacgaagcctatctgcaagctcaattgggcaacccgaaaggcgacgatcagccgaacaagaaatactatgatccacgtgtgtggctgcgttccgcccagacaagcatggttgctcgtctggaacaagccttcaaagagctcaatgctgttgatgtgctctaa

SEQ ID NO: 149933 - protein, 358 aa, Erwinia carotovora subsp. atroseptica SCRI1043
MSKIFDFVKPGVITGDDVQKVFAVAKENKFALPAVNCVGTDSINAVLEAAAKVRAPVIVQFSNGGAAFTAGKGLKAEGQQAAILGAISGAHHVHQMAEHYGIPVILHTDHCAKKLLPWIDGLLDAGEKHFAATGKPLFSSHMIDLSEESLEENIEICSKYLARMAKIDMTLEIELGCTGGEEDGVDNSHMDASALYTQPEDVDYAYTKLNAISPRFTIAASFGNVHGVYKPGNVKLTPTILRDSQEYVSKKHNLPHNSLDFVFHGGSGSSAQEIKDSVSYGVVKMNIDTDTQWATWEGILKYYKENEAYLQAQLGNPKGDDQPNKKYYDPRVWLRSAQTSMVARLEQAFKELNAVDVL

SEQ ID NO: 149934 - DNA, 1026 bp, Propionibacterium acnes KPA171202
  CDS (1)..(1026): transl_table=11
atgcccatcgcaacacctgaggtctacggcgagatgattgaccgcgcgaaggaacaaggcttcgcgtacccggccatcaacgtgacctcctcccagaccctcaatgctgctctgcaggggttcactgaggccggttccgacggcatcgtccagatctccaccggtggcgccgagtacgcctccggccagacggtgaaggacatggtgaccggtgcggttgctctcgcggagtacgcccacgtcgttgctaagaattatccgatcaacgtggccttgcacactgaccactgccagaaggagaagctagataagtacgtcaacccgcttattgccatctcgcaggagcgcgtcgacaagggccaggacccgctattcaactctcatatgtgggacggctcggccatcgaggttgaggagaacctgcagattgccgaggagctactgtcgcgcaccgcgaaggccaagctcatcctcgagatcgaggtcggcgctgttggtggcgaggaagacggtgtgaccggcgagatcaacgagaagttgtacaccaccgttgctgacggcatgcgtaccctcgaggtgctgggcctgggtgagaagggccgctacaccaccgctctgaccttcgggaacgtccatggtgcgtacaagcctggttacgtcaagctgcgcccgggaatcctcaaggagatccaggacgagtgcggcaagaagtacggcaaggagaagccgttcgatctggtcttccatggtgggtcgggatcgactgcccaggagatcgccgacgcggtgtcctatggcgttatcaagatgaacatcgataccgatactcagtacgcgttctcgcgtccggttgttgagcacatgttcaagaactacgacggcatgctcaagattgacggtgaggtcggcaacaagaagatgtacgacccgcgttcgtggggcaagaaggctgaggctggtatggccgcccggattgttgaggcttgtgagcagctgggttcgaagggtacttcggtcagcgcctga

SEQ ID NO: 149935 - protein, 341 aa, Propionibacterium acnes KPA171202
MPIATPEVYGEMIDRAKEQGFAYPAINVTSSQTLNAALQGFTEAGSDGIVQISTGGAEYASGQTVKDMVTGAVALAEYAHVVAKNYPINVALHTDHCQKEKLDKYVNPLIAISQERVDKGQDPLFNSHMWDGSAIEVEENLQIAEELLSRTAKAKLILEIEVGAVGGEEDGVTGEINEKLYTTVADGMRTLEVLGLGEKGRYTTALTFGNVHGAYKPGYVKLRPGILKEIQDECGKKYGKEKPFDLVFHGGSGSTAQEIADAVSYGVIKMNIDTDTQYAFSRPVVEHMFKNYDGMLKIDGEVGNKKMYDPRSWGKKAEAGMAARIVEACEQLGSKGTSVSA

SEQ ID NO: 149936 - DNA, 1026 bp, Leifsonia xyli subsp. xyli str. CTCB07
  CDS (1)..(1026): transl_table=11
atgcccatcgccacgccggaccagtacgcagagatgctcgataaggcgaaggccggcgggttcgcttacccggcgttcaatgtctcgtcctcgtcgacgatcaacgcggtgctgcagggtctgaccgaggccggcagcgacggcatcatccaggtcacgaccggtggttcggactacttcgccgggcagtcggtcaaggcgcgcgcgaccggtgcgctggcgttcgccaggttcgccaccgaggtcgccaagaactatccgatcacggtcgcgctgcacaccgaccactgcccgaagaacgcgctcgacgacttcgcgctcccactcatcgccgcctccgaggacgaggtcaaggccggccggaatccgatcttccagtctcacatgtgggacggctcggcggttccgctggccgataacctggagatcgcgaagcagatgatcgagcgcacccgggccatcaacgccatcctcgaagtcgagatcggtgtcgtcggcggcgaggaggacggcgtcagccacgaaatcaacgagcacctttacaccacgctggacgatgcgatccagaccgtggaggccctcggcctgggcgagaacggccgctacatggctgcgctcaccttcggcaacgtgcatggcgtctacaagccgggcaacgtcaagctgcgcccggagctcctcaaagagatccaggacggcctcgccgccaagtacgggaccagccccaagccgctcgacctcgtcttccacggcggctcgggctcgaccgacgaggagatcgcggaggccgtgcgcaacggcgtcgtgaagatgaacatcgacaccgacacgcagtacgcgttcacccgctcgatcgcaggctacatgttcgggaactacgacggcgtcctcaagatcgacggcgaggtcggcaacaagaaggtctacgacccgcgcgcctggggcaaggtcgccgagtcggcgatggccgctcgcgtcgtcgaggcgacacagcagctgggcagcgccggacactccggcaagtag

SEQ ID NO: 149937 - protein, 341 aa, Leifsonia xyli subsp. xyli str. CTCB07
MPIATPDQYAEMLDKAKAGGFAYPAFNVSSSSTINAVLQGLTEAGSDGIIQVTTGGSDYFAGQSVKARATGALAFARFATEVAKNYPITVALHTDHCPKNALDDFALPLIAASEDEVKAGRNPIFQSHMWDGSAVPLADNLEIAKQMIERTRAINAILEVEIGVVGGEEDGVSHEINEHLYTTLDDAIQTVEALGLGENGRYMAALTFGNVHGVYKPGNVKLRPELLKEIQDGLAAKYGTSPKPLDLVFHGGSGSTDEEIAEAVRNGVVKMNIDTDTQYAFTRSIAGYMFGNYDGVLKIDGEVGNKKVYDPRAWGKVAESAMAARVVEATQQLGSAGHSGK

SEQ ID NO: 149938 - DNA, 1029 bp, Yersinia pseudotuberculosis IP 32953
  CDS (1)..(1029): transl_table=11
gtgcagaaagttttcgcagtagcaaaagaaaataactttgctctgccagcagttaactgtgtaggcactgactctatcaacgcagtgctggaaaccgcagccaaagtgcgcgcacctgttatcgttcagttctccaacggcggcgctgcgtttatcgcaggtaaaggcgtgaagactgatgctccacaaggtgctgcaatcttgggtgctatttctggtgcacaccatgtacatcagatggctgaacattacggtgttccggttattctgcacaccgaccattgcgcgaagaaattactgccatggttagatggtttactggatgcgggtgagaaacactttgcggcgaccggcaagccactgttctcttctcacatgatcgacctgtctgaagagtctctggaagagaacattgaaatttgcagcaagtacctgactcgtatgtcaaaaatcggtatgacactggaaattgaactgggttgtactggtggtgaagaagatggtgtggataacagccacatggacgcttcttctctgtacactcagccacaagatgttgattacgcatacgaaaaactgaacgctatcagcccacgtttcaccatcgctgcctcttttggtaacgtacacggtgtttacaagccaggtaacgttaaactgaccccaactattctgcgcgattctcaggattatgtttccaagaaacacaatctgccgcataacagcctgaacttcgtgttccatggcgggtctggttctactgctgaagagatcaaagaagcagtaagctacggcgtagttaaaatgaatatcgacaccgatacccagtgggcgacgtgggaaggtattctgaactattacaaaaagaacgaaggctatctgcaaggccaactgggtaacccagaaggtgctgacaagccgaacaagaaatactacgatccacgcgtatggttgcgtgctgcccaggtgacaatgattactcgtctggaactggcattcaaagaactgaacgccatcgacgtactgtaa

SEQ ID NO: 149939 - protein, 342 aa, Yersinia pseudotuberculosis IP 32953
MQKVFAVAKENNFALPAVNCVGTDSINAVLETAAKVRAPVIVQFSNGGAAFIAGKGVKTDAPQGAAILGAISGAHHVHQMAEHYGVPVILHTDHCAKKLLPWLDGLLDAGEKHFAATGKPLFSSHMIDLSEESLEENIEICSKYLTRMSKIGMTLEIELGCTGGEEDGVDNSHMDASSLYTQPQDVDYAYEKLNAISPRFTIAASFGNVHGVYKPGNVKLTPTILRDSQDYVSKKHNLPHNSLNFVFHGGSGSTAEEIKEAVSYGVVKMNIDTDTQWATWEGILNYYKKNEGYLQGQLGNPEGADKPNKKYYDPRVWLRAAQVTMITRLELAFKELNAIDVL

SEQ ID NO: 149940 - DNA, 1080 bp, Borrelia garinii PBi
  CDS (1)..(1080): transl_table=11
gtgggtgttttagataagattaaacccggtgtagtttatgggaaagaattacattctttatatgaaatatgtaaaaaggaaggatttgctattccttctattaattgtataggaacaaattctattaatgcggttttagaagcagcaaaagaaattaattctcctattatgatacaattctccaatagtggttctgcttttatttgtgggaaaggattgaagatggaaaaactgcaaggagtttcaatagttggagccatttctggtgctatgcatgttcatttgatggcagagcattatggagttcctgttgttcttcatactgatcattgtgctaagaatttgcttccttgggttgagggacttttagagtatggtgagaaatactatagtcagcacaaaaggccattattttcttcacatatgttagatttgtcggaagaacctattaaagaaaatattgaaatttctaaaaaatttttagaaagaatggcaaaaattgaaatgtttttagaaatagagcttggaattacgggtggagaagaggatggagttgataattctgatagagctttgcatgaactattttcaactcccgaagatatttactatggatattcagagcttttaaagattagtccaaattttcagattgcagcagcttttggaaatgttcatggagtatataaaccgggaaatgttaagcttactccaaaagtgttaaaagatggtcaagattatgtcatatcaaaaacaggagtaaatgttaccaagccagtttcttatgtttttcatggggggtctggatctacaattgatgagattaatgaggcactttcttatggggttgtaaagatgaatattgacacagatacacagtgggctgcctgggagggtgttttaaattattataaaaaaaatgaaagtcgtttacaaggtcaattaggagatggtaaggacattgatattcctaataagaaattttatgatccaagagtttggttaagagaagctgaagtttccataaaagagcgtgtaaagattgcatgcaaaaatcttaataatattaataggaattaa

SEQ ID NO: 149941 - protein, 359 aa, Borrelia garinii PBi
MGVLDKIKPGVVYGKELHSLYEICKKEGFAIPSINCIGTNSINAVLEAAKEINSPIMIQFSNSGSAFICGKGLKMEKLQGVSIVGAISGAMHVHLMAEHYGVPVVLHTDHCAKNLLPWVEGLLEYGEKYYSQHKRPLFSSHMLDLSEEPIKENIEISKKFLERMAKIEMFLEIELGITGGEEDGVDNSDRALHELFSTPEDIYYGYSELLKISPNFQIAAAFGNVHGVYKPGNVKLTPKVLKDGQDYVISKTGVNVTKPVSYVFHGGSGSTIDEINEALSYGVVKMNIDTDTQWAAWEGVLNYYKKNESRLQGQLGDGKDIDIPNKKFYDPRVWLREAEVSIKERVKIACKNLNNINRN

SEQ ID NO: 149942 - DNA, 1080 bp, Mannheimia succiniciproducens MBEL55E
  CDS (1)..(1080): transl_table=11
atggctaaattattagatatcgtaaaacccggcgtattaaccggcgatgacgtttcaaaagtatttgcatacgcaaaagaacaagggttcgcaatccctgcggtaaactgtgtgggttcagactcggtaaacaccgttttagaaacggcggcacgcgtgaaagcgccggttatcgttcaattctcaaacggcggtgcatcattctatgcgggtaaaggtattaaaccggcatccggtgcgcgcgcagacgtattaggtgcaattgccggtgcaaaacacgtacatactttagcgcaagaatatggtgtgccggttatccttcacactgaccatgcagcgaaaaaattattaccttggatcgacggattactagatgcaagcgaaaaagaatttgcaaagacaggtcgtcctttattctcctctcacatgttggatctttcggaagaaccaatggaagaaaacatggcaatctgtcgtgaataccttgcccgcatggataaaatggggatgactcttgaaatcgaaatcggtatcaccggcggtgaagaagacggcgtggataattcgggtgttgatgagtctaagctttatactcaacctgaagacgtattatatgtttacgaccaattaaatccggttagctcccgttttaccgtagctgcggctttcggtaacgtacacggcgtttacaaaccgggtaacgtaaaattaaaaccgtctatcttaggcgcttctcaggagttcgtcgcgaaagaacgcggtcttcaagccaaaccgattaatttcgtattccacggcggttcaggttcatcaaccgaagaaatccgcgaagctatcagctatggcgcaatcaaaatgaacattgataccgacactcaatgggccgcgtgggacggtatccttcaattctacaaagcgaacgaagcttatctgcaaggtcaattaggtaaccctgaaggccctgattcgccaaataaaaaatattacgatccgcgcgtttggttacgtaaaatggaagaatctatgtctaaacgcttagaaaaatctttccaggatttaaactgcgttgacgtattataa

SEQ ID NO: 149943 - protein, 359 aa, Mannheimia succiniciproducens MBEL55E
MAKLLDIVKPGVLTGDDVSKVFAYAKEQGFAIPAVNCVGSDSVNTVLETAARVKAPVIVQFSNGGASFYAGKGIKPASGARADVLGAIAGAKHVHTLAQEYGVPVILHTDHAAKKLLPWIDGLLDASEKEFAKTGRPLFSSHMLDLSEEPMEENMAICREYLARMDKMGMTLEIEIGITGGEEDGVDNSGVDESKLYTQPEDVLYVYDQLNPVSSRFTVAAAFGNVHGVYKPGNVKLKPSILGASQEFVAKERGLQAKPINFVFHGGSGSSTEEIREAISYGAIKMNIDTDTQWAAWDGILQFYKANEAYLQGQLGNPEGPDSPNKKYYDPRVWLRKMEESMSKRLEKSFQDLNCVDVL

SEQ ID NO: 149944 - DNA, 1080 bp, Haemophilus influenzae 86-028NP
  CDS (1)..(1080): transl_table=11
atggctaaattattagatatcgtgaaacccggtgttgtaacaggcgaagatgtgcaaaaagtttttgcttatgctaaagagcataactttgctattcctgccgtaaactgtgtgggttcagactccgttaatgccgtgttagaaactgctgcacgtgtaaaagcaccagtgattatccaattttcaaatggtggcgcagcgttctatgcaggtaaaggtatcaaaccaacgagtggtactcgtccagatgttttaggggcgattgctggagcgaaacaggttcatactttagcgaaagaatacggtgtgcctgttattcttcatactgatcacgcagcgaaaaaattattaccttggatcgacggtttattagatgcaggcgaaaaacattttgccgaaacgggtcgtccacttttctcttcacatatgatcgatttatctgaagagtcaatggaagaaaatatggcaatctgccgtgaatatcttgctcgtatggataaaatggggatgacccttgaaatcgaaattggcattactggtggcgaagaagacggcgtagataactctgatgttgatgaatcacgtttatatacacaaccgtctgatgtgctttatgtttacgatcaattgcatccagtaagccctaactttaccgttgctgctgcattcggtaacgtacatggtgtttacaaaccaggtaatgtaaaattaaaaccatctattttaggtgcatcacaagagttcgtttctaaagaacgcaatcttcctgcaaaaccaattaacttcgtcttccacggtggttcaggttctagccgcgaagaaatccgcgaagcaattggctacggtgcaatcaaaatgaacattgatactgatacgcaatgggcgtcttggaatggtattttgaatttctataaagcaaatgaagcttatcttcaaggtcaattaggtaaccctgaaggcccagatgcaccaaacaaaaaatactacgacccacgtgtttggttacgtaaaatggaagaatcaatgtctaaacgcttagagcaatctttcgaagacttaaattgtgttgatgttttataa

SEQ ID NO: 149945 - protein, 359 aa, Haemophilus influenzae 86-028NP
MAKLLDIVKPGVVTGEDVQKVFAYAKEHNFAIPAVNCVGSDSVNAVLETAARVKAPVIIQFSNGGAAFYAGKGIKPTSGTRPDVLGAIAGAKQVHTLAKEYGVPVILHTDHAAKKLLPWIDGLLDAGEKHFAETGRPLFSSHMIDLSEESMEENMAICREYLARMDKMGMTLEIEIGITGGEEDGVDNSDVDESRLYTQPSDVLYVYDQLHPVSPNFTVAAAFGNVHGVYKPGNVKLKPSILGASQEFVSKERNLPAKPINFVFHGGSGSSREEIREAIGYGAIKMNIDTDTQWASWNGILNFYKANEAYLQGQLGNPEGPDAPNKKYYDPRVWLRKMEESMSKRLEQSFEDLNCVDVL

SEQ ID NO: 149946 - DNA, 1065 bp, Dechloromonas aromatica RCB
  CDS (1)..(1065): transl_table=11
atgccgctcgtatccatgcgccaactgctcgaccacgccgccgaaaacggctacggtctgcccgctttcaacgtcaacaacatggaacaggtctgggccatcatggaagcggccgcccaggtcgacgccccggtcatcatgcaagcttcggctggcgcccgcaaatacgccggcgagcccttcctgcgccaccagatcctggccgcgctcgaagcctaccccaacattcccatcgtcatgcaccaggaccacggccagagcccatccgtctgcatgggcgccatccgttccggtttctcgtctgtgatgatggacggttcgctgctggccgacggcaagagcgtcgccagttatgaatacaacgttgaagtgacccgcaaggtgaccgaattcgcccacgccatcggcgtgtccgtcgagggcgaactgggtgtgctcggctcgctggaaaccatgaaggccgacaaggaagacggccacggcgccgaaggccacatgacccgcgaagacctgctgaccgacgtcgagcaggccgccgacttcgtcaagcagaccaactgcgacgcgctggccatcgccatcggtaccagccacggcgcctacaagttcaccaagaagccgaccggcgacatcctcgccatcgaccgcatcgccgaaatccacgcccgtatcccgaacacccacctggtcatgcacggttcgtcttccgtgccgcaggaactgctggctgaaatccgcgaattcggcggcgacatgaaggaaacctacggcgtgccggtcgaggaaatcgtcaagggcatcaagcacggcgtgcgcaaggtcaatatcgataccgacatccgcctggccatgaccggcgccatccgccgttacctggccgagcatccggacaagttcgacccgcgcgactacctgaagccggcccgcgaagctgccaagaaaatctgcctggcccgctttgaagccttcggtaccgccggcaacgccagcaagatcaaggcgatcggcctcgacaagatggccgaacgttacgccaagggcgagctgaaccagatcgtcaaataa

SEQ ID NO: 149947 - protein, 354 aa, Dechloromonas aromatica RCB
MPLVSMRQLLDHAAENGYGLPAFNVNNMEQVWAIMEAAAQVDAPVIMQASAGARKYAGEPFLRHQILAALEAYPNIPIVMHQDHGQSPSVCMGAIRSGFSSVMMDGSLLADGKSVASYEYNVEVTRKVTEFAHAIGVSVEGELGVLGSLETMKADKEDGHGAEGHMTREDLLTDVEQAADFVKQTNCDALAIAIGTSHGAYKFTKKPTGDILAIDRIAEIHARIPNTHLVMHGSSSVPQELLAEIREFGGDMKETYGVPVEEIVKGIKHGVRKVNIDTDIRLAMTGAIRRYLAEHPDKFDPRDYLKPAREAAKKICLARFEAFGTAGNASKIKAIGLDKMAERYAKGELNQIVK

SEQ ID NO: 149948 - DNA, 1023 bp, Thermobifida fusca YX
  CDS (1)..(1023): transl_table=11
atgcctatcgcaacgcctgaggtctacgcagagatgctgggccgcgcgaagtctgagggcttcgcctacccggctatcaacgtcacgtccagccagaccctgcacgcggccctgcgcggtttcgccgaggctgaaagcgacggcatcgtgcagatctccaccggcggcgccgagttcctgtccggtaccaccatcaaggacatggtcaccggtgcggtggctttcgccgagtacgcccgggtcgtcgccgagaagtacccggtgaacatcgcgctgcacaccgaccactgccccaaggagaagctcgacaccttcgtgcgtccgctgctggcgatctccaaggagcgtgtcgccaaggggcaggagccgctattccagtcccacatgtgggacggctccgccgtggagctcgaggagaacctgcagatcgccgaggagctgctgaaggagtccaaggaggcccgcaccatcctcgagatcgaggtcggcgtggtcggcggtgaagaggacggcatcgtcggcgagatcaacgagaagctgtacaccaccccggaagacggcctgcgcaccgctgaagtgctcggcctcggcgagaagggctactacatcgccgccctgaccttcggtaacgtgcacggcgtgtacaagccgggccacgtgaagctgcgcccctccgtgctcaaggagatccaggacgtggtgggcgccaagtacggcaaggagaagccgttcgacctggtcttccacggcggctcgggctccagcctcgaggagatccacgaggcgatctcctacggtgtcgtgaagatgaacatcgacaccgacacccagtacgccttcacccggcccatcgtcgaccacatcatgaagaactacgacggtgtgctgaaggtcgacggcgacgtcggcaacaagaaggcctacgacccgcgctcctacggaaaggccgccgaagccggcatggccgcccgggtcgtcgaggctgcccagcagctcaagtccgctggcaagaagctcaagtaa

SEQ ID NO: 149949 - protein, 340 aa, Thermobifida fusca YX
MPIATPEVYAEMLGRAKSEGFAYPAINVTSSQTLHAALRGFAEAESDGIVQISTGGAEFLSGTTIKDMVTGAVAFAEYARVVAEKYPVNIALHTDHCPKEKLDTFVRPLLAISKERVAKGQEPLFQSHMWDGSAVELEENLQIAEELLKESKEARTILEIEVGVVGGEEDGIVGEINEKLYTTPEDGLRTAEVLGLGEKGYYIAALTFGNVHGVYKPGHVKLRPSVLKEIQDVVGAKYGKEKPFDLVFHGGSGSSLEEIHEAISYGVVKMNIDTDTQYAFTRPIVDHIMKNYDGVLKVDGDVGNKKAYDPRSYGKAAEAGMAARVVEAAQQLKSAGKKLK

SEQ ID NO: 149950 - DNA, 1080 bp, Anabaena variabilis ATCC 29413
  CDS (1)..(1080): transl_table=11
atggcgcttgtaccattgcggctgcttttggatcacgcggctgaaaacggttacggcatcccagctttcaacgttaacaatttggagcagattcaggcaatcctgaaggctgctgccgagacagatagccccgtaattttgcaagcttctcgtggcgctcgtaattatgcaggtgaaaacttcctccgccacctgatcttggctgcggtagaaacctatcctgagattcccatcgtcatgcaccaggatcatggtaatgctccttctacttgctactcagcaatcaagaacaacttcaccagcgtcatgatggatggttctttggaagctgatgctaaaacccctgctagcttcgagtacaacgtgaatgttacccgcgaagttgtaaatgtagctcatgctttgggcgtaagtgtagaaggtgaacttggttgtttgggttctctagaaaccggcgcaggtgaagctgaagacggacacggttttgaaggtactcttgaccattctcaactgttaactgaccccgatgaagctgttaacttcgtagaagcaacccaggtagatgctttggctgtagctatcggtactagccacggtgcttacaagtttacccgcaaacccaccggcgaaattttggctatcagccgtattgaagaaattcaccgccgtctgcctaacacccacttggtaatgcacggttcttcttccgtacctgaagatttaatcgctttgatcaacgagtacggtggtgctattcctgaaacctacggtgtacctgtagaagaaatccaaaaaggtatcaagagtggtgttcgcaaagttaacatcgacactgacaaccgtttggcaattactgcggctgtacgtgaagctttagccaaaaatcccaaggaatttgacccccgtcacttcctcaagccttctattacatatatgcagaaggtttgtgcagaacgctatgtacaattcggtactgctggtaatgctagcaagattaagcaagtttctctagaaacttttgctgctaagtatgctaaaggcgaattgaacgctatcagcaaatctgctgctaaggtttaa

SEQ ID NO: 149951 - protein, 359 aa, Anabaena variabilis ATCC 29413
MALVPLRLLLDHAAENGYGIPAFNVNNLEQIQAILKAAAETDSPVILQASRGARNYAGENFLRHLILAAVETYPEIPIVMHQDHGNAPSTCYSAIKNNFTSVMMDGSLEADAKTPASFEYNVNVTREVVNVAHALGVSVEGELGCLGSLETGAGEAEDGHGFEGTLDHSQLLTDPDEAVNFVEATQVDALAVAIGTSHGAYKFTRKPTGEILAISRIEEIHRRLPNTHLVMHGSSSVPEDLIALINEYGGAIPETYGVPVEEIQKGIKSGVRKVNIDTDNRLAITAAVREALAKNPKEFDPRHFLKPSITYMQKVCAERYVQFGTAGNASKIKQVSLETFAAKYAKGELNAISKSAAKV

SEQ ID NO: 149952 - DNA, 1080 bp, Rhodobacter sphaeroides 2.4.1
  CDS (1)..(1080): transl_table=11
atggccctgatcacgctcagacaattgctcgaccatgccgcagagcgcggctatggcgtgcccgccttcaacatcaacaacatggagcaggggctcgccatcctcgccgccgcccgcgcctgcgacgcgccggtgatcctgcaggccagccgcggggcgcgcagctatgccggcgacatcatgctgcgccacatcgtcgaggcgctggccgaaatgtatccgcagatcccgatctgcctgcatcaggaccacggcaacaacgaggccacctgcctctcggcgatccggcacggcttcacctcggtgatgatggacggatcgcttcaggccgacatgaagacggtggcctcctacgattacaacgtggacatcacccgccgcgtgaccgacgcggcccactgggtcggagcctcggtcgagggcgagctgggggtgctgggcagcctcgagaagggcgaggcggaggccgaggacggctcgggtgcggaaggaaagctcgaccacagccagatgctgaccgacccggatcaggcggtggagttcgtgcaggcgacccgcgtcgacgcgctggccatcgccatgggcacgagccacggcgcctacaagttcagccgcaagccggacggcgagatcctcgccatgcgcgtgatcgaggagatccacgcccggctgcccgcgacgcatctggtgatgcacggctcgtcctcggtgccgcaggcgctgcaggatctcatcaacgcccatggcggcgatatgcctcagacctacggagtcccggtcgaggagatcgagcgcggcatccgtcacggggtccgcaaggtcaatatcgacaccgactgccggatggccctgaccggccagttccgcaaggtcgccatggagagcccgaaggagttcgacccgcggaagttcatgatccccgcgatgaaggagatggaggccctcgtccgcgaccggttcgagcggttcggcactgcgggcaatgcttcgaagatcaccgtcatcccgatggatgacatggccaagcgctacgcgagcggagcgctcgatcctgcggtcgcgaccgccaaagccgcctga

SEQ ID NO: 149953 - protein, 359 aa, Rhodobacter sphaeroides 2.4.1
MALITLRQLLDHAAERGYGVPAFNINNMEQGLAILAAARACDAPVILQASRGARSYAGDIMLRHIVEALAEMYPQIPICLHQDHGNNEATCLSAIRHGFTSVMMDGSLQADMKTVASYDYNVDITRRVTDAAHWVGASVEGELGVLGSLEKGEAEAEDGSGAEGKLDHSQMLTDPDQAVEFVQATRVDALAIAMGTSHGAYKFSRKPDGEILAMRVIEEIHARLPATHLVMHGSSSVPQALQDLINAHGGDMPQTYGVPVEEIERGIRHGVRKVNIDTDCRMALTGQFRKVAMESPKEFDPRKFMIPAMKEMEALVRDRFERFGTAGNASKITVIPMDDMAKRYASGALDPAVATAKAA

SEQ ID NO: 149954 - DNA, 1026 bp, Syntrophus aciditrophicus SB
  CDS (1)..(1026): transl_table=11
atgccggtagccgactatgaaacgttttgcagaatgatcgaaagggcccggaaaaattcttttgcgtatcccgctatcaacgtgacatcgcttacgacggccaacgcggttctgaaagggctggcagagagcggaagcgatggaattcttcaggtttctacgggcggagccgcctttgcctcgggttccgcggtcaaggacatggctctcggcgccatctcgattgccgaacatgtccaccgcgttgcagaccgatatcccatttacatagccctgaacacggaccattgcacggcgggcaatctcgaaaaattcgtgattccgctggtggaggaaacggagaagcggcgtgcggcaggaaaaccgaacctgttcacggctcacatgttcgacgggagcgtcctcccgctgaaggagaatctggatatcgcggagaaactgctcgaacgcttccggaaaagcgacctgatccttgaaatcgaagcgggtgtggtcggcggcgaggaagacggcgtcaaggccagtgccgccgccaaactttacaccacccccgaggataccctcgcggtcgcccgccggctgaacgcaatttcgggtgcgcgctacctgctggcggcgaccttcggcaatgttcacggtgtctacaagcccggtcacgttcagctgaagccttccatcctgaaggagtgccaggatgcggtggtgaagacatacggagaagaggcccgcttctattttgtgtttcacggcggttcaggatcttcgattgaagacattcatgccgccgtcgattacggcgtggtcaagatgaacatcgatacggacacgcagtacgcctttacccgggccattgccgatcacctgttccggaattacagcggcgcattgaaagtggacggcgatgtgggcgacaagaaagtctatgatccgcgggtttatctgggcctggccgaggccgccatggcacagcgggtcaggcaggccgtgaccgaactgcgaagccggaacacgacgctgatgaaatga

SEQ ID NO: 149955 - protein, 341 aa, Syntrophus aciditrophicus SB
MPVADYETFCRMIERARKNSFAYPAINVTSLTTANAVLKGLAESGSDGILQVSTGGAAFASGSAVKDMALGAISIAEHVHRVADRYPIYIALNTDHCTAGNLEKFVIPLVEETEKRRAAGKPNLFTAHMFDGSVLPLKENLDIAEKLLERFRKSDLILEIEAGVVGGEEDGVKASAAAKLYTTPEDTLAVARRLNAISGARYLLAATFGNVHGVYKPGHVQLKPSILKECQDAVVKTYGEEARFYFVFHGGSGSSIEDIHAAVDYGVVKMNIDTDTQYAFTRAIADHLFRNYSGALKVDGDVGDKKVYDPRVYLGLAEAAMAQRVRQAVTELRSRNTTLMK

SEQ ID NO: 149956 - DNA, 1038 bp, Frankia sp. CcI3
  CDS (1)..(1038): transl_table=11
atgcccatcgccacgccagacgtatatgccgagatgctcgaccgggcgaaggcccagtccttcgcctaccccgcgatcaacgtgacctcgtcgcagtccctgaacgccgcgctgcggggcttcaccgaagccggcagtgacggcatcgtgcaggtgtccaccggcggtgccgagtacctgtccggctcgacggtgaagaacatggtcctcggcgcggaggcactggccgagttcgcccaccacgtcgcgaaggcgtatccggtcaacatcgccctgcacaccgaccactgcccggccgacaagcttgacacctacatccgccccttgatcgcgatctcgaagaatcgggtggcccagggacgcgagccgctcttccagtcgcacatgtgggacggctcggcggtccccctcgaggagaacctcaagatcgccgaagaactactcgcggacgccgccgccgcgaagatcgttctcgaggtcgagatcggggtcgtcggcggcgaggaggacggcgtcgtcggcgcgatcgacgagaagctctacacgacgccggaggacatgtggcggacggccgaggtgctcggcaccggcgcgaaggggcgctacctgctcgccgccaccttcggcaacgtgcacggtgtgtacaagcccggaaacgtcaagctacgcccgacgattctgcacgaaggacaggagtacgtcgccaggaagctcgggctgccagccggcgcgaagccgttcaacctcgtctttcacggcggtagcgggtcggctctcaccgaaatccgcgagaccctcgactacggggtggtcaagatgaacgtggacacggacacccagtacgcattcacccgccccatcgtggaccacgtgttcaaaaactatgacggcgttctcaaggtggacggtgaggtcggcgtgaagaaggcgtacgacccgcgtacctacggaaagctcgcggagagcagcatggcggcccgcgtcgcccaggcgtgtgaggacctccgttccgccggcaccagcctcgggcgggcatag

SEQ ID NO: 149957 - protein, 345 aa, Frankia sp. CcI3
MPIATPDVYAEMLDRAKAQSFAYPAINVTSSQSLNAALRGFTEAGSDGIVQVSTGGAEYLSGSTVKNMVLGAEALAEFAHHVAKAYPVNIALHTDHCPADKLDTYIRPLIAISKNRVAQGREPLFQSHMWDGSAVPLEENLKIAEELLADAAAAKIVLEVEIGVVGGEEDGVVGAIDEKLYTTPEDMWRTAEVLGTGAKGRYLLAATFGNVHGVYKPGNVKLRPTILHEGQEYVARKLGLPAGAKPFNLVFHGGSGSALTEIRETLDYGVVKMNVDTDTQYAFTRPIVDHVFKNYDGVLKVDGEVGVKKAYDPRTYGKLAESSMAARVAQACEDLRSAGTSLGRA

SEQ ID NO: 149958 - DNA, 1080 bp, Saccharophagus degradans 2-40
  CDS (1)..(1080): transl_table=11
atgaactctatcagaaacactgtgcccgccggagtggttttcggcgagcaaacacacacattatttgcctacgcaaaagcgaacggttttgcgtatccagctgttaacgtagtgggaaccaactcactaaacgcaactttagaggcggctaaagcgaatgaatcaccggtaatagtgcaactatcgcacggtggctcggcgttctttttgggtaaggggctgtcgctagaggggcagcaaaactctattttaggggctattgcagccgcaaaatttactcataccgttgcagaagcctatggtgtgccggtaattttacataccgatcatgctgctaaaaaattgttaccttggatagacggcctgcttgatgccggtgaagaattctacgagcaaacgggtaagcctttgtttagctcacatatgttggatttatccgaagagcctttggaagaaaacatagaaatttgcgctaaatatttagcgcgtatgagccgcataggtatgaccctagaaattgaattgggttgcactggtggtgaagaagacggcgtggacaatagcggcctcgatgatgaagacctttacactcgccctgaagatgtggcctacgcctataaagtgctaagcgctataagccctaactttaccattgcagcttcgtttggcaatgtacacggcgtgtataagcccggcaacgtgaagttgcgccctaaaattttgcgcgatgcgcaaagcttggtaagcgaaacctttaacctgccagccaatagtttagattttgtattccacggcgggtctggctctgagttaagtgatattcgcgaatcaattggctatggtgtaattaaaatgaacatcgacaccgatacccaatgggctgcgtggcaaggcgtaaaagactactacgaagcgaatcacgcgtatttacagggcaaaataggtaatcctgatggtgatgataagccaaataaaaaatattacgacccgcgagtttggttgcgtaaattagaggagagtatggtgagccgcttagagcagtcgttcatcgatttaaattgcgtaaaccgctatcgataa

SEQ ID NO: 149959 - protein, 359 aa, Saccharophagus degradans 2-40
MNSIRNTVPAGVVFGEQTHTLFAYAKANGFAYPAVNVVGTNSLNATLEAAKANESPVIVQLSHGGSAFFLGKGLSLEGQQNSILGAIAAAKFTHTVAEAYGVPVILHTDHAAKKLLPWIDGLLDAGEEFYEQTGKPLFSSHMLDLSEEPLEENIEICAKYLARMSRIGMTLEIELGCTGGEEDGVDNSGLDDEDLYTRPEDVAYAYKVLSAISPNFTIAASFGNVHGVYKPGNVKLRPKILRDAQSLVSETFNLPANSLDFVFHGGSGSELSDIRESIGYGVIKMNIDTDTQWAAWQGVKDYYEANHAYLQGKIGNPDGDDKPNKKYYDPRVWLRKLEESMVSRLEQSFIDLNCVNRYR

SEQ ID NO: 149960 - DNA, 1098 bp, Saccharophagus degradans 2-40
  CDS (1)..(1098): transl_table=11
atgaacgagacgaccctttttccggcgggcgtactaactggtgacgatgtccagcgcgtatttaaacacgcgaaagaaaatggctacgctttacccgcggttaacgtaactagctccagtactgtaaatgcagtattggaagttgctcgcgatttaaatacgcccattattattcaattctctaatggcggcgctgcattctatgcgggcaaaggccttaagaatgtgaaccaacaaggctctattgccggtgccattgctggtgctaagcatgtgcatcaagtagccaaagaatacggtgtgagcgttatgttgcacaccgatcacgctgccaagcaattactgccttggatagacggcctactggatgctggcgaagagttttatgctcaaacgggcaagccattattttcttcgcacatgttagatctgtctgaagagccgttagaagagaatatcgccacttgcaaagcttatctagagcgcatggccaagatggatatgacactagaaattgaactgggcgtaaccggcggcgaagaagatggtgtagataacaccgatgtagatagttctaaactctacactcagccagaagaagtagcctatgcctacgaacagcttagtgaggttagcccacgctttactgtggctgcgtcatttggcaatgtgcatggtgtttattctccaggtaacgtaatattgcgccccgaaattttgaagaactcgcaggcgtttattgccgagaaatataatactggcgctaaccctgtcgatttcgtgttccacggtggatccggttctgatttaaaagatatccgcgaagcaattagctacggggttattaagatgaacgtagataccgatttacagtgggcctactgggacggtgtaaagagttactacgagcagcgtatggagtaccttcaagcgcaaatcggcaacccagaaggcgccaataaaccaaataaaaagtactacgatccacgtcaatggatacgcagtggcgaggaatcattcgctgataagctaaagtctatttgtgaagatttgggctgtgcgcaagccaacccagttagcgaggctcaaatagcttaa

SEQ ID NO: 149961 - protein, 365 aa, Saccharophagus degradans 2-40
MNETTLFPAGVLTGDDVQRVFKHAKENGYALPAVNVTSSSTVNAVLEVARDLNTPIIIQFSNGGAAFYAGKGLKNVNQQGSIAGAIAGAKHVHQVAKEYGVSVMLHTDHAAKQLLPWIDGLLDAGEEFYAQTGKPLFSSHMLDLSEEPLEENIATCKAYLERMAKMDMTLEIELGVTGGEEDGVDNTDVDSSKLYTQPEEVAYAYEQLSEVSPRFTVAASFGNVHGVYSPGNVILRPEILKNSQAFIAEKYNTGANPVDFVFHGGSGSDLKDIREAISYGVIKMNVDTDLQWAYWDGVKSYYEQRMEYLQAQIGNPEGANKPNKKYYDPRQWIRSGEESFADKLKSICEDLGCAQANPVSEAQIA

SEQ ID NO: 149962 - DNA, 1050 bp, Methylobacillus flagellatus KT
  CDS (1)..(1050): transl_table=11
atggcgcttatcagtctacgtcaattgctggatcacgctgccgagcatgactacggcgtgccagccttcaatgtgaataacctggagcaggtgcaagccatcatgcgcgcagcggattcgtgccatagcccggtgatcctgcaagcatccgcaggcgcgcgcaagtatgcaggagaggcttttctgctcaagctcgccgaagcggccatcgccagttatccgcatcttcctgtcgtgctgcaccaggatcacggtgccagtccggcgatatgcctacatgccatccaaagtgggtttagcagcgtgatgatggacggctcgttgctggaggatggcaagacgccggccagttatgaatacaatgtggaggtgacgcggcaggtggtgatggcggcgcatgcggtgggcgtgtcagtggaaggcgagctgggcgtgctaggctcgctggaaactggcctggcaggcgaggaggatggtgttggtgctgaaggccgtctggatcgtagccagttgctcaccagcccggaagaggcggtggattttgttgcgcggacaggcgtggatgctttggcagtcgcgatcggcacgtcgcatggggcctataaattcaagcgtccgcctactggtgaaacacttgccatcagccgcctgcgcgagattcatgcaaggttgccgaacacgcatctggtgatgcatgggtcttcctccgtgccgcaggagtggctgcaggtaatcaatgaatatggcggcgagattcccgagacctatggcgtgccggtggaggaaatcgtcaaggggatccgcagcggggtgcgcaaggtcaatatcgataccgatttgcggttggctttcactggggcgctgcgccgctttctcggtcagccggagcacacggcggaattcgatccacgcaaaatcttggcggccgcgaccagcgccatgcagacattatgccgggaacgcttcgaggcatttggctctgccgggcgggcgacacaaatccaacctgtccctctcgacgaaatggcgcagagatacgtggtttcctag

SEQ ID NO: 149963 - protein, 349 aa, Methylobacillus flagellatus KT
MALISLRQLLDHAAEHDYGVPAFNVNNLEQVQAIMRAADSCHSPVILQASAGARKYAGEAFLLKLAEAAIASYPHLPVVLHQDHGASPAICLHAIQSGFSSVMMDGSLLEDGKTPASYEYNVEVTRQVVMAAHAVGVSVEGELGVLGSLETGLAGEEDGVGAEGRLDRSQLLTSPEEAVDFVARTGVDALAVAIGTSHGAYKFKRPPTGETLAISRLREIHARLPNTHLVMHGSSSVPQEWLQVINEYGGEIPETYGVPVEEIVKGIRSGVRKVNIDTDLRLAFTGALRRFLGQPEHTAEFDPRKILAAATSAMQTLCRERFEAFGSAGRATQIQPVPLDEMAQRYVVS

SEQ ID NO: 149964 - DNA, 1065 bp, Ralstonia metallidurans CH34
  CDS (1)..(1065): transl_table=11
atgccactcgtatccatgcgccagttgctggaccatgccgccgagaacaactacggtctgccggctttcaacgtgaacaacctcgagcaggttcaggccatcatgcaggccgccgacgaggtcaacgccccggtgatcatgcaggcatcggcaggcgcgcgcaaatacgctggcgagcacttcctgcgtcacctgatcgaagccgccgtggaagcctatccgcacatcccggtggtgatgcaccaggatcacggccagtcgccggcgatctgcaaggccgccatcgacctgaacttctcgtcggtgatgatggatggctcgctgaaggaagacggcaagaccccgtcggactacgagtacaacgtcgacgtgacccgcaaggtggtgcagatggcccacgcgctgggcgtgaccgtggaaggcgaactgggttgcctgggctcgctggaaaccggtgaagccggcgaggaagacggcattggcgccgaaggcaagctcgatcactcgatgctgctgaccgatccggagcaggccgccgacttcgtcaaggccacccagctcgacgcgctggccatcgccatcggcacctcgcacggcgcgtacaagttcacgcgcaagcccacgggcgacatcctggccatcgggcgcatcaaggaaatccacgcccgcattccgaacactcacctggtgatgcacggttcgtcgtcggtgccgcaggaactgctggctgaaatccgccagttcggtggcgacatgaaggaaacgtacggcgtgcccgtggaggaaatccaggaagcgatcaagtacggcgtgcgcaagatcaacatcgacaccgacatccgtctggcgatgaccggcgcgatccgccgcttcttcgtggagaacccgagcaagttcgacccgcgcgagtacctgaagccggcccgcgaagccgccaagctcgtgtgcaaggcccgctacatcgccttcggttgtgaaggccaggccagcaagatcaaggccgtgtcgctgaccgacgttgcccagcagtacaaggccggcaagctcgcccaggtcgtgcagtaa

SEQ ID NO: 149965 - protein, 354 aa, Ralstonia metallidurans CH34
MPLVSMRQLLDHAAENNYGLPAFNVNNLEQVQAIMQAADEVNAPVIMQASAGARKYAGEHFLRHLIEAAVEAYPHIPVVMHQDHGQSPAICKAAIDLNFSSVMMDGSLKEDGKTPSDYEYNVDVTRKVVQMAHALGVTVEGELGCLGSLETGEAGEEDGIGAEGKLDHSMLLTDPEQAADFVKATQLDALAIAIGTSHGAYKFTRKPTGDILAIGRIKEIHARIPNTHLVMHGSSSVPQELLAEIRQFGGDMKETYGVPVEEIQEAIKYGVRKINIDTDIRLAMTGAIRRFFVENPSKFDPREYLKPAREAAKLVCKARYIAFGCEGQASKIKAVSLTDVAQQYKAGKLAQVVQ

SEQ ID NO: 149966 - DNA, 1098 bp, Cytophaga hutchinsonii ATCC 33406
  CDS (1)..(1098): transl_table=11
atggttgaaaatgtaaaaagcaaagcgctgactggcgttatcactggcgatcaggttcaggatttatttgcagctgctaaaaaggcgaaacttgcattccctgcagtaaacgtagtaagtactggtactgtaaacgcagtattggaaacagcgaaacttgctaactctcctgttattgttcagttctctaacggtggtggtcaattctatgctggtaaatcattaccaaacggaaaacaggaagcgtctattgccggtgctatctctggtgcacaccacgttcatcaggtttctgaattatatggtgtaggtgttattttacatacagatcacgctgctaaaaaattacttccatggattgatggtttgttagatgcaggtgaagcattctacaaagtgcatggcaaaccattgtattcttctcacatgttagatctttctgaagagccattacatgaaaacatcgaagtttgcaaaagataccttgagcgtatgagcaaaatcggcatgacacttgaaattgaattaggtgttacgggtggtgaagaagatggtgttgataactcaggtattcaccaggatgaattatatacaaaaccggaagaagttgcatatgcatacgaagaacttatgaaagtaagtgataagtttacgattgctgctgcatttggtaacgtacacggtgtttatacatccggaagcgttaaattagagccgaaaattttgagaaaatctcaggatttcattaaagcgaactacggtcgtacggaagaaaatccattggatttcgtattccatggtggttctggttcttctcaggaagaaatccgtgaagcaatcggttatggcgtagttaaaatgaatttagatacagatttgcaatgggcattctgggaaggtgtattaaattactataaagcaaacgaagcatatcttcaaggacaaattggtaaccctaaaggtgctgatcaaccgaacaagaaattctatgatccacgcgtttggttacgtaaaggtgaagatacatttgtagcccgtttaaagaaagcattcgaagacttgaactcattcgatgcgaatactaaaatggggaactaa

SEQ ID NO: 149967 - protein, 365 aa, Cytophaga hutchinsonii ATCC 33406
MVENVKSKALTGVITGDQVQDLFAAAKKAKLAFPAVNVVSTGTVNAVLETAKLANSPVIVQFSNGGGQFYAGKSLPNGKQEASIAGAISGAHHVHQVSELYGVGVILHTDHAAKKLLPWIDGLLDAGEAFYKVHGKPLYSSHMLDLSEEPLHENIEVCKRYLERMSKIGMTLEIELGVTGGEEDGVDNSGIHQDELYTKPEEVAYAYEELMKVSDKFTIAAAFGNVHGVYTSGSVKLEPKILRKSQDFIKANYGRTEENPLDFVFHGGSGSSQEEIREAIGYGVVKMNLDTDLQWAFWEGVLNYYKANEAYLQGQIGNPKGADQPNKKFYDPRVWLRKGEDTFVARLKKAFEDLNSFDANTKMGN

SEQ ID NO: 149968 - DNA, 1035 bp, Rhodococcus sp. RHA1
  CDS (1)..(1035): transl_table=11
gtgccaatcgcgactcccgaggtctacgccgagatgcttggtcgggccaaggagcactcctttgccttccccgccatcaactgcacttcttccgaaaccatcaacgccgccatcaagggcttcgcggacgccggtagtgacggcatcatccagttctcgaccggtggcgccgagttcggttcgggcctgggcgtcaaggacatggtgaccggcgcggtcgcactcgccgagttcgcacacgtgatcgccgcgaagtacgacgtcacgatcgccctgcacaccgaccactgccccaaggacaagctcgacacgttcgtccggccgctgctcgagatctcgaggcagcgcgtcgaggccggccgcaacccgctgttccagtcccacatgtgggacgggtcggctgtcccgatcgacgagaacctggaaattgcccaggagctcctcgccaaggcgaaggccgccaacatcatcctcgaggtcgagatcggcgtcgtcggtggtgaagaggacggcgtggaagcggagatcaacgacaagctctacacctcgcccgaggacttcgagaagaccgtcgacgcgctcggcaccggcgagaacggcaagtacctgctcgccgccacgttcggcaacgtgcacggcgtctacaagccgggcaacgtgaagctgcgtcccgaggtgctcgagaccggccagaaggtcgccgccgccaagctgggcctgtccgacagctcgcagccgttcgacttcgtcttccacggcggatcgggctcgctgaagtcggagatcgaggctgcgctgaactacggcgtcgtgaagatgaacgtcgacacggacacccagtacgcgttcacccgcccgatcgcgggccacatgttcagcaactacgacggcgtcctgaaggtcgacggcgaggtcggcaacaagaaggtctacgacccgcgcagctacctgaagaaggccgaggccggcatggcggcccgcgtcgtcgaggcctgcaacgacctcaagtccgcggggcgttccgtctccggatag

SEQ ID NO: 149969 - protein, 344 aa, Rhodococcus sp. RHA1
MPIATPEVYAEMLGRAKEHSFAFPAINCTSSETINAAIKGFADAGSDGIIQFSTGGAEFGSGLGVKDMVTGAVALAEFAHVIAAKYDVTIALHTDHCPKDKLDTFVRPLLEISRQRVEAGRNPLFQSHMWDGSAVPIDENLEIAQELLAKAKAANIILEVEIGVVGGEEDGVEAEINDKLYTSPEDFEKTVDALGTGENGKYLLAATFGNVHGVYKPGNVKLRPEVLETGQKVAAAKLGLSDSSQPFDFVFHGGSGSLKSEIEAALNYGVVKMNVDTDTQYAFTRPIAGHMFSNYDGVLKVDGEVGNKKVYDPRSYLKKAEAGMAARVVEACNDLKSAGRSVSG

SEQ ID NO: 149970 - DNA, 1080 bp, Haemophilus somnus 129PT
  CDS (1)..(1080): transl_table=11
atggcaaaattactagacattgtaaaacctggtgtattaactggtgatgacgttcaaaaagtatttgcttacgcaaaagcaaataactttgcaattccggcagtaaactgtgttgggacagattctgtgaatgcagtattagaaaccgctgcacgagtaaaagcacctgttattattcaattctcaaacggtggtgcggcgttttatgcaggaaaaggaattaaaccggctagcggtattcgtccggatgtattaggtgcaattgcggctgctaaacatgttcatacattagcggcagaatatggtgttccggttattcttcataccgaccatgcggcaaaaaaattacttccttggattgacggtttattggaagcaggcgagaaacactttgctgaaacaggcaaaccattgttctcatctcacatgattgatttatccgaagagccaatggcagagaatatggcaatttgtcgtgaataccttgcccgcatggataaaatggggatgaccttggaaatcgaaatcggtattaccggcggtgaagaagacggtgtggataattcagatgttgatgagtctaaactttatactcagccggaagatgtcctttttgtttacgatcaattaagtccaatcagcccacgttttactatcgccgccgcatttggtaatgttcacggggtatataaaccgggcaacgtaaaattaaaaccgtctattttaggtgcatcacaagaatttgtttctaaagaacgtaatcttccggcgaaatcattagacttcgtattccatggcggttcaggttcttcaacggaagaaattcgtgaagcgatcagctacggtgcaattaaaatgaatattgacacggatacccaatgggcaacttgggaaggcgttttaaacttctataaagcaaatgaagcttatttacaaggtcaattaggtaatccagaaggacctgatgcaccgaataaaaaatactatgatcctcgagtttggttacgcaaagcagaagaatctatgtctaaacggttagaaaaatctttcgaagatttgaactgtgttgatgtactgtaa

SEQ ID NO: 149971 - protein, 359 aa, Haemophilus somnus 129PT
MAKLLDIVKPGVLTGDDVQKVFAYAKANNFAIPAVNCVGTDSVNAVLETAARVKAPVIIQFSNGGAAFYAGKGIKPASGIRPDVLGAIAAAKHVHTLAAEYGVPVILHTDHAAKKLLPWIDGLLEAGEKHFAETGKPLFSSHMIDLSEEPMAENMAICREYLARMDKMGMTLEIEIGITGGEEDGVDNSDVDESKLYTQPEDVLFVYDQLSPISPRFTIAAAFGNVHGVYKPGNVKLKPSILGASQEFVSKERNLPAKSLDFVFHGGSGSSTEEIREAISYGAIKMNIDTDTQWATWEGVLNFYKANEAYLQGQLGNPEGPDAPNKKYYDPRVWLRKAEESMSKRLEKSFEDLNCVDVL

SEQ ID NO: 149972 - DNA, 1065 bp, Magnetococcus sp. MC-1
  CDS (1)..(1065): transl_table=11
atgcctctcgtttccatgcgccaactgttggaccacgctgctgaaaatagctatggcctgcccgcttttaacgtcaataatatggagcaggtgcgtgccatcatgcgcgcagccgatgagaccgatagcccggttatcctgcaagcctctgctggggcccgtaaatatgctggcgaagcctttttgcgccatcagattctggccgcactggagctctatccccatatccccatctgtatgcaccaggatcatgggcagtcccccgccatttgtcaggcggctattcgttccaactttagctcggtcatgatggatggctccctgcgtgaagatggcaaaaccccttccgattgggactacaacgtcgccaccaccgctaaagtggtcgagttctcccatgccatcggcgttagtgtcgagggtgagctgggtgtgcttggctccctggaaaccggcatggctggtgaagaggatggcgtcggtgccgagggcaaaatggaaaaagatgccctgctgaccgatcccgaagaggccgcccgctttgttaaagagacccatgtggatgctttggccatcgccattggtaccagccacggggcctataaatttacccgtaaacccaccggtgatattctggccattggccgtattgccgagattaatgcacgcatccccaatacccatttggtgatgcatggctcctcatcagtgccccaggagctgctggcgatcatcaatgagttcggcggtgagatccccgaaacctatggtgtgccggtggaagagattgtgcgtggcatccaacatggtgtacgcaaaattaacgtggataccgatctgcgtttggctatgactggtgccattcgtaaatatttccacaagaatcccagcgcgtttgacccgcgcgggtataaccgtcctgcggaagatgcggcctatgccgtatgtaaggcccgttatgaggccttcggtgccgctggcaatgcctctaagatcaaagtgatcaccatggaggatatggccaagcgttacgcttccggggagcttgaccccaaggtgaattaa

SEQ ID NO: 149973 - protein, 354 aa, Magnetococcus sp. MC-1
MPLVSMRQLLDHAAENSYGLPAFNVNNMEQVRAIMRAADETDSPVILQASAGARKYAGEAFLRHQILAALELYPHIPICMHQDHGQSPAICQAAIRSNFSSVMMDGSLREDGKTPSDWDYNVATTAKVVEFSHAIGVSVEGELGVLGSLETGMAGEEDGVGAEGKMEKDALLTDPEEAARFVKETHVDALAIAIGTSHGAYKFTRKPTGDILAIGRIAEINARIPNTHLVMHGSSSVPQELLAIINEFGGEIPETYGVPVEEIVRGIQHGVRKINVDTDLRLAMTGAIRKYFHKNPSAFDPRGYNRPAEDAAYAVCKARYEAFGAAGNASKIKVITMEDMAKRYASGELDPKVN

SEQ ID NO: 149974 - DNA, 1038 bp, Mycobacterium smegmatis str. MC2 155
  CDS (1)..(1038): transl_table=11
atgcccattgccacacctgaggtctacgccgagatgctggaccgggccaaggcgcactcgttcgcgttcccggcgatcaactgcgtggggtccgaaagcatcaatgcggccatcaaggggtttgccgacgccggcagcgacggcatcatccagttctccaccggtggcgccgaattcgggtcgggcctgggcgtcaaggacatggtgaccggcgcggtcgcgctcgcggagttcgcgcacgtggtggccgccaagtacccgatcaccgtggcgctgcacaccgaccactgccccaaggacaagctcgacacgtacgtgcgcccgctgctggcgatctccgccgagcgtgtcgcccggggtgagaacccgctgttccagtcgcacatgtgggacgggtccgcggtgccgatcgacgagaacctcaccatcgcgcaggaactgctcaagaccgccgcggcggccaagatcatcctcgaggtcgagatcggcgtggtcggtggcgaagaggacggcgtcgaggccgagatcaacgacaagctctacacgtcgccggaagacttcgagaagaccatcgcggcgctgggcgcgggcgaggaggggcggtacctgctggccgcgacgttcggcaatgtgcacggcgtctacaagcccggcaacgtggtgctcaaacccgaggtgctggccgaggggcagcgcgtggccgcggccaaactgggcctgcccgcggacgccaaaccgttcgacttcgtcttccacggcggctcgggctcgctgaaatccgagatcgaggactccctcaagtacggcgtggtgaagatgaacgtcgacaccgacacccagtacgcattcacccggccgatcgccgggcacatgttcaccaactacgacggggtgctcaagatcgacggcgaggtgggcaacaagaagacctacgacccgcgcagctacctgaagaaggccgaggcgtcgatgtcggagcgggtggtcgaggcctgcaacgacctgcacagcgcgggacgcagcgtcaccgcggcataa

SEQ ID NO: 149975 - protein, 345 aa, Mycobacterium smegmatis str. MC2 155
MPIATPEVYAEMLDRAKAHSFAFPAINCVGSESINAAIKGFADAGSDGIIQFSTGGAEFGSGLGVKDMVTGAVALAEFAHVVAAKYPITVALHTDHCPKDKLDTYVRPLLAISAERVARGENPLFQSHMWDGSAVPIDENLTIAQELLKTAAAAKIILEVEIGVVGGEEDGVEAEINDKLYTSPEDFEKTIAALGAGEEGRYLLAATFGNVHGVYKPGNVVLKPEVLAEGQRVAAAKLGLPADAKPFDFVFHGGSGSLKSEIEDSLKYGVVKMNVDTDTQYAFTRPIAGHMFTNYDGVLKIDGEVGNKKTYDPRSYLKKAEASMSERVVEACNDLHSAGRSVTAA

SEQ ID NO: 149976 - DNA, 1032 bp, Nocardioides sp. JS614
  CDS (1)..(1032): transl_table=11
atgcccatcgccacccccgagaagtacgccgagatgctggaggcggccaagaagaacgcgttcgcgttcccggccatcaacgtctcgtcgtcgcagaccctcaacgcggcgctccagggcttcgccgacgccgggtccgacgggatcatccaggtctcgaccggcggcgcggagtacttctccggaccgacgatcaagaacatggtcaccggctccgtcgcgttcgccgcctacgccgccgaggtcgcgaagaactacccgatcaacgtcgcgctgcacaccgaccactgccccaagggcaagctggacggcttcgtgcgcccgctgctcgacatctccgccgagcgcgtcgcccgcggcgaggccccgctgttccagtcgcacatgtgggacggctccgccgtaccgctcgacgagaacctccagatcgccgaggagctcctggccaagtgcgcggccgcgcacatcatcctcgaggtcgagatcggcgtcgtgggcggcgaggaggacggtgtcgtcggcgagatcaacgacaagctctacaccacccccgaggacgcgctggcgaccgtcgcggccctgggcgccggcgagaacggccgctacatgaccgcgctgaccttcggcaacgtgcacggcgtctacaagccgggcaacgtcaagctccgcccggagatcctcaaggcggcccaggaggccgtcgccgagaagctcggcctggccgcgggctcgaagcccttcgacctggtcttccacggcgggtccggctcgacggccgaggagatcggcgccgccgtcgactacggcgtggtgaagatgaacgtcgacaccgacacccagtacgcgttcactcgcccggtggcgacgcacatgttccagaactacgacggcgtcctcaagatcgacggcgaggtcggcaacaagaagatgtacgacccgcgggcctggggcaaggcggccgagagcggcatggccgcccgggtcgtcgaggcgtgccagaacctgcgcgccgcgggccactcgatcggctga

SEQ ID NO: 149977 - protein, 343 aa, Nocardioides sp. JS614
MPIATPEKYAEMLEAAKKNAFAFPAINVSSSQTLNAALQGFADAGSDGIIQVSTGGAEYFSGPTIKNMVTGSVAFAAYAAEVAKNYPINVALHTDHCPKGKLDGFVRPLLDISAERVARGEAPLFQSHMWDGSAVPLDENLQIAEELLAKCAAAHIILEVEIGVVGGEEDGVVGEINDKLYTTPEDALATVAALGAGENGRYMTALTFGNVHGVYKPGNVKLRPEILKAAQEAVAEKLGLAAGSKPFDLVFHGGSGSTAEEIGAAVDYGVVKMNVDTDTQYAFTRPVATHMFQNYDGVLKIDGEVGNKKMYDPRAWGKAAESGMAARVVEACQNLRAAGHSIG

SEQ ID NO: 149978 - DNA, 1065 bp, Azoarcus sp. BH72
  CDS (1)..(1065): transl_table=11
atgcccctcgtttccatgcgccagctgctcgaccacgccgccgagaacagctacggtctgccggcgttcaacgtgaacaacttggaacaggtccaggccatcatggaagccgcggccgaaaccgacagccccgtgatcatgcaggcctctgccggggcgcgtaagtacgcgggcgaagccttcctgcgccacctcatcgacgccgcggtcgaagcctatccgcacatccccgtggtgatgcaccaggaccacggccagagccccgcggtctgcatggccgccatccgctcgggcttctccagcgtgatgatggacggctcgctgatggaagacggcaagacgccctcctcctacgaatacaacgtcgccgtcacccgcgaagtggtgaagttctcgcacgccatcggcgtcaccgtggaagccgaactcggctgcctcggctcgctggaaaccggcatggccggcgaggaagacggcattggcgccgaaggcaagctcgaccacagcgcgctgctgaccgatcccgaccaggccgccgacttcgtcaagcagaccgactgcgacgcgcttgcgatcgccatcggcaccagccacggcgcctacaagttcacccgcaagcccaccggcgacatcctcgcgatcgaccgcatcaaggccatccacgcccgcctgccgaacacccacctggtcatgcacggctccagctcggtgccgcaggacctgctggaaatcatccgccagtacggcggcgacatgaaggaaacctacggcgtgccggtcgaggaaatcgtcgagggcatcaagtacggcgtgcgcaagatcaacatcgacaccgacatccgcctggcgatgaccggcgcgatccgcaagttcttcgtcgagaacccgtccaagttcgacccgcgcgaattcctcaagcccgcgcgcgaagctgcgaagctgatctgcaaggcccgcttcgaagccttcggcagcgccggccaggcgagcaagatcaagccggtggcgctcgacaagatcgccgcgcgctacaaggccggcgaactgacccaggtcgtgcgctga

SEQ ID NO: 149979 - protein, 354 aa, Azoarcus sp. BH72
MPLVSMRQLLDHAAENSYGLPAFNVNNLEQVQAIMEAAAETDSPVIMQASAGARKYAGEAFLRHLIDAAVEAYPHIPVVMHQDHGQSPAVCMAAIRSGFSSVMMDGSLMEDGKTPSSYEYNVAVTREVVKFSHAIGVTVEAELGCLGSLETGMAGEEDGIGAEGKLDHSALLTDPDQAADFVKQTDCDALAIAIGTSHGAYKFTRKPTGDILAIDRIKAIHARLPNTHLVMHGSSSVPQDLLEIIRQYGGDMKETYGVPVEEIVEGIKYGVRKINIDTDIRLAMTGAIRKFFVENPSKFDPREFLKPAREAAKLICKARFEAFGSAGQASKIKPVALDKIAARYKAGELTQVVR

SEQ ID NO: 149980 - DNA, 1038 bp, Mycobacterium sp. KMS
  CDS (1)..(1038): transl_table=11
atgccgatcgccacacccgaggtctacgccgagatgctcgaccgcgccaagaagcactcgttcgcgttccccgccatcaactgcacgtcgtcggagaccgtcaacgccgcgatcaagggattcgccgacgcgggcagcgacggaatcatccaattctccaccggtggagcggaattcgcgtccggcctgggggtgaaggagatggtgaccggcgccgtcgcgctggccgagttcgcgcacgtgatcgccgagaagtacccgatcaccgtcgccctgcacaccgaccactgtccgaaggacaaactcgacacctacgtccgcccactgctggccatctcggccgaccgtgtcgccgccggcggcaaccccctgttccagtcgcacatgtgggacgggtcggccgtgccgatcgacgagaacctgacgatcgcacaggagctgctcaaacaggccgccgccgccaagatcgtgctggaggtcgagatcggcgtggtcggcggcgaagaggacggtgtcgaggccgagatcaacgacaagctctacaccacctcggaggacttcgagaagaccatcgacgccctcggcgcgggggagcacggccggtacctgctggccgcgacgttcggcaacgtgcacggcgtgtacaaacccggcaacgtcaaactcaagcccgaggtgttggcggagggccagaaggtggccgccgcgaagctcggattggattcggacgcacagcctttcgacttcgtgttccacggcggctcggggtcgctgaagtcggagatcgaggactccctgcgctacggcgtggtcaagatgaacgtcgacaccgacacccagtacgcgttcacccgcccgatcgccgcgcacatgttcaccaactacgacggtgtgctcaagatcgacggcgaagtgggcaacaagaaggtttacgacccgcgcagctatctgaagaaggccgaggcggggatggccgagcgtgtcatcgaggcctgccgggatctacacagcgagggccgctcggtcaccgccgattag

SEQ ID NO: 149981 - protein, 345 aa, Mycobacterium sp. KMS
MPIATPEVYAEMLDRAKKHSFAFPAINCTSSETVNAAIKGFADAGSDGIIQFSTGGAEFASGLGVKEMVTGAVALAEFAHVIAEKYPITVALHTDHCPKDKLDTYVRPLLAISADRVAAGGNPLFQSHMWDGSAVPIDENLTIAQELLKQAAAAKIVLEVEIGVVGGEEDGVEAEINDKLYTTSEDFEKTIDALGAGEHGRYLLAATFGNVHGVYKPGNVKLKPEVLAEGQKVAAAKLGLDSDAQPFDFVFHGGSGSLKSEIEDSLRYGVVKMNVDTDTQYAFTRPIAAHMFTNYDGVLKIDGEVGNKKVYDPRSYLKKAEAGMAERVIEACRDLHSEGRSVTAD

SEQ ID NO: 149982 - DNA, 1050 bp, Magnetospirillum magnetotacticum MS-1
  CDS (1)..(1050): transl_table=11
atgcgccagctcctcgaccacgctgccgagaacggctatggcatccccgccttcaacgtgaacaacatggagcaggtcaaggcgatcatggaggcggcgtcggcctgtgacgcccccgtcatcctccaggcctcggcgggcgcgcgcaaatatgccggcgaagccttcctgcgccacctgatcctggccgccatcgagacctatccccagatcccggtctgcatgcaccaggatcacggcaccagcccggccatcaatgtgcgcgccatccagtccggcttctcgtcggtcatgatggacggatcgctcaaggaagacggcaagaccccgtccgattgggattacaacgtggccgtcaccaagcaggtggtcgatatcgcccatgcctgcggcgtctcggtcgaaggtgagctgggctgtctcggctcgctggaaaccggcaccgccggcaaggaagacggcgtcggcgccgagggcaagctggaccattcccagctgctgaccgacccggacgaggccgccgaattcgtcaaggccaccaaggtggacgccctggccatcgccattggcaccagccacggcgcctataagttcacccgtcccccgacgggcgaagtgctggccatcaagcgcatcaaggaaatccacgcccgcatccccaacacccatctggtgatgcacggctcctcctcggtgccccaggatctgctgaagatcgtcaacgattacggcggcgctttgggccagacctacggcgtgccggtcgaggaaatcgtcgaaggcatcaagcacggcgtgcgcaaggtcaatatcgacaccgatctgcgtctggccgtcaccggctgcatccgcaaatacttccacgacaaccccaagaagttcgatccgcgcgactacctgaagccctccatcgccgccatggtcgaggtctgcaagagccgctacgacgccttcggcaccgccggtcaggcctccaagatcaaggtcattggtcttgaggacatgagcgcgctctatgccaagggcgccctggcgcccaaggtgaactga

SEQ ID NO: 149983 - protein, 349 aa, Magnetospirillum magnetotacticum MS-1
MRQLLDHAAENGYGIPAFNVNNMEQVKAIMEAASACDAPVILQASAGARKYAGEAFLRHLILAAIETYPQIPVCMHQDHGTSPAINVRAIQSGFSSVMMDGSLKEDGKTPSDWDYNVAVTKQVVDIAHACGVSVEGELGCLGSLETGTAGKEDGVGAEGKLDHSQLLTDPDEAAEFVKATKVDALAIAIGTSHGAYKFTRPPTGEVLAIKRIKEIHARIPNTHLVMHGSSSVPQDLLKIVNDYGGALGQTYGVPVEEIVEGIKHGVRKVNIDTDLRLAVTGCIRKYFHDNPKKFDPRDYLKPSIAAMVEVCKSRYDAFGTAGQASKIKVIGLEDMSALYAKGALAPKVN

SEQ ID NO: 149984 - DNA, 1068 bp, Bifidobacterium longum DJO10A
  CDS (1)..(1068): transl_table=11
atgacgatcgcaacaccggaacgctatgccgaaatgctcgaggccgcccgccgaggcggttacgcctatccagccatcaacgtaaccagctcacagacactgaatgctgcgttgaagggcttcgcagacgccgagtccgacggcatcatccagatttccgtgggaggcgcggcctacgtctccggcaggggggtcaatgatcgcgttaccggctcgctggcgctggcggctttcgcacatgaagtggctgcgaaatacccgaacatcaccatcgctctgcacaccgatcactgcgccaagcagtatctggatgagtgggtgcgtcctctgctcgcgcatgaggccgatcaggtggcacgaggccaggagcctacattccagtcgcatatgtgggatggctccaccgtgccgctcaaggaaaatctggacatcgccgaggaactgctcgacaagtcgcagaaggcgcacaccgtgctcgaaatcgaaatcggcgcggtcggcggtgaggaagacggtcactccgccgaaatcaatgaaaagctgtattccactccggaagatggcctcgaagtcgcccgccgactgggtttgggcgaacgtggccggtacatggccgctttcacattcggcaatgtgcatggtgcctacaagcccggcgtggtcaagctgcgtccgtcgctactcggcgacattcaggcgcgtgtggcgcgcgcggtggccgaaggcgagttgcctagcgcggccggcatagtcgatttccccaacggcaagccgtttgagctggtgttccacggcggctccggttcacgcccggaagaaatcgccgaagctgtaagctacggcgtgatcaagatgaacatcgacaccgatacccagtacgccttcacccgtccaatcgccgaccacgtgttcgagaactacgacaaggtgctgaagatcgacggcgaagtgggcgagaagaagttctacgatccgcgttcttggggccgtaaggctgaggattccatgtccgcccgcgtggtcgaggcttgccggcagctgggttccgcgggcaaagcgctcaaatag

SEQ ID NO: 149985 - protein, 355 aa, Bifidobacterium longum DJO10A
MTIATPERYAEMLEAARRGGYAYPAINVTSSQTLNAALKGFADAESDGIIQISVGGAAYVSGRGVNDRVTGSLALAAFAHEVAAKYPNITIALHTDHCAKQYLDEWVRPLLAHEADQVARGQEPTFQSHMWDGSTVPLKENLDIAEELLDKSQKAHTVLEIEIGAVGGEEDGHSAEINEKLYSTPEDGLEVARRLGLGERGRYMAAFTFGNVHGAYKPGVVKLRPSLLGDIQARVARAVAEGELPSAAGIVDFPNGKPFELVFHGGSGSRPEEIAEAVSYGVIKMNIDTDTQYAFTRPIADHVFENYDKVLKIDGEVGEKKFYDPRSWGRKAEDSMSARVVEACRQLGSAGKALK

SEQ ID NO: 149986 - DNA, 1080 bp, Haemophilus somnus 2336
  CDS (1)..(1080): transl_table=11
atggcaaaattattagacattgtaaaaccgggggtgctgactggtgatgacgttcaaaaagtatttgcttacgcaaaggcgaataactttgcaattccggcagtaaactgtgttgggacagattctgtgaatgcagtattagaaaccgctgcacgagtaaaagcacctgttattattcaattctcaaacggtggtgcggcattttatgcaggaaaaggaattaaaccggctagcggtattcgtccggatgtattaggtgcaattgcggctgctaaacatgtccatacattagcggcagaatatggtgttccagttattcttcataccgaccatgcggcaaaaaaattacttccttggattgacggtttattggaagcaggcgagaaacacttttgtgaaacaggcaaaccattgttctcatctcacatgattgatttatccgaagagccaatggcagagaatatggcaatttgtcgtgaataccttgcccgcatggataaaatggggatgacattggaaatcgaaatcggtattaccggcggtgaagaagatggtgtagataactcagatgttgatgaatctaaactttatactcagccggaagatgtcctttttgtttacgatcaattaagtccaatcagtccacgttttactatcgcagcagcatttggtaatgttcacggggtatataaaccgggcaacgtaaaattaaaaccgtctattttgggtgcatcacaagaatttgtttctaaagaacgtaatcttccggcgaaatcattagacttcgtattccatggcggttcaggttcttcaacggaagaaattcgtgaagcgatcagctacggtgcaattaaaatgaatattgacacggatacccaatgggcaacttgggaaggagttttaaacttctataaagcaaatgaagcttatttacaaggtcaattaggtaatccagaaggacctgatgcaccgaataaaaaatactatgatcctcgagtttggttacgcaaagcagaagaatctatgtctaaacggttagaaaaatctttcgaagatttgaactgtgttgatgtactgtaa

SEQ ID NO: 149987 - protein, 359 aa, Haemophilus somnus 2336
MAKLLDIVKPGVLTGDDVQKVFAYAKANNFAIPAVNCVGTDSVNAVLETAARVKAPVIIQFSNGGAAFYAGKGIKPASGIRPDVLGAIAAAKHVHTLAAEYGVPVILHTDHAAKKLLPWIDGLLEAGEKHFCETGKPLFSSHMIDLSEEPMAENMAICREYLARMDKMGMTLEIEIGITGGEEDGVDNSDVDESKLYTQPEDVLFVYDQLSPISPRFTIAAAFGNVHGVYKPGNVKLKPSILGASQEFVSKERNLPAKSLDFVFHGGSGSSTEEIREAISYGAIKMNIDTDTQWATWEGVLNFYKANEAYLQGQLGNPEGPDAPNKKYYDPRVWLRKAEESMSKRLEKSFEDLNCVDVL

SEQ ID NO: 149988 - DNA, 1080 bp, Haemophilus influenzae R2846
  CDS (1)..(1080): transl_table=11
atggctaaattattagatatcgtgaaacccggtgttataacaggcgaagatgtgcaaaaagtttttgcttatgctaaagagcataactttgctattcctgccgtaaactgtgtgggttctgactccgttaatgccgtgttagaaactgctgcacgcgtaaaagcaccagtgattatccaattttcaaatggtggcgcagcgttctatgcaggtaaaggtatcaaaccaacgagtggtactcgtccagatgttttaggggcgattgctggagcgaaacaggttcatactttagcgaaagaatacggtgtgcctgttattcttcatactgatcacgcagcgaaaaaattattaccttggatcgacggtttattagatgcaggcgaaaaacattttgctgaaacgggtcgtccacttttctcttcacatatgattgatttatctgaagagccaatggaagaaaatatggcaatctgccgtgaatatcttgctcgtatggataaaatggggatgacccttgaaatcgaaattggcattactggtggcgaagaagacggcgtagataactctgatgttgatgaatcacgtttatatacacaaccttctgatgtgctttatgtttacgatcaattgcatccagtaagccctaactttaccgttgctgctgcattcggtaacgtacatggtgtttacaaaccaggtaatgtaaaattaaaaccatctattttaggtgcatcacaagagttcgtttctaaagaacgcaatcttcctgcaaaaccaattaatttcgtattccacggtggttcaggttctagccgcgaagaaatccgcgaagcaattggctacggtgcaatcaaaatgaacattgataccgatacccaatgggcatcttggaatggtattttgaacttctacaaagcaaatgaagcatatcttcaaggtcaattaggtaaccctgaaggcccagatgcaccaaacaaaaaatactacgacccacgtgtttggttacgtaaaatggaagaatctatgtctaaacgcttagagcaatctttcgaagacttaaattgtgttgatgttttataa

SEQ ID NO: 149989 - protein, 359 aa, Haemophilus influenzae R2846
MAKLLDIVKPGVITGEDVQKVFAYAKEHNFAIPAVNCVGSDSVNAVLETAARVKAPVIIQFSNGGAAFYAGKGIKPTSGTRPDVLGAIAGAKQVHTLAKEYGVPVILHTDHAAKKLLPWIDGLLDAGEKHFAETGRPLFSSHMIDLSEEPMEENMAICREYLARMDKMGMTLEIEIGITGGEEDGVDNSDVDESRLYTQPSDVLYVYDQLHPVSPNFTVAAAFGNVHGVYKPGNVKLKPSILGASQEFVSKERNLPAKPINFVFHGGSGSSREEIREAIGYGAIKMNIDTDTQWASWNGILNFYKANEAYLQGQLGNPEGPDAPNKKYYDPRVWLRKMEESMSKRLEQSFEDLNCVDVL

SEQ ID NO: 149990 - DNA, 1023 bp, Kineococcus radiotolerans SRS30216
  CDS (1)..(1023): transl_table=11
atgcccatcgccaccccggacgtctacgccgagatgctcgaccgcgcgaaggccgggtccttcgcctaccccgcgatcaacatctcctcgagcatcaccctcaacgccgccatccgcggcttcgccgaggccgagagcgacggcatcgtccaggtctccaccggcggggcggagttcctctccggcaccaccgtcaaggacatggtcctgggtgcgcaggccctggccgagtacgcccaccacgtcgccaagggctacggcgtcaacatcgccctgcacaccgaccactgcccgaaggacaagctggacggcttcgtccgccccctcctcgacatctccgccgagcgcgtggcgtccgggcgcgacccgctgttccagtcgcacatgtgggacggctcggccgtgccgctggaggagaacctctccatcgcccaggagctgctcgggcgggccgccgccgcgaggatcgtcctcgaggtcgagatcggcgtcgtgggcggcgaggaggacggcgtcgcgcacgagatcaacgacaagctctacacgaccgtcgaggacgcgctggcgacggtggacgccctcgggacgggggagaagggccgctacctgaccgccctgaccttcggcaacgtgcacggcgtctacaagcccggcggggtcaagctgcgcccggagatcctcaaggacatccaggagcaggtcggggcgcgggtcggcaaggacaagcccttcgacctcgtcttccacggcggctccggctcctcggaccaggagatcagcgacgcggtcgactacggcgtgatcaagatgaacgtcgacaccgacacccagtacgccttcacccgcccgatcgtggaccacgtcttccgcaactacgacggcgtcctcaaggtcgacggcgaggtcggcaacaagaagacctacgacccccgcgtgtggggcaaggccgcggagacgggcatggccgcccgcgtcgtcgaggccgcgcaggcgctgcgcagcgcgggcaagagcgtgaagtga

SEQ ID NO: 149991 - protein, 340 aa, Kineococcus radiotolerans SRS30216
MPIATPDVYAEMLDRAKAGSFAYPAINISSSITLNAAIRGFAEAESDGIVQVSTGGAEFLSGTTVKDMVLGAQALAEYAHHVAKGYGVNIALHTDHCPKDKLDGFVRPLLDISAERVASGRDPLFQSHMWDGSAVPLEENLSIAQELLGRAAAARIVLEVEIGVVGGEEDGVAHEINDKLYTTVEDALATVDALGTGEKGRYLTALTFGNVHGVYKPGGVKLRPEILKDIQEQVGARVGKDKPFDLVFHGGSGSSDQEISDAVDYGVIKMNVDTDTQYAFTRPIVDHVFRNYDGVLKVDGEVGNKKTYDPRVWGKAAETGMAARVVEAAQALRSAGKSVK

SEQ ID NO: 149992 - DNA, 1068 bp, Croceibacter atlanticus HTCC2559
  CDS (1)..(1068): transl_table=11
atgagtcacacaataaaacctggagttgctacaggcaaagaagttcaagatatttttaaccacgctaaaaaacacggctatgctttacctgccgtaaatgtggttggatcaagtactgttaatgctgtaatggaaacagcggcagagttaaactcacctgtaattattcagttttcaaatggtggcggtcaatttaatgctggaaaaggattatctaatgaaaatgaaaaagctgcaatagcaggatgtgtagcaggtgctaaacacgtacacgagcttgcagaagcttatggcgcaactgttattttacatacagatcactgtgctaaaaagttattaccttggatagatggtttgttagatgctagtgaaaagttttataacgaaactggtaaatctctatacagctctcatatgatagacttaagtgaagagcctcttgaagaaaatattgaaatctgtaaagaataccttgctcgcatgagtaagatgggtatgacattagagattgagctaggtattactggcggtgaagaagatggtgtagacaatacagatgtagacgactctaaactatacacacaaccagaagaagttgcctacgcttatgaagagttaagcaaagtaagcgaccaatttacaattgcagcagcttttggaaatgtacacggagtttataagccaggaaatgtaaagcttactccaaagattcttaaaaattctcaagaatatatttctaataaatacaatgtagaacataaccacatagattttgtatttcacggtggtagtggctctacagtcgaagaaattagagaagctataggttacggcgtaataaaaatgaatattgatacagatttacaatatgcatttaccgaaggatgtagagattatattttagacaaaaaagattacatctcggcacaaataggaaatcctgacggagatgatatcccaaataaaaaatattacgacccaagaaaatgggtacgtgaaggcgaattaacttttaaagctagactaaagaaagcttttgaagatttaaataatgtgaatactttataa

SEQ ID NO: 149993 - protein, 355 aa, Croceibacter atlanticus HTCC2559
MSHTIKPGVATGKEVQDIFNHAKKHGYALPAVNVVGSSTVNAVMETAAELNSPVIIQFSNGGGQFNAGKGLSNENEKAAIAGCVAGAKHVHELAEAYGATVILHTDHCAKKLLPWIDGLLDASEKFYNETGKSLYSSHMIDLSEEPLEENIEICKEYLARMSKMGMTLEIELGITGGEEDGVDNTDVDDSKLYTQPEEVAYAYEELSKVSDQFTIAAAFGNVHGVYKPGNVKLTPKILKNSQEYISNKYNVEHNHIDFVFHGGSGSTVEEIREAIGYGVIKMNIDTDLQYAFTEGCRDYILDKKDYISAQIGNPDGDDIPNKKYYDPRKWVREGELTFKARLKKAFEDLNNVNTL

SEQ ID NO: 149994 - DNA, 1077 bp, Photobacterium sp. SKA34
  CDS (1)..(1077): transl_table=11
atgtctaagatctttgattttgtaaaacctggtgttatttctggcgacgacgttcagaaagtattcgcagtagctaaagaaaacaacttcgctctacctgctgttaactgtatcggtactgattctgttaacgcagtactagaagcggcagctaaagttaagtctccagttatcgttcagttctctaacggcggttctgcattctttggtggtaaaggtcttaaactagaaggtcaaggttcacaaatccttggcggtatcgctggtgctaagtatgttcacgctgttgctgagtcttacggtgttcctgtaattcttcacacagaccacgctgctaagaaactgcttccttggatcgacggtctactagacgcgggtgaagagttcttcgctcaaactggtaagcctctattctcttctcacatgatcgacctttctgaagagtcgctagaagagaacatcgaaatctcagctaagtaccttgcgcgtatggctaagatgaacatgacactagaaatcgaactaggttgtactggtggtgaagaagacggcgttgataactctcacatggacgcatctgagctttacacttctccagaagacgttgcatacgcatacgagaaactaagcgctgttagcccacgtttcactatcgctgcttctttcggtaacgtacacggtgtttaccaagcaggtaacgttgtactaactccaactattctacgtgactctcaagcatacgtttcagagaagtttggtcttccaactaactctctagacttcgtattccacggtggttcaggttcttctgaagctgaaatccaagagtctatcggttacggtgttatcaaaatgaacatcgatacagatactcagtgggcttgttgggatggtatccgtcgctacgaagctgaaaaccacgattacctacaaggtcaaatcggtaacccaacaggtgagtcagcgcctaacaaaaaatattacgatccacgcgtatggctacgtgcaggtcaagtatcaatggttgagcgtctagaaaaagcatttgctgatctaaacgcagttgacgttctttaa

SEQ ID NO: 149995 - protein, 358 aa, Photobacterium sp. SKA34
MSKIFDFVKPGVISGDDVQKVFAVAKENNFALPAVNCIGTDSVNAVLEAAAKVKSPVIVQFSNGGSAFFGGKGLKLEGQGSQILGGIAGAKYVHAVAESYGVPVILHTDHAAKKLLPWIDGLLDAGEEFFAQTGKPLFSSHMIDLSEESLEENIEISAKYLARMAKMNMTLEIELGCTGGEEDGVDNSHMDASELYTSPEDVAYAYEKLSAVSPRFTIAASFGNVHGVYQAGNVVLTPTILRDSQAYVSEKFGLPTNSLDFVFHGGSGSSEAEIQESIGYGVIKMNIDTDTQWACWDGIRRYEAENHDYLQGQIGNPTGESAPNKKYYDPRVWLRAGQVSMVERLEKAFADLNAVDVL

SEQ ID NO: 149996 - DNA, 1065 bp, Oceanospirillum sp. MED92
  CDS (1)..(1065): transl_table=11
atggctctgatctccatgcgtcagctgctggatcatgctgctgaaaacgactacggcattccagcattcaacgtgaacaacctggaacagatgcgcgctattatggaagcggcagacaagactaactctccagtgattgttcaggcatctgccggtgcacgtaaatacgcgggttctaacttcctgcgtcacatgatcgaagcggcgattgctgaattcccgcatatcccggtatgtatgcaccaggaccacggtacgtctcctgcggtttgtcagcgtactatcgcgatgggcttctcctctgtcatgatggacggttcactgatgtctgatggtaaaacaccatcaagctacgaatacaacgttgatgttactcgccgtacggttgagatggcacatgcgtgtggtgtttctgtagagggtgagctgggctgcctgggttctctggaaacaggtcaggcgggcgaagaagacggtatcggtgcggaaggcacactgtctcacgaccagatgctgacggaccctgatgaagcagcagacttcgttaagaaaacgggcgtagacgcgctggcgatcgcttgtggtacttcccacggtgcttacaagtttacccgtccaccgacaggtgacattctggcgatcgaccgcatcaaagcgatcaacgaacgtatcccaggtacacatctggtaatgcacggttcctcttctgtaccgcaggagtggctggcggtgatcaacgaattcggtggcgagattccagaaacttacggtgtgccggttgagcagatcgttgaaggtatcaagtacggtgtacgtaaggtaaacatcgatactgacctgcgtctggcatctaccggtgcaatccgtcgcttcctggctgaaaacccggctgagttcgatccacgtaaatacctgaagaaatcgatggaagcgatgactgaaatctgtgtgaaccgctacgaagcgttcggcacagcaggtaatgcgtctaagatcactgcgatctctctggaaaacatggcagagaaatacgaaagcggtgagctggatccgaagatcgcataa

SEQ ID NO: 149997 - protein, 354 aa, Oceanospirillum sp. MED92
MALISMRQLLDHAAENDYGIPAFNVNNLEQMRAIMEAADKTNSPVIVQASAGARKYAGSNFLRHMIEAAIAEFPHIPVCMHQDHGTSPAVCQRTIAMGFSSVMMDGSLMSDGKTPSSYEYNVDVTRRTVEMAHACGVSVEGELGCLGSLETGQAGEEDGIGAEGTLSHDQMLTDPDEAADFVKKTGVDALAIACGTSHGAYKFTRPPTGDILAIDRIKAINERIPGTHLVMHGSSSVPQEWLAVINEFGGEIPETYGVPVEQIVEGIKYGVRKVNIDTDLRLASTGAIRRFLAENPAEFDPRKYLKKSMEAMTEICVNRYEAFGTAGNASKITAISLENMAEKYESGELDPKIA

SEQ ID NO: 149998 - DNA, 1068 bp, Flavobacteria bacterium BBFL7
  CDS (1)..(1068): transl_table=11
atgagtcataatataaaaccaggagttgctacaggtaaccaagtacaagaaatttttaaccatgccaaagctaatggttatgccttaccagccgttaatgtggtaggatctaacacagttaacgctgttatggaaacagctgcagagttaaattcaccagtgattatacagtactcaaatggaggaagtgtttttaacgctggaaaaggacttaacaatgatggccatcgcgctgctatactaggtggtattgctggtgcagagcacgtacacagacttgcagaagcttatggtgctaccgtaatcctacatacagatcactgtgccaagaaattacttccttggatcgatggactattagatgctagtgaagcacgctttcgcgaaagcggtaaatcactatactcttctcacatgattgaccttagtgaagaaccacttgaagaaaatattgaaatttgtaaaagatatctagaacgcatgtctaaaatggacatgactctagaaatagaattaggtattaccggtggtgaagaagatggtgtcgataatagtgatgttgatgaatcaaaattatacactcaaccagaagaggtagcatatgcttatgaagagcttaagaaagtaagtgaccgcttcacaattgcagcagcatttggaaatgtacacggtgtatataaacctggtaatgtaaaattaactcctaagattttaaagaactctcaagagtatattactcaaaaatatggcgttgaacacaaccacattgattttgtatttcacggtggatcaggttctacactagaagaaattagagaagcaataggttacggtgttgtaaaaatgaacatcgacaccgatttacaatgggcatttgctacaggtgtaaaaggatacatggacactaacaatgattatctattatcacaaatagggaatccaactggtgcagacgctccaaataaaaaatattatgatccacgcaaatggttacgcgtaggtgaagaaagttttaaagctcgcttaaaagcagcctttgaagacttaaacaacatcaacacattatag

SEQ ID NO: 149999 - protein, 355 aa, Flavobacteria bacterium BBFL7
MSHNIKPGVATGNQVQEIFNHAKANGYALPAVNVVGSNTVNAVMETAAELNSPVIIQYSNGGSVFNAGKGLNNDGHRAAILGGIAGAEHVHRLAEAYGATVILHTDHCAKKLLPWIDGLLDASEARFRESGKSLYSSHMIDLSEEPLEENIEICKRYLERMSKMDMTLEIELGITGGEEDGVDNSDVDESKLYTQPEEVAYAYEELKKVSDRFTIAAAFGNVHGVYKPGNVKLTPKILKNSQEYITQKYGVEHNHIDFVFHGGSGSTLEEIREAIGYGVVKMNIDTDLQWAFATGVKGYMDTNNDYLLSQIGNPTGADAPNKKYYDPRKWLRVGEESFKARLKAAFEDLNNINTL

SEQ ID NO: 150000 - DNA, 1044 bp, gamma proteobacterium HTCC2207
  CDS (1)..(1044): transl_table=11
atgttagaccacgcggccgagcagggctatggcgtgcccgcatttaatgtaaacaaccttgaacagatgcgcgcgattatgctcgccgctgatcaaactaacagcccagtgattgttcaggcctctgctggcgcacgcaaatatgctggcgcaccgttcctgcggcatttgattctcgccgccatcgaagagtggccgcacatcccagtttgtatgcaccaagatcacggcaccagcccggcgatctgtcagcgctcaattcagcaaggctttagttcggtaatgatggacggctccctagaagacgatggcaagacgccttccagctatgaatacaacgttgacgttactcgacgtaccgtcgatatggctcatgcctgcggcgtttcggtagagggcgagctgggttgcctcggttcgctggaaaccggtgaggcgggtgaggaagacggctcaggggccgagggtaagctgactctcgagcagatgctcaccgatccagaagaagccgccgactttgtttcaaaagccggcgtcgatgctctagccattgcctgtggtacctcacatggtgcgtacaaatttagccgtccgcccacaggtgatattctcgctatagaccgaatcaaggaaatcaatcgccgtatccccggaactcatctggtgatgcacggttcatcctcggtacctcaagaatggctgcaagttatcaatcagtacggcggagaaattcctgaaacctatggtgttcccgttgaacagatctgtgaaggcattaaacacggtgtgcgcaaaattaatatagataccgatctgcgccttgcctccaccggagctgtgcgtcgcttcttggcagaaaatccatcggcgtttgatccccgcgccttcctgaaagaaaccactaccgcaatgaaagatattgccgtggcacgctatgaagcctttggtactgccggcaatgcctctaagatcaaggtgttgagcttggatgctatgactgagcgttatcagagcggcgagttaaacgcccaaattaatgggtag

SEQ ID NO: 150001 - protein, 347 aa, gamma proteobacterium HTCC2207
MLDHAAEQGYGVPAFNVNNLEQMRAIMLAADQTNSPVIVQASAGARKYAGAPFLRHLILAAIEEWPHIPVCMHQDHGTSPAICQRSIQQGFSSVMMDGSLEDDGKTPSSYEYNVDVTRRTVDMAHACGVSVEGELGCLGSLETGEAGEEDGSGAEGKLTLEQMLTDPEEAADFVSKAGVDALAIACGTSHGAYKFSRPPTGDILAIDRIKEINRRIPGTHLVMHGSSSVPQEWLQVINQYGGEIPETYGVPVEQICEGIKHGVRKINIDTDLRLASTGAVRRFLAENPSAFDPRAFLKETTTAMKDIAVARYEAFGTAGNASKIKVLSLDAMTERYQSGELNAQING

SEQ ID NO: 150002 - DNA, 1077 bp, Vibrio sp. Ex25
  CDS (1)..(1077): transl_table=11
atgtctaagatcttcgacttcgtaaaaccaggtgttatctctggcgatgacgttcagaaagtatttgaagttgcaaaagaaaacagctttgcacttccagcagtaaactgtgtgggtactgactctgtaaacgcagtacttgaagcagctgcaaaagttaaagctccagttatcgttcaattctctaacggtggcgctgctttctttgctggtaaaggtctaaaacttgaaggtcaagaagctcaaatcctaggtgctgttgctggtgcgaaatacgttcacgctgtcgctgaagcttacggtgtaccagtaatcctacacactgaccacgctgctaagaaactacttccttggatcgacggtctactagacgctggtgaagagtacttcgcgcaaactggtaagccactattctcttctcacatgatcgacctttctgaagagtctctagaagagaacatcgagatttctgctaagtacctagagcgcatggctaaaatgaacatgactctagaaatcgaactaggttgtactggtggtgaagaagacggcgtagacaactctgatatggatgcgtctgagctatacacttctccagaagacgttgcatacgcatacgagaaactaagcgcaatcagccaccgtttcactatcgcagcatctttcggtaacgtacacggcgtgtacaagccaggtaacgttgttctaactccaactatcctacgtgattctcaagcgcacgtttctgagaaattcggtcttccagcgaactctctaaacttcgtattccacggtggttcaggttcttctctagaagaaatccgtgagtctatcggttacggtgttatcaaaatgaacatcgatactgatacacagtgggcaacttgggatggtatccgtaagttcgaagctgaaaaccacgattacctacaaggtcaaatcggtaacccaactggtgaagatgcaccaaacaagaagtactacgatccacgcgtatggctacgtgctggtcaagcttcaatggtagctcgtctagagcaagcatttgctgacctaaacgcagttgacgtactataa

SEQ ID NO: 150003 - protein, 358 aa, Vibrio sp. Ex25
MSKIFDFVKPGVISGDDVQKVFEVAKENSFALPAVNCVGTDSVNAVLEAAAKVKAPVIVQFSNGGAAFFAGKGLKLEGQEAQILGAVAGAKYVHAVAEAYGVPVILHTDHAAKKLLPWIDGLLDAGEEYFAQTGKPLFSSHMIDLSEESLEENIEISAKYLERMAKMNMTLEIELGCTGGEEDGVDNSDMDASELYTSPEDVAYAYEKLSAISHRFTIAASFGNVHGVYKPGNVVLTPTILRDSQAHVSEKFGLPANSLNFVFHGGSGSSLEEIRESIGYGVIKMNIDTDTQWATWDGIRKFEAENHDYLQGQIGNPTGEDAPNKKYYDPRVWLRAGQASMVARLEQAFADLNAVDVL

SEQ ID NO: 150004 - DNA, 1083 bp, Alteromonadales bacterium TW-7
  CDS (1)..(1083): transl_table=11
atgaacgatttatctcaaactattttacctggcgtaatagtgggtgacgaggtaagtgcaatatataaccatgcgcgtgctaaccagtatgcgctgccagctgtaaatgtagttagcacaacctcaattaatgcaactcttgaggctgcgaaagaaatgaagtcaccggttattattcagctttcaaatggtggtgcacagtttttttgtggtaaaggcctctcattaccagaacaacaaggtgcagtacttggtgcggtgagcgcagctaggtatgtacatagtgttgcggcgcactacgaaatccccgttatgcttcataccgatcacgcagccaaaaaattattaccatggattgatggtttgttggatgagggtgaaaggcattttagattgacaggtaagccgttgtttagctcacacatgatcgatttatctgaagagccgctagaagagaacatagagatatgtgagcgctacttagcacgcatggctaaaatagggatgacactagaaattgagcttggttgcacaggcggagaagaagacggtgttgataattctcaccttgatagctcagcgctttatacgcagccagaagatgttgcttacgcttatgaacgcttaagtgctattagtcctaattttatcattgccgcttcttttggcaacgtgcatggtgtttataaaccaggaaatgttgtccttacgcctactattttaaaagactcacaagcatatgtagcgaaaaaatttaacttaccgagtaattcaattaactttgtatttcatggtggcagtggttcagaggaagaaaaaattgcagagtcattaacgtatggcgtagttaaaatgaatattgataccgatacgcagtgggcatgttggaacggtgttttagattactacaacagcaacgaggcctatctacaaggtcaaattggtaaccctaacggtgatgataaacctaacaaaaagtactatgacccacgtgtgtggcttcgtcactctgagcagcatatggtaacaagactcatccattgctttaaagatcttaattgtgtaaatcggtatagcttatga

SEQ ID NO: 150005 - protein, 360 aa, Alteromonadales bacterium TW-7
MNDLSQTILPGVIVGDEVSAIYNHARANQYALPAVNVVSTTSINATLEAAKEMKSPVIIQLSNGGAQFFCGKGLSLPEQQGAVLGAVSAARYVHSVAAHYEIPVMLHTDHAAKKLLPWIDGLLDEGERHFRLTGKPLFSSHMIDLSEEPLEENIEICERYLARMAKIGMTLEIELGCTGGEEDGVDNSHLDSSALYTQPEDVAYAYERLSAISPNFIIAASFGNVHGVYKPGNVVLTPTILKDSQAYVAKKFNLPSNSINFVFHGGSGSEEEKIAESLTYGVVKMNIDTDTQWACWNGVLDYYNSNEAYLQGQIGNPNGDDKPNKKYYDPRVWLRHSEQHMVTRLIHCFKDLNCVNRYSL

SEQ ID NO: 150006 - DNA, 1316 bp, Cystofilobasidium capitatum
  CDS (182)..(1264)
caagaatcgtatgaacatgaaagaaacgttcccccttcttccaagaggcgacacacaccattcctctccctctatatccatcagaaggaaccttttgaaaaccctccctccgaggaaagctcctccacgacccccaacccactcctccctcttttttctaccaactacccacacaacaacaatgtccggtgccctttccgttgtccccgctggtgtcctcgatggtgagcagaccaggaagctcttcgagcacgcccgagccaacaagtacgctatccctgccgccaacgtaacctcgtcgtctgtcgtcaacgccgtcctcgaggctgcccgagacgtcaagtcgcccatcatcatccaggtctcccagggaggtgccgcttacttcgccggtaagggtgtcgacaacaaggaccagaaggcttccatcgaaggtgccatcgcttgcgctcactttgtccgagccgtcgctcccctctacggtgtccccgtcgtcctccacaccgaccactgcgcccacaagcttctcccctggatggacggcatgctcgacgccgacgaggcctactacaaggagcacggtgtccccctcttctcgtcgcacatgctcgacctgtccgaggagtccaaggaggagaacattgccatctgcgagaagtacttcacccgaatggccaagatgaaccagtggctcgagatggagatcggaatcaccggtggtgaggaggacggagtcgacaactccaacgtcgacaactcgtccctctacacccagccccccgacatttacgacgtctacaaggccctctcggccatctcgcccaacttctctatcgccgccgccttcggaaacgttcacggtgtctacaagcccggaaacgtcattctccgacctgagatccttggcaagcaccagaagtacgtcgccgagcagatcaagaacggcgacgagaagcccctcttcctcgtcttccacggaggatccggatccaccaaggacgagatcaaggaggcccgtctcaacggtgttgtcaagatgaacgtcgacactgacctacagttcgcctacctcgagggtattccgagacttcgtcacccaagaacatttgagtacctcaagagccaagtcggcaaccccgagggtgccgacaagcccaacaagaagaagtacgacccccgagtctgggttcgggagggagaggtcactctccgagagcgagtcgtcgttgcctgcaaggacctcctcaacgttgaccgaaactaagggcccacctttctcttcaatgtagccgtatgattcgaaaaaaaaaaaaaaa

SEQ ID NO: 150007 - protein, 360 aa, Cystofilobasidium capitatum
MSGALSVVPAGVLDGEQTRKLFEHARANKYAIPAANVTSSSVVNAVLEAARDVKSPIIIQVSQGGAAYFAGKGVDNKDQKASIEGAIACAHFVRAVAPLYGVPVVLHTDHCAHKLLPWMDGMLDADEAYYKEHGVPLFSSHMLDLSEESKEENIAICEKYFTRMAKMNQWLEMEIGITGGEEDGVDNSNVDNSSLYTQPPDIYDVYKALSAISPNFSIAAAFGNVHGVYKPGNVILRPEILGKHQKYVAEQIKNGDEKPLFLVFHGGSGSTKDEIKEARLNGVVKMNVDTDLQFAYLEGIPRLRHPRTFEYLKSQVGNPEGADKPNKKKYDPRVWVREGEVTLRERVVVACKDLLNVDRN

SEQ ID NO: 150008 - DNA, 1122 bp, Ostreococcus tauri
  CDS (1)..(1122)
atgcggacgcgaaagacgacgatgccgacgtcggcgcgatcgcgcgtcgcgacgcgggcgcaggcggtgtcggcgccgccgaagacgctgaagacgggcgtggtgacgggacgagatctcatcgatgtgttgaaccacgcgcggcatcacgggtacgcgattccggcggtgaactgcacgatgtcgccggtgatcaacgcgtgcctcgaggcggcgaagaaggcgaacgcgccgatgatcattcaattctccaacggcggcggcgtcttcatggcgggtaaggcggcgagcaatgaggaacaacaggcggcggtgaagggatgcgtcgcgggtgcgctcatggttcgtgaattggcggatttgtacggtgtgccggtcatcttgcacaccgatcattgcgcgaagaacttgctcccgtggttcgacggcttgctcgaggcgaacgaggcgtacttcgccaagcacggtgaaccgctcttctcctcgcacatgctcgacttgtccgaagagcctatcgctgagaacttggagatctgccaaaagtacctcaagcgcatggccgcgatcaactgcttcctcgaaatggagatcggcatcacgggcggcgaagaggatggcgtcgacaactccgacgtcgccccggaagacctctactccaagccggaagagatctacgaagtgtacgaagcgctccaaccgatcgctccggacttctactccatcgccgccgcgttcggtaacgtccacggcgtgtactccccgggtaacgtcaagctcaccccgaagatcttgaagaacgcgcaagcgtacgtcaaggacaagacgggtagcgaaagcgacaaaccggtgtacttcgtcttccacggtggctccggttcttctcgtgaagagatccgtgaagccgtcggctacggttggagcttctgggagggcgtcaaggagtacgaatccaagaaccacggctacctccaaggccaaatcggcaacccggagggcgccgaaaagccgaacaagaagtactacgatccgcgtgcctggatccgcaaggccgaagaatctacgcgtgatcgccttttggccgcctacgaggaccttttggcgaccgatgcgtgctccaagtaa

SEQ ID NO: 150009 - protein, 373 aa, Ostreococcus tauri
MRTRKTTMPTSARSRVATRAQAVSAPPKTLKTGVVTGRDLIDVLNHARHHGYAIPAVNCTMSPVINACLEAAKKANAPMIIQFSNGGGVFMAGKAASNEEQQAAVKGCVAGALMVRELADLYGVPVILHTDHCAKNLLPWFDGLLEANEAYFAKHGEPLFSSHMLDLSEEPIAENLEICQKYLKRMAAINCFLEMEIGITGGEEDGVDNSDVAPEDLYSKPEEIYEVYEALQPIAPDFYSIAAAFGNVHGVYSPGNVKLTPKILKNAQAYVKDKTGSESDKPVYFVFHGGSGSSREEIREAVGYGWSFWEGVKEYESKNHGYLQGQIGNPEGAEKPNKKYYDPRAWIRKAEESTRDRLLAAYEDLLATDACSK

SEQ ID NO: 150010 - DNA, 1023 bp, Propionibacterium freudenreichii subsp
  CDS (1)..(1023): transl_table=11
atgcctatcgcaagtcccgaggtctacgcggacatgatcgaccgtgccaagaagggcggcttcgcctacccggcgatcaacatcacctcgtcgcagaccctcaacgctgccatccagggcttcgcggaagcgcagtccgacggcatcatccaggtgtccaccggcggcgcggagtatgcgtcgggccagaaggtgaagaacatggtcaccggtgccgtggcgctcgcggagtacgcgcgcgtggtggccaagcactactcggtgaacatcgccctgcacaccgaccactgccagaaggagaagctcgacacctacgtcaacccgctcatcgcgatcagccaggagcgcgtcgaccgcggcgaggatccgctgttcaactcccacatgtgggacggctcggccatcgacctgggtgagaacctcgagatcgccaaggagctcctcacgcgcacctcgaaggcccacatcatcctcgagatcgaggtgggcgccgtgggtggcgaggaggacggcgtcaccggtgagatcaacgacaagctctacaccaccgtcgaggacggcatgcgcacgctggaggccctgggcaccggcgagcagggtcgctacatcaccgcactcaccttcggcaatgtgcacggcgcctacaagcccggccacgtgaagctgcgccccgagatcctcaaggagatccaggacgcctgtggcaagaagtacggcatcgacaagcccttcgacctggtcttccacggtggctcgggctcgagcccccaggagatcgccgatgcggtgtcctacggcgtcatcaagatgaacgtcgacaccgacacgcagtacgccttcacccgccccgtggtcgatcacatgttcacccagtacgagggtgtgctgaagatcgacggcgaggtcggcaacaagaagatgtacgacccgcgctcgtggggcaagaaggccgagaacggcatggccgaccgcgtggtggaggcctgcaaggagctcggttcgctgggcacccacaaggactga

SEQ ID NO: 150011 - protein, 340 aa, Propionibacterium freudenreichii subsp
MPIASPEVYADMIDRAKKGGFAYPAINITSSQTLNAAIQGFAEAQSDGIIQVSTGGAEYASGQKVKNMVTGAVALAEYARVVAKHYSVNIALHTDHCQKEKLDTYVNPLIAISQERVDRGEDPLFNSHMWDGSAIDLGENLEIAKELLTRTSKAHIILEIEVGAVGGEEDGVTGEINDKLYTTVEDGMRTLEALGTGEQGRYITALTFGNVHGAYKPGHVKLRPEILKEIQDACGKKYGIDKPFDLVFHGGSGSSPQEIADAVSYGVIKMNVDTDTQYAFTRPVVDHMFTQYEGVLKIDGEVGNKKMYDPRSWGKKAENGMADRVVEACKELGSLGTHKD

SEQ ID NO: 150012 - DNA, 1062 bp, uncultured bacterium
  CDS (1)..(1062): transl_table=11
atgaaatttaaacctggagtaaaatacggggaagagctcagagacctttacgcttacgcaaaggaaaatgaatttgcttatcctgcagtcaacgtaatcggtaccaattcagtaaatgctgttttggaaacagccaagaaggtgaattccccagtcatcattcagttttccaatggtggcgctcagtttttcgcaggaaaaagtcttccaaatgacaagcagcaagccagtattgccggtggcatctccggtgctcaccacgttcacctgatggctgaagcttatggagttcctgtgattctgcatacagaccatgctgcattgaaactgttgccatggattgacgggttgttggaagcaggtaaggcatattatgctatgcacaaaaagccgcttttcagctcccacatgcttgatctctccgaagaaccgcttcacgaaaacgtagaaatctcctccaagtactttgctgaattcaccaaacttgacatggctatcgagattgaactcggtgtgacaggcggggaggaagacggcgtggacaattcaaatgtggattcttccaggctgtatacccagccatctgaagtggcctatgcctatgagcatctgaagaaaatcggcgacttgtttaccattgctgcatcttttggaaacgttcacggggtgtataagcccggaaacgtaagcttgaagccaatcattttgaagaattctcaggattttgtcaatcagaaattcggaaccaaaggcaagcccctaaacttcgtattccacggaggatcagggtcttctttggaggaaatccgtgaggcaaacagctatggttcgatcaaaatgaatatcgacacggacatgcagtgggcgatgtgggaaggtatcttaaatttctacaagaaaaatgaggcttacctacagggtcaacttggaaatccggaaggtccagatagtccaaataagaaatattatgatccgcgcaattggttgagaaaaggtgaggagaactttgtaaagcgtctcgagcttgcttttgacatgctgaatgctgtgggaagaaattaa

SEQ ID NO: 150013 - protein, 353 aa, uncultured bacterium
MKFKPGVKYGEELRDLYAYAKENEFAYPAVNVIGTNSVNAVLETAKKVNSPVIIQFSNGGAQFFAGKSLPNDKQQASIAGGISGAHHVHLMAEAYGVPVILHTDHAALKLLPWIDGLLEAGKAYYAMHKKPLFSSHMLDLSEEPLHENVEISSKYFAEFTKLDMAIEIELGVTGGEEDGVDNSNVDSSRLYTQPSEVAYAYEHLKKIGDLFTIAASFGNVHGVYKPGNVSLKPIILKNSQDFVNQKFGTKGKPLNFVFHGGSGSSLEEIREANSYGSIKMNIDTDMQWAMWEGILNFYKKNEAYLQGQLGNPEGPDSPNKKYYDPRNWLRKGEENFVKRLELAFDMLNAVGRN

SEQ ID NO: 150014 - DNA, 1023 bp, Nonomuraea sp
  CDS (1)..(1023)
atgcctattgcgactccagagatctacgctgagatgctcgaccgggccaaagccggtggattcgcctatccggcgatcaacgtgacgtcctcacagactctgcacgccgcgctgcgcggcttcgccgaggctgagagcgacggcatcgtgcaggtctcgacgggtggcgcggagttcctctccggagcgacgatcaaggacatggtcacgggcgcgacggcgctggcggagtacgccagggtggtggccgccaagtatcccgtcacggtggcgctgcacaccgaccactgtccgaaggacaagctcgacggcttcatgcggccgctgatcgacatctccctggagcgggtctcgaagggcctcgacccgctcttccagtcgcacatgtgggacggctccgccgtaccgctggacgagaacctggagatcgccaaggagctcctggacaagtgcgcccgggcgcggatcatcatggagatggagatcggcgtcgtcggcggcgaggaggacggcgtcgtcggcgagatcaacgagaagctctacacgacggcggaggacgcgctggccaccgccgaggcggtgggcgtcggcgacaagggccgctacatgctggccgccacgttcggcaacgtgcacggcgtctacaagccgggccacgtcaagctgcgcccgagcgtgctgaaggagatccaggacgcggtcggtgccaagtacggcaaggacaagccgttcgacctggtcttccacggcggctccggctcgctgctggaggagatccaggaggccatctcgtacggcgtcgtcaagatgaacgtcgacaccgacacgcagtacgccttcacccgcccgatcgcggagcacatgttcaagaactacgacggcgtgctcaagatcgacggcgacgtcggcaacaagaagacctacgacccccgctcgtacggcaaggccgccgaggcggggatggcggcccgcgtgctggaggcgtgccagagcctgaagagcgccggaacgaagatctcctag

SEQ ID NO: 150015 - protein, 340 aa, Nonomuraea sp
MPIATPEIYAEMLDRAKAGGFAYPAINVTSSQTLHAALRGFAEAESDGIVQVSTGGAEFLSGATIKDMVTGATALAEYARVVAAKYPVTVALHTDHCPKDKLDGFMRPLIDISLERVSKGLDPLFQSHMWDGSAVPLDENLEIAKELLDKCARARIIMEMEIGVVGGEEDGVVGEINEKLYTTAEDALATAEAVGVGDKGRYMLAATFGNVHGVYKPGHVKLRPSVLKEIQDAVGAKYGKDKPFDLVFHGGSGSLLEEIQEAISYGVVKMNVDTDTQYAFTRPIAEHMFKNYDGVLKIDGDVGNKKTYDPRSYGKAAEAGMAARVLEACQSLKSAGTKIS

SEQ ID NO: 150016 - DNA, 1320 bp, Phaeodactylum tricornutum
  CDS (1)..(1320)
atgaagatggccgtcgttgcctttttcgtcattgctcagtgcggagcctttgctcccgcacactattctcgcactgtcactagtagtacattactcggtgccaaggaaaagggcgggacctccaaagaattggacttgccctgtgcagatgaatgcgcgatttccaagtaccccaatctccccgaatcaatccaccccggtgtactcagtggacaagcgcaaatggatctactgaatcacgcgaaagaacacggctacgcgattcccgccgtcaattgcgtttccaactcgggcatcaatgcctgtttggaggccgcgcgaaagaacgacgcgcccattattattcagttttcttccggaggctcccaattttacggaggcaaaggcctcgacaacagcaactaccgggccgccattgccggtgccgtcagtggcgctttccacgtacgtaccatggccgaacagtacggtgtgccggttattctgcacacggaccattgcgccaagaagttgttgccgtggattgacggtctactctcggccagtgaacgctactacgagcaacacggcgagcccttgttcagctcgcacatgattgacttgagtgaggaaccgatcgaggaaaatatcgaaatctgcaaagaatatttgacacgcatggacaagattggaatcttgctcgaaatggaattgggaattacgggaggagaagaagacggtgttgacaacagcgaccgaccgatcgaggacctatacagcaagccggaagaaatctaccaggtatacgaagaactcatgaaaatttccgacaagttcacggtggcggccgcattcggtaacgtacatggtgtgtattctcccggaaatgtcaaactggagcccaaaattttgagtcgcgcccaggattacatttccgaaaaacttggtgacaaggcaccggcagacaagaagcccgttgccttcgttttccacggtggatccggttcggacgttgcggatattcaggaagccattggctacggggtgatcaaaatgaatatcgacaccgacactcagtggagctactgggaaggtatcaagaactttgagaccaagtaccacgattacctgcagacgcagatcggcaaccctgacggaccggacaagcccaacaagaaatattacgacccgcgagaatccatgcgtgccgcagaagtcaacacggttgctcgactgggcaaatcgtacgccgacctaaagtgccaaaatattttgggactaggcgaagtggaaccggcagacaatgtactcggaccccgccgaggaggtcttcccgtgtaa

SEQ ID NO: 150017 - protein, 439 aa, Phaeodactylum tricornutum
MKMAVVAFFVIAQCGAFAPAHYSRTVTSSTLLGAKEKGGTSKELDLPCADECAISKYPNLPESIHPGVLSGQAQMDLLNHAKEHGYAIPAVNCVSNSGINACLEAARKNDAPIIIQFSSGGSQFYGGKGLDNSNYRAAIAGAVSGAFHVRTMAEQYGVPVILHTDHCAKKLLPWIDGLLSASERYYEQHGEPLFSSHMIDLSEEPIEENIEICKEYLTRMDKIGILLEMELGITGGEEDGVDNSDRPIEDLYSKPEEIYQVYEELMKISDKFTVAAAFGNVHGVYSPGNVKLEPKILSRAQDYISEKLGDKAPADKKPVAFVFHGGSGSDVADIQEAIGYGVIKMNIDTDTQWSYWEGIKNFETKYHDYLQTQIGNPDGPDKPNKKYYDPRESMRAAEVNTVARLGKSYADLKCQNILGLGEVEPADNVLGPRRGGLPV

SEQ ID NO: 150018 - DNA, 1209 bp, Phaeodactylum tricornutum
  CDS (1)..(1209)
atgaaactctctacggctgctcttttcttcatccccgccgttgtggcgtttgcccctccccaagcggcctttcgctccaaccgagcgctctttgcgacggaaaccgccgcggaaaagacgaccttttccaagatgcccgcgtcggtcaagccgggtgtggtgacgggcaaggcactcgtggatcttctccagcacgccaagaaggaaggctttgccattcccggagtcaacattgtcggaaccaactccatcaacgcctgcatggaagccgccaagaagtacggaggtcccattatggtcaccttctccaagggcgggggacagttcattgccggcaaggcggcggacaactccgacgacgcggcttccattgcggggtgcgtggccggagccaagcacgtccgggaagtcgccaagctatacggagtccccgtcgtcctgcacacggatcactgccaaaaggcatggttgccctggttcgatggtctcatcgaagccaacgaggaatactacaaggaacacggcgaaccgctcttctcctcccacatgttggatctctccgaagaatcactcgaggagaatattgggatctgcaaacagtacatggagcgcatggccaagattgatttgctcctagagtttgaactcggagtcaccggtggagaagaagacggtgtggacaattccgacgtcgactcgtcgcgtctatacacgcagcccgaggaagtctactacgcctacaaggaactcggatcggtccccaacgcggcctttacctgcgccgcttccttcggcaacgttcacggtgtctacgcaccgggcaacgtagaactcaagccggaaatcctacacaacacccaggcctacattcaggaaaaggaaggcagtgacgacagcaagcccatgctgtttgtattccacggtggatccggttcggacgtcaaagacattcagtacgccattgaagcgggcgtcgtcaagatgaacattgacacggacacgcagtgggccttctgggacggtgtccgcgagtacgaagccaccaaccgcgagtacctgcagggacagattggtaaccccgacggtgccgacaagcccaacaagaagtattacgatccccgtatgagtctccgggctggggaagaagccatggccgcgcgtctgtgccaagctgctgaagacctcaagtgcaacggcgtgctcaactaa

SEQ ID NO: 150019 - protein, 402 aa, Phaeodactylum tricornutum
MKLSTAALFFIPAVVAFAPPQAAFRSNRALFATETAAEKTTFSKMPASVKPGVVTGKALVDLLQHAKKEGFAIPGVNIVGTNSINACMEAAKKYGGPIMVTFSKGGGQFIAGKAADNSDDAASIAGCVAGAKHVREVAKLYGVPVVLHTDHCQKAWLPWFDGLIEANEEYYKEHGEPLFSSHMLDLSEESLEENIGICKQYMERMAKIDLLLEFELGVTGGEEDGVDNSDVDSSRLYTQPEEVYYAYKELGSVPNAAFTCAASFGNVHGVYAPGNVELKPEILHNTQAYIQEKEGSDDSKPMLFVFHGGSGSDVKDIQYAIEAGVVKMNIDTDTQWAFWDGVREYEATNREYLQGQIGNPDGADKPNKKYYDPRMSLRAGEEAMAARLCQAAEDLKCNGVLN

SEQ ID NO: 150020 - DNA, 1077 bp, Photorhabdus luminescens
  CDS (1)..(1077): transl_table=11
atgtctaaaatttttgatttcgtaaaaccgggtgtcatcactggtgatgatgttcaaaaagtgttcgctatagccaaagaaaacaactttgctttgccggcggtcaactgtgtaggtactgattcaatcaatgccgtactggaaaccgctgccaaagttcgttctcctgtgatcattcagttctctaacggcggtgctgcttttattgccggtaaaggtttgaaagttgaaggtcaacaagcggctattctgggttcaatttctggtgctcaccatgttcatcagatggctgaacattatggtgttcctgtgatcctgcatactgaccactgcgcacgtaaattgctgccgtggattgatggcttgttagatgcgggagaaaagcattacgcagcgacgggtaaaccgttattctcttctcatatgatcgacctgtcagaagagtctctggaagagaatattgagatttgcggcaagtatttggctcgcatggcaaaaatcgatatgacgctggaaatcgagttgggctgtactggtggggaagaagatggcgttgataacagccatatggatagctccgcgttgtacacgcaaccggaagatgtggcttatgcttatgagaaactgaatgctatcagcccacgtttcactattgctgcttctttcggtaatgttcatggtgtttataagccgggtaacgttaaactgacgccaaaaattttgcgtaactctcaagactatgtttctgagaaattcaatctgccgcataacagcctggattttgttttccacggtggttctggttctaccgcggaagagatcaaagaagcagtcagctatggcgttgttaaaatgaatatcgatactgacacccaatgggcgacttgggaaggtatcctgaattattacaaaaagaacgaaggttatctgcaaggccagttaggcaatccagaaggcgcggataaacctaataagaaattctacgatccacgggtatggctgcgtgccggtcaggtttctatgattgcccgtctggaacaggcattcaaagaattgaacgcgattgatgtattgtaa

SEQ ID NO: 150021 - protein, 358 aa, Photorhabdus luminescens
MSKIFDFVKPGVITGDDVQKVFAIAKENNFALPAVNCVGTDSINAVLETAAKVRSPVIIQFSNGGAAFIAGKGLKVEGQQAAILGSISGAHHVHQMAEHYGVPVILHTDHCARKLLPWIDGLLDAGEKHYAATGKPLFSSHMIDLSEESLEENIEICGKYLARMAKIDMTLEIELGCTGGEEDGVDNSHMDSSALYTQPEDVAYAYEKLNAISPRFTIAASFGNVHGVYKPGNVKLTPKILRNSQDYVSEKFNLPHNSLDFVFHGGSGSTAEEIKEAVSYGVVKMNIDTDTQWATWEGILNYYKKNEGYLQGQLGNPEGADKPNKKFYDPRVWLRAGQVSMIARLEQAFKELNAIDVL

SEQ ID NO: 150022 - DNA, 1083 bp, Paracoccidioides brasiliensis
  CDS (1)..(1083)
atgggcgtgaaagacattctctcccgcaaaactggtgtcattgttggtgatgatgtccttcgtctcttccagcatgcccaggagaaggtctttgctatccctgccattaacgtgacctcctcttccaccgttgtggccgctctcgaggctgcccgtgacaaaaactcccctatcatcctgcaagtgtcccagggtggggctgctttcttcgctgggaagggcgttcccaatggaaaacaggaggcctctgttgccggagccatcgctgcagctcactacattcgaagcattgccccttcttatggcatcccagtcgttctccacaccgaccactgtgccaagaagctgctgccttggctggatggcatgcttgatgcggatgaatgctacttcaagctccataacgagcctctcttctccagccacatgatcgatctgtctgaggagagtgtcgaatggaacatcgaaactactgccaagtacctcaagcgtgctgcccccatgaagcaatggctggagatggaaatcggcatcactggcggtgaagaagacggcgtcaacaacgaatccgtcgacaacaactccctctacacccagccagaagacatctacacaatctacaagaccctctcggccatcagcccctacttctccatcgccgccggctttggcaacgtgcacggcgtctacaagcccggcaacgtcaggctgcacccggaactcctctccaagcaccaagcccacgtcaaagagaagaccggctcctccaagaacaagcccgtctacctcgtcttccacggcggctccggctccaccaaggccgagttcaaagaagccattagctacggtgttgtcaaggttaatttggatacagacctgcagtatgcatacctttccggcgtgagagattttgtcctgaagaagaaggattatctgatgagtgctgttgggaatcctgagggtgaggataagcccaataagaagtattttgatccccgcgtatggattcgggagggtgagaagacaatgtgtgctagagttcaggaggcgtttgatgattttaatacttctaaccagttgtag

SEQ ID NO: 150023 - protein, 360 aa, Paracoccidioides brasiliensis
MGVKDILSRKTGVIVGDDVLRLFQHAQEKVFAIPAINVTSSSTVVAALEAARDKNSPIILQVSQGGAAFFAGKGVPNGKQEASVAGAIAAAHYIRSIAPSYGIPVVLHTDHCAKKLLPWLDGMLDADECYFKLHNEPLFSSHMIDLSEESVEWNIETTAKYLKRAAPMKQWLEMEIGITGGEEDGVNNESVDNNSLYTQPEDIYTIYKTLSAISPYFSIAAGFGNVHGVYKPGNVRLHPELLSKHQAHVKEKTGSSKNKPVYLVFHGGSGSTKAEFKEAISYGVVKVNLDTDLQYAYLSGVRDFVLKKKDYLMSAVGNPEGEDKPNKKYFDPRVWIREGEKTMCARVQEAFDDFNTSNQL

SEQ ID NO: 150024 - DNA, 1080 bp, Rhizobium meliloti
  CDS (1)..(1080): transl_table=11
atggcccgcatcacgcttcgccaattgctcgatcacgccgccgaacgcagctatggcgtgccggcattcaacatcaacaacatggaacaggggcttgcgatcatggaggcggcgcgagcctcagatgctcccgtgatcctccaggtctcgcgtggcgcccgctcctacgcaaacgacgtcatgctcgccaagatgatggaagctctggaagagatgtatccggacattccgctctgcatccaccaggatcacggcaacaatgtcgcgacctgcctcacggcgatccagcacggattcacctcggtcatgatggacggctcgctgaaggaggatgccaagacccctgccgattacgactataacgtctcgatcacggcagaggtaagccgcctcgcgcacatggtcggcgcctcggtcgaaggcgagctcggctgcctcggatccctcgagaccggccacggcgaggccgaggacggccacggcttcgaaggcgcgctcgaccgttcgcaactgcttaccgatccggacgaagccgcccgcttcgtcgccgagaccggcgtcgatgcactggccgtcgccatcggcacctcgcacggggcatacaagtttacccgcaagccgaccggcgaagtcctcgccatggacgtgatcgagaagatccatgagcggctgccggacacccatatcgtgatgcacggctcctcctccgtgccgcaggaatggcaggacgttttcaacgcccatggcggccagatgcgcgagacctacggcgtccccgtcgaggagatcgtacgtggcatccgcttcggcgtgcgcaaggtcaatatcgacaccgacctgcgccttgccgcggccgctgcctttcgccgcgtcgccgacacgagccgcagcgaattcgacccgcgcaaattcctgaaacccgccatggacgccatgtcggcggtctgcaaggcccgtttcgaggccttcggcaccgccggaaacgcatcccgcatcaaggtcgtgccgatgccggagatggcccgccgctacgcaagcggctccctgaaaccccagtctgcgcggtcggaagccgcctga

SEQ ID NO: 150025 - protein, 359 aa, Rhizobium meliloti
MARITLRQLLDHAAERSYGVPAFNINNMEQGLAIMEAARASDAPVILQVSRGARSYANDVMLAKMMEALEEMYPDIPLCIHQDHGNNVATCLTAIQHGFTSVMMDGSLKEDAKTPADYDYNVSITAEVSRLAHMVGASVEGELGCLGSLETGHGEAEDGHGFEGALDRSQLLTDPDEAARFVAETGVDALAVAIGTSHGAYKFTRKPTGEVLAMDVIEKIHERLPDTHIVMHGSSSVPQEWQDVFNAHGGQMRETYGVPVEEIVRGIRFGVRKVNIDTDLRLAAAAAFRRVADTSRSEFDPRKFLKPAMDAMSAVCKARFEAFGTAGNASRIKVVPMPEMARRYASGSLKPQSARSEAA

SEQ ID NO: 150026 - DNA, 1080 bp, Rhizobium meliloti
  CDS (1)..(1080): transl_table=11
atggcccgcatcacgctccgccaattgctcgatcacgccgccgaacgcagctatggcgtgccggcattcaacatcaacaacatggaacaggggctggcgatcatggaggcggcacgcgcctgcgatgcgcctgtgatccttcaggtctcgcgcggcgcccgttcctacgccaacgacatcatgcttgccaagatgatggaagcgctcgaagtgatgtatccggacatcccgctctgcatccatcaggatcacggcaacaatgtcccgaactgcctcaccgcgatccagcacggcttcaacctccgtgatgatggacggttcgctgaaggaggatgcgaagacgcctgcagactacgctataacgccatgatcacgacggaagtgagccgcctcgcgcacatggtcggcgcttcggtcgaaggcgaactcggctgcctcggatcgcttgagaccggccatggcgaggcggaggacggtcacggcttcgaaggcgcgctcgaccgttcgcaactcctgaccgatccggacgaagccgctcgcttcgtcgccgaaaccggggtcgatgcgctggcggtcgcaatcggcacctcgcacggcgcctataagttcacccgcaagccgaccggcgaagttctcgccatggacgtgatcgaaaagattcatgagcgcctgccggatacgcatatcgtcatgcacggctcctcctccgtgccgcaggaatggcaggacgtcttcaatgctcatggcggtgaaatgcgggagacatacggcgtgccggtcgaagagatcgtacggggcattcgcttcggcgtgcgaaaggtcaatatcgacacggatctgcgcctggcggcggccgccgcctttcgccgcgtcgccgacacgagccgcaccgaattcgacccgcgcaagtttttgaaacccgccatggacgcaatgtcggcggtctgcaaggcccggttcgaggccttcggcacggccggaaacgcgtcccgcatcaaggtcgtgcctatggcggagatggctcgccgctatgcaagcggctccctgaaaccccaggcgaagcgggctgaagccgcctga

SEQ ID NO: 150027 - protein, 359 aa, Rhizobium meliloti
MARITLRQLLDHAAERSYGVPAFNINNMEQGLAIMEAARACDAPVILQVSRGARSYANDIMLAKMMEALEVMYPDIPLCIHQDHGNNVPNCLTAIQHGFNLRDDGRFAEGGCEDACRLRYNAMITTEVSRLAHMVGASVEGELGCLGSLETGHGEAEDGHGFEGALDRSQLLTDPDEAARFVAETGVDALAVAIGTSHGAYKFTRKPTGEVLAMDVIEKIHERLPDTHIVMHGSSSVPQEWQDVFNAHGGEMRETYGVPVEEIVRGIRFGVRKVNIDTDLRLAAAAAFRRVADTSRTEFDPRKFLKPAMDAMSAVCKARFEAFGTAGNASRIKVVPMAEMARRYASGSLKPQAKRAEAA

SEQ ID NO: 150028 - DNA, 1089 bp, Aspergillus oryzae
  CDS (1)..(1089)
atgggtgtcggtgtccttgagaagctttcccgcaagactggtgtcatcgtcggtgatgacgtcctccgtctcttcgagcacgcgcagcagaacaactatgccatccccgccgttaacgtgacctcctcttccaccgtcgttgcttccctcgaggctgctcgcgaccagaactgccccatcgtcctccagctctctcagggtggtgctgcctacttcgctggcaagggtgtcagcaatgacggccagcaggcctccattgccggtggtatcgctgctgcccactacatccgtagccttgctcccgcctacggtatccctgttgtccttcacaccgaccactgcgccaagaagctcctcccttggctcgatggcctcctcgacgaggatgagcgctacttcaagctccacggcgagcccctcttctccagccacatgatcgatctgtctgaggagcccgtcgactacaacatccagaccaccgccgcctacctcaagcgcgctgcccccatgaagcagtggctcgagatggaaatcggtatcactggtggtgaggaggatggtgtcaacaacgaggacgttgacaacaactccctgtacacccagcccgaggatatcctcgccattcacaaggctctctcccccatcagcccttacttctccattgccgctggtttcggtaatgtccacggtgtctacaagcccggcaacgtcaagctccaccccgagcttctcaagaagcaccaggcttacgtcaaggagaagattggctccaacaaggacaagcctgtcttcttcgtcttccacggtggctctggttcctccaaggaggagtacaaggaggccatcagctatggtgtcgtcaaggtcaacgtcgacactgacatgcagttcgcctacatgtccggtatccgtgactacatcctgaagaagaaggactacctcatgaccgccgttggcaaccccgagggcgaggacaagcccaacaagaagtccttcgacccccgcgtgtgggtgcgtgagggtgagaagaccatgagccagcgtgtcaaggtcgccctggaggacttcaacactgctggtcagctgtaa

SEQ ID NO: 150029 - protein, 362 aa, Aspergillus oryzae
MGVGVLEKLSRKTGVIVGDDVLRLFEHAQQNNYAIPAVNVTSSSTVVASLEAARDQNCPIVLQLSQGGAAYFAGKGVSNDGQQASIAGGIAAAHYIRSLAPAYGIPVVLHTDHCAKKLLPWLDGLLDEDERYFKLHGEPLFSSHMIDLSEEPVDYNIQTTAAYLKRAAPMKQWLEMEIGITGGEEDGVNNEDVDNNSLYTQPEDILAIHKALSPISPYFSIAAGFGNVHGVYKPGNVKLHPELLKKHQAYVKEKIGSNKDKPVFFVFHGGSGSSKEEYKEAISYGVVKVNVDTDMQFAYMSGIRDYILKKKDYLMTAVGNPEGEDKPNKKSFDPRVWVREGEKTMSQRVKVALEDFNTAGQL

SEQ ID NO: 150030 - DNA, 1080 bp, Borrelia burgdorferi
  CDS (1)..(1080): transl_table=11
atgggtgttttagataagattaaaccaggtgtagtttatgggaaggaactacattttttatatgaaatatgtaaaaaggaaggatttgctattccttctattaattgtataggaacaaattctattaatgcagttttggaggcagcaaaagaaattaattctcctattatgatacaattttctaatagtggatctgcttttatttctggaaaaggattaaagatggaaaaaccacaaggagtttcaatagttggagctatttctggtgctatgcatgttcatttaatggcagagcattatggtgttcctgttgttcttcatactgatcactgtgctaaaaatttgcttccttgggttgaaggccttttagaatatggagagaaatactatagtcagcacaaaaaaccattattttcttcacatatgttagatttatcagaagaacctattaaagaaaatattgaaatttctaaaaaattcttagaaagaatggcaaaaattgaaatgtttttggaaatagagcttggaattacgggtggggaagaggatggagttgacaattcagatagagctttgcatgaactattttctactcctgaggatatttattatggatattcagaacttttaaaagttagcccaaattttcagattgcagcagcttttggaaatgttcatggggtatataaaccggggaatgttaagcttactccaaaagttttaaaagatggtcaagattatgtcatatcaaaaacaggagtaaatatggctaagccagtttcttatgtttttcatggagggtctggatctacaattgatgagattaatgaggcgctttcttatggcgttgtaaagatgaatattgacacagatacacagtgggctgcctgggagggtgttttaaattattacaaaaaaaatgaaagtcgtttgcaaggtcaattaggagatggcaaggatattgatattccaaataagaaattttatgatccaagggtttggttaagagaagctgaagtttctatgaaagaccgtgtgaagattgcatgcaaaaatcttaataatattaatagaaattaa

SEQ ID NO: 150031 - protein, 359 aa, Borrelia burgdorferi
MGVLDKIKPGVVYGKELHFLYEICKKEGFAIPSINCIGTNSINAVLEAAKEINSPIMIQFSNSGSAFISGKGLKMEKPQGVSIVGAISGAMHVHLMAEHYGVPVVLHTDHCAKNLLPWVEGLLEYGEKYYSQHKKPLFSSHMLDLSEEPIKENIEISKKFLERMAKIEMFLEIELGITGGEEDGVDNSDRALHELFSTPEDIYYGYSELLKVSPNFQIAAAFGNVHGVYKPGNVKLTPKVLKDGQDYVISKTGVNMAKPVSYVFHGGSGSTIDEINEALSYGVVKMNIDTDTQWAAWEGVLNYYKKNESRLQGQLGDGKDIDIPNKKFYDPRVWLREAEVSMKDRVKIACKNLNNINRN

SEQ ID NO: 150032 - DNA, 1077 bp, Buchnera aphidicola subsp
  CDS (1)..(1077)
ttgaatattttaaatgttattagacctggtgttatgaatggtgacgaagctcgaatagtgtttgagttggctaaaaaaaaacaattcgcaataccagccgtgaactgcataggtactgattctattaatgctgttttggaaactgctgctagagttaaatctccaattatcatacaattttctcatggaggagcttcttttattgctggttataaaaaaaaactatcagagaatcaagaacaagcaattcaaggcgctgtatctggagctcaacatgtacatttaatggcaaagcattatgaaattccagtaatacttcatactgatcattgtcctaaagaaacactatcatggattgacggactattagaagttggtcaaaactattatttcaataataatagacctctttttacttctcatatgattgatttatcaaaagaaagtttggaagaaaacattagtacctgtaaaaaatacttcaaaagaattaagaatattaatatgatgctggaaatagaattaggatgtacagggggtgaggaagatggtattgataatactaagatagataaaaaattactttatacacaacctcaagatgttaattatgcttatgaagaactaaatacaattagtaagaattttagtattgcggcttcattcggtaatatacatggtgtttatcaacctggaaatattgatttgcgccctattatcttaaaaaattcacaagaatttgtaagttctaaacacaatctagaaaaaaatccattgaatttagtgtttcatggtggttcaggttccaatttaaaagaaattaaagaatcgattcaatatggagtagttaaaatgaatattgatactgatatacaatgggccgcatggaaaggtgttttagatttttataaacaaaataaagaatttctacaacaccaattaggaaatacaactaataaacataaacctaataaaaaatactatgatccaagaacgtggataagaaaatcacaggaatcaatatcaattagattagaacaatcatttaaagaactaaactcttttaatattttataa

SEQ ID NO: 150033 - protein, 358 aa, Buchnera aphidicola subsp
MNILNVIRPGVMNGDEARIVFELAKKKQFAIPAVNCIGTDSINAVLETAARVKSPIIIQFSHGGASFIAGYKKKLSENQEQAIQGAVSGAQHVHLMAKHYEIPVILHTDHCPKETLSWIDGLLEVGQNYYFNNNRPLFTSHMIDLSKESLEENISTCKKYFKRIKNINMMLEIELGCTGGEEDGIDNTKIDKKLLYTQPQDVNYAYEELNTISKNFSIAASFGNIHGVYQPGNIDLRPIILKNSQEFVSSKHNLEKNPLNLVFHGGSGSNLKEIKESIQYGVVKMNIDTDIQWAAWKGVLDFYKQNKEFLQHQLGNTTNKHKPNKKYYDPRTWIRKSQESISIRLEQSFKELNSFNIL

SEQ ID NO: 150034 - DNA, 1080 bp, Buchnera aphidicola subsp
  CDS (1)..(1080): transl_table=11
atgtgtaatattctaaataaaattaaaccaggcgtaataacaggaaatgaagcattaaaattatttaaaatagcaaaaaaaaatcattttgccataccagctataaattgcattaacacagattctatcaatatagtacttgaaacagctaaaaaggctaaaagtccagtcataatacaattttcttatggtggatcaaattttatttcaggaccaggattaacaacaaatatattacacaaaaaagcaatcataggcgcactgtcaggagctaaccacgtacatattatggcaaaacattataacgttcccgtaattttacatactgaccattgcaataaaaacatgcttccatggattgatgaattaattaatgttggaacaaaacattttaaaacatataacaaacctttatttacttctcatatgatagatttgtctaatgaaaaattagattataatattaatatttgttcaaaatacctagaaaaaatgcgaaaaataaacatgttactagaaatagaacttggatgtacgggtggagaagaagatggtattaataatacaaaaataaataaatctttactatatacgcaacctaatgaagttaactatgcttatgaacgcctttcttccgtcggaccagaatttattatagctgcgtcatttggaaacgtacatggagtatataaatccggaaatgttcgtttaacaccagatattttaaaaaaatcgcaaaattacgtaagcaaaaaacataatttatcttgtaatccattatgttttgtatttcatggtgggtctggttcctcagaaaaagatataaaaaaatccattaagtacggagtcataaaaatgaatattgatactgacatacaatgggcgacttggcagggaatattaaatttttataacaaaaataataaatatttacataaccaaataggaaatttagataatgaaaataaacctaataaaaaatattatgatccaagaacatggatcagatcttcccaaatttccgtatcaaatcatttaacaaaaatatttcgcatattaaattcttgtaatacattgtaa

SEQ ID NO: 150035 - protein, 359 aa, Buchnera aphidicola subsp
MCNILNKIKPGVITGNEALKLFKIAKKNHFAIPAINCINTDSINIVLETAKKAKSPVIIQFSYGGSNFISGPGLTTNILHKKAIIGALSGANHVHIMAKHYNVPVILHTDHCNKNMLPWIDELINVGTKHFKTYNKPLFTSHMIDLSNEKLDYNINICSKYLEKMRKINMLLEIELGCTGGEEDGINNTKINKSLLYTQPNEVNYAYERLSSVGPEFIIAASFGNVHGVYKSGNVRLTPDILKKSQNYVSKKHNLSCNPLCFVFHGGSGSSEKDIKKSIKYGVIKMNIDTDIQWATWQGILNFYNKNNKYLHNQIGNLDNENKPNKKYYDPRTWIRSSQISVSNHLTKIFRILNSCNTL

SEQ ID NO: 150036 - DNA, 1065 bp, Campylobacter jejuni
  CDS (1)..(1065): transl_table=11
atgggtgttttagacattgtaaaagcaggggtgattagcggagatgagcttaataaaatttatgactatgctaaagcagagggttttgctatccctgctgttaatgttgtaggaactgattctattaatgcagttttagaagctgcaaaaaaagttaactctccagttattatccagttttcaaatggtggggcaaaattttatgcagggaaaaattgtcctaatggagaagttttgggtgcaattagtggggctaaacatgtacatttacttgctaaagcttatggtgtacctgtgattttacacactgatcatgctgcaagaaaacttttgccttggattgatgggcttattgaggcaaatgcacaatataaaaaaacccatggacaagctttatttagttctcatatgcttgatcttagcgaagaaagtttagaagaaaatcttagcacttgtgaagtttatcttcaaaaacttgatgctttaggtgtcgcgcttgaaatagaattaggttgtacaggtggcgaagaagatggagtggataatacaggtattgataattccaagctttatacccaaccagaagatgtagctcttgcatatgaaagacttggaaaaattagtgataaattttcaatcgcagcaagctttggaaatgtacatggagtttacaagccaggaaatgttagcttgcaacctgaaattttaaaaaattcgcaaaaatttgtaaaagataaatttgctttaaatagcgataagcctataaattttgtatttcatggcggtagcggtagtgagctaaaagatattaaaaatgcagtaagctatggcgtaattaagatgaatattgacacagatactcaatgggctttttgggatggggtgcgtgaatatgaacttaaaaatagggcttatttgcaaggacaaattggaaatccagaaggtgatgacaagccaaataaaaaatactatgatccgcgtgtttggttaagaagcggtgaagaaagcatgataaaacgtcttgaaatcgcttttgaagatttaaactgtataaacaaaaactaa

SEQ ID NO: 150037 - protein, 354 aa, Campylobacter jejuni
MGVLDIVKAGVISGDELNKIYDYAKAEGFAIPAVNVVGTDSINAVLEAAKKVNSPVIIQFSNGGAKFYAGKNCPNGEVLGAISGAKHVHLLAKAYGVPVILHTDHAARKLLPWIDGLIEANAQYKKTHGQALFSSHMLDLSEESLEENLSTCEVYLQKLDALGVALEIELGCTGGEEDGVDNTGIDNSKLYTQPEDVALAYERLGKISDKFSIAASFGNVHGVYKPGNVSLQPEILKNSQKFVKDKFALNSDKPINFVFHGGSGSELKDIKNAVSYGVIKMNIDTDTQWAFWDGVREYELKNRAYLQGQIGNPEGDDKPNKKYYDPRVWLRSGEESMIKRLEIAFEDLNCINKN

SEQ ID NO: 150038 - DNA, 1077 bp, Edwardsiella ictaluri
  CDS (1)..(1077): transl_table=11
atgtctaaaatctttgactttgttaaaccgggtgtcatctttggcgatgacgttcaagaagtattccaggttgcgaaagagaacaaattcgctctgccggccgttaactgcgtcggtacggactccatcaacgcggtgatggaggctgcagccaaggtacgcgcgccgatcatcgttcagttctccaacggcggtgctgccttcatcgccggtaaaggactgaagctggagggccagcagggggccatcctcggcgcgatcgccggtgcgcaccacgtgcatcagatggccgaatactacggtgttccggtgatcctgcataccgaccactgcgccaagaagctgctgccgtggctggacgggctgctggatgccggtgagaagcacttcgccgcgacgggcaagccgctgttctcctcccacatgatcgatctttccgaagagtctctggaagagaacattgaaatctgctctcagtacctggcccgcatgtccaagatcggtatgaccctggagctggagctgggttgcaccggtggtgaagaagacggtgtggacaacagtcacctggacaactccgcgctgtacacccagccggaggacgtggactacgcgttcaccaagctgagcgccatcagcccgcgtttcaccatcgctgcctccttcggcaacgtgcacggcgtgtacaagccgggtaacgtgcagctgacgccggtgatcctgaaaaactctcaggagtatgtctccaagaagcataacctgccgcataacagcctgaactttgtcttccacggtggctccggctctaccgcggcagagatcaaagaagcggtcagctacggtgtggtgaagatgaacatcgacaccgatacccagtgggcaacctgggaaggtgtgctgaagtactacaagaagaacgaaggttatctgcagggccagctgggtaatccggaaggcgacgacaagccgaacaagaagtactacgatccacgcgtatggctgcgtgccgctcagactggcatgatcgagcgtctggagcaggcgttcaaagagctgaactgtatcgacgtgctgtaa

SEQ ID NO: 150039 - protein, 358 aa, Edwardsiella ictaluri
MSKIFDFVKPGVIFGDDVQEVFQVAKENKFALPAVNCVGTDSINAVMEAAAKVRAPIIVQFSNGGAAFIAGKGLKLEGQQGAILGAIAGAHHVHQMAEYYGVPVILHTDHCAKKLLPWLDGLLDAGEKHFAATGKPLFSSHMIDLSEESLEENIEICSQYLARMSKIGMTLELELGCTGGEEDGVDNSHLDNSALYTQPEDVDYAFTKLSAISPRFTIAASFGNVHGVYKPGNVQLTPVILKNSQEYVSKKHNLPHNSLNFVFHGGSGSTAAEIKEAVSYGVVKMNIDTDTQWATWEGVLKYYKKNEGYLQGQLGNPEGDDKPNKKYYDPRVWLRAAQTGMIERLEQAFKELNCIDVL

SEQ ID NO: 150040 - DNA, 1086 bp, Kluyveromyces lactis
  CDS (1)..(1086)
atgccagctcaagacgtattgaccagaaagaccggtgtcattgtcggtgacgatgtcaaggctttgttcgactacgctaaggaacacaagtttgccattccagctatcaacgtgacctcttcttccactgttgttgctgctttggaagctgctagagacaacaaatctccaatcattttgcaaacttccaacggtggtgctgcttactttgctggtaagggtgtttccaacgaaggccaaaatgcttctatcagaggttctatcgctgctgctcactacatcagatccattgctccagcttacggtatcccagttgttctacacaccgatcattgtgctaagaagttgctaccatggttcgatggtatgctaaaggctgacgaagaatacttcgctaagcacggtgaaccattgttctcctcccacatgttggatttgtccgaagaaactgatgaggaaaacattggtctatgtgtcaaatacttcaccagaatggccaagatccaccaatggttggaaatggaaatcggtatcaccggtggtgaagaagatggtgtcaacaacgaaggtacttctaacgacaaactttacaccactccagaaactgttttctctgtccacgaagctttgtccaagatctctccaaacttctccattgccagtgccttcggtaacgtccacggtgtttacaagatcgccgctgccctaaaaccagaattgttgggtactttccaagactacgctgctaagcaattaaacaagaaggcagaagacaagccattgtacttggtcttccacggtggttccggttcctccaccaaggacttccatactgccatcgatttcggtgtcgtaaaggtcaacttggatactgactgtcaattcgcttacttgtccggtatcagagactacgtcttgaacaagaaggactacttgatgaccccagtcggtaacccaaccggtgaagactctccaaacaagaagtactacgacccaagagtctgggttagagaaggtgaaaagaccatgagcaagagaatcactcaagctttggaaatcttccgtactaagggtgctttggaataa

SEQ ID NO: 150041 - protein, 361 aa, Kluyveromyces lactis
MPAQDVLTRKTGVIVGDDVKALFDYAKEHKFAIPAINVTSSSTVVAALEAARDNKSPIILQTSNGGAAYFAGKGVSNEGQNASIRGSIAAAHYIRSIAPAYGIPVVLHTDHCAKKLLPWFDGMLKADEEYFAKHGEPLFSSHMLDLSEETDEENIGLCVKYFTRMAKIHQWLEMEIGITGGEEDGVNNEGTSNDKLYTTPETVFSVHEALSKISPNFSIASAFGNVHGVYKIAAALKPELLGTFQDYAAKQLNKKAEDKPLYLVFHGGSGSSTKDFHTAIDFGVVKVNLDTDCQFAYLSGIRDYVLNKKDYLMTPVGNPTGEDSPNKKYYDPRVWVREGEKTMSKRITQALEIFRTKGALE

SEQ ID NO: 150042 - DNA, 1038 bp, Mycobacterium leprae
  CDS (1)..(1038): transl_table=11
atgcctatcgcaacaccggagatctacgccgagatgttgagacgcgccaaggaaaactcatacgcttttccggccatcaactgtacgtcttcagagaccgtcaacgccgctatcaaaggctttgctgacgctggcagtgacggcatcatccagttttccaccggtggtgcggagttcgcctccgggctcggcgtgaaggacatggtgacgggtgcggtagcgctagcgaagttcactcacactattgcggccaagtacccgatcaacgttgcactgcacactgaccactgtcccaaggacaaactggacagttacgtgcgccctttgctggcgatctcggctagaagggtagcgaccggtaaggatccgctgttcggatcgcacatgtgggatggctctgcgataccgatcgatgagaatctggccatagcccaagatctgctgaaggacgcagcggccgccaagatcattctcgaagtcgagatcggtgtggtcggcggcgaggaagacggcgtggccggcgaaatcaacgaaaaattatatactactccgaaggatttcgtgaagacgatagatgctctgggcgccggtgaacacggcaagtatctgctggctgcgacgtttggcaacgtgcacggtgtctataagcctggcaacgttaagctgcgtcccgacatcctggccgaaggtcagaaggtggcagcggccaagctcagtcagtctgagggctcgaaaccgttcgattttgtgttccacggcggttccggttcggaaaagtcggagatcgaggaggcgctgcggtacggtgtggtgaagatgaacgttgacaccgatacccaatatgcattcactcgcccagtgtccggtcacatgttcactaactacgacggcgtgcttaaggtcgacggcgatgtgggcaataagaaggtgtacgacccgcgcagctatcttaagaaggccgaagcatcgatgaccgagcgggtgcttgaggcctgtaacgatctacgttgcgccggaaagtcggtggcggctagttga

SEQ ID NO: 150043 - protein, 345 aa, Mycobacterium leprae
MPIATPEIYAEMLRRAKENSYAFPAINCTSSETVNAAIKGFADAGSDGIIQFSTGGAEFASGLGVKDMVTGAVALAKFTHTIAAKYPINVALHTDHCPKDKLDSYVRPLLAISARRVATGKDPLFGSHMWDGSAIPIDENLAIAQDLLKDAAAAKIILEVEIGVVGGEEDGVAGEINEKLYTTPKDFVKTIDALGAGEHGKYLLAATFGNVHGVYKPGNVKLRPDILAEGQKVAAAKLSQSEGSKPFDFVFHGGSGSEKSEIEEALRYGVVKMNVDTDTQYAFTRPVSGHMFTNYDGVLKVDGDVGNKKVYDPRSYLKKAEASMTERVLEACNDLRCAGKSVAAS

SEQ ID NO: 150044 - DNA, 1089 bp, Neurospora crassa
  CDS (1)..(1089)
atgggtatcttcgatgagctcaaccttcccgctggcgtcctctacggtgatgacgtcctgaagcttttccagtacgctcgcgagaagcagtttgctatccctgcctgcaacgtcacctcctctagcactgccgtcgctgccctcgaggctgctcgcgaccagaaggctcccatcatcctccagacttcccagggtggtgctgccttcttcgccggcaagggcatcaaggactctgctgagaagcgcgaggcttccgtcgccggtgccattgccgccgctcactacatccgctccattgcccccatctacggcattcccgttgtcctccacaccgaccactgcgccaagaagcttctcccttggctcgatggcatgctcgaggaggacgagaagttcttcaaggccaacggcgtgcccctcttctcttctcacatgatcgatctctctgaggagcccgttgaggagaacatctccacctgcgtcaagtaccttaagcgcatggcgcccatgaagcagtggctcgagatggagatcggtatcaccggtggcgaggaggacggtgttgacaactccgaggttgacaacgcttctctttacactcagcccgaggacatctggcagatcgaggaggctttccgccctatttctccctacttctccattgccgctggcttcggcaacgttcacggtgtctacgctcctggcaacgtcaagctccaccccgagctccttggcaagcaccaggcttacgtctccgagaagctcggtggcaaggacaagaagcctgtcttcttcgttttccacggtggttccggctcctccaaggaggagtaccgtgaggctatctccaacggtgtcgtcaaggtcaacgtcgacactgatctccagtggagctacctcgtcggtatccgtgactacatcctcaacaacatcgactacctgaggagccaggtcggtaaccccgagggccccaacaagcccaacaagaagaagtacgacccccgtgtctggatccgcgagggtgagaagaccatgaaggcccgcgtcgaggaggccctcaaggacttcaacgctgccggcaccgtctaa

SEQ ID NO: 150045 - protein, 362 aa, Neurospora crassa
MGIFDELNLPAGVLYGDDVLKLFQYAREKQFAIPACNVTSSSTAVAALEAARDQKAPIILQTSQGGAAFFAGKGIKDSAEKREASVAGAIAAAHYIRSIAPIYGIPVVLHTDHCAKKLLPWLDGMLEEDEKFFKANGVPLFSSHMIDLSEEPVEENISTCVKYLKRMAPMKQWLEMEIGITGGEEDGVDNSEVDNASLYTQPEDIWQIEEAFRPISPYFSIAAGFGNVHGVYAPGNVKLHPELLGKHQAYVSEKLGGKDKKPVFFVFHGGSGSSKEEYREAISNGVVKVNVDTDLQWSYLVGIRDYILNNIDYLRSQVGNPEGPNKPNKKKYDPRVWIREGEKTMKARVEEALKDFNAAGTV

SEQ ID NO: 150046 - DNA, 1170 bp, Paracoccidioides brasiliensis
  CDS (58)..(1149)
cccgtttaggcgaatgggccgacgtcccatgctcccggcgcatggcgggtggactagatgggtgtcaaggatcttctttcccgcaagaccggtgtcatcgtgggtgacgacgtccttcgccttttccagcacgcgcaggagaacgtcttcgcaatccctgcaatcatggtaacatcctcgtcgactggcagcgctctggaggctgctcgcgacaagagccccatcgtcctccagacctccaacggggccgcctatttcgcgggtaagggtaagggtgtctccaacgatggtcagtccgtcgcgggttccatcgcgatcgccgccgcccactatatccgctcccaggcgcccgcttacggtatccccgtcgtcctccacaccgatcactgtgctaagaagctgctgccctggctcgacggtatgctcgacgctgacgaatgttactccaagctccacaacgagcccctgttcagcagccacatgatcgatctgtctgaggagtccgtcgagtggaacatcgagacgaccgccaagtacctcaagcgcgctgctcccatgaagcagtggctggagatggagatcggtatcaccggtggtgaggaggacggtgtcaataacgagtctgtcgacaacaattctctctacactcagccggaggatatctacaccatctacaagaccctctccgcgatctctccctacttctccatcgcggccggtttcggtaatgtccatggtgtctacaggggtgacatcgctctccgccccctgctgcgccacctccacaacgcgaagtacgacgagcagctcaagtgcctccaggaccccctcggtttcttcgtcttccatggtggtagcggtagcagccaccagcccgctacctccatcacctccgagttcgccgccaagggtcgtgtcgacctggagaaggtcgcctaccttcctggcacctcctcccttgtcattgcacctaaggactacctcatgtccccttacggcattcctgtcgtcctccacaccgaccactgtaagtacttcgatccccgtgtccagatccgtgagggtcttaagcacatgtccgctcgcgtccaggaggccaaggacgacttcaatgatagcaatcaggctaagaagctcctcccttggtaaggtctcaattcaatcaaaaaa

SEQ ID NO: 150047 - protein, 363 aa, Paracoccidioides brasiliensis
MGVKDLLSRKTGVIVGDDVLRLFQHAQENVFAIPAIMVTSSSTGSALEAARDKSPIVLQTSNGAAYFAGKGKGVSNDGQSVAGSIAIAAAHYIRSQAPAYGIPVVLHTDHCAKKLLPWLDGMLDADECYSKLHNEPLFSSHMIDLSEESVEWNIETTAKYLKRAAPMKQWLEMEIGITGGEEDGVNNESVDNNSLYTQPEDIYTIYKTLSAISPYFSIAAGFGNVHGVYRGDIALRPLLRHLHNAKYDEQLKCLQDPLGFFVFHGGSGSSHQPATSITSEFAAKGRVDLEKVAYLPGTSSLVIAPKDYLMSPYGIPVVLHTDHCKYFDPRVQIREGLKHMSARVQEAKDDFNDSNQAKKLLPW

SEQ ID NO: 150048 - DNA, 1077 bp, Schizosaccharomyces pombe
  CDS (1)..(1077)
atgggaattctcgatattgtacctactggtgttattacaggtgacaacgttttaaagttgttcacctacgctcgtgagcacggattcgccatccctgccattaacgtcacctcctcctccactgctattgctgctcttgaggctgctcgtgaggctcgttcccccatcatcttgcaaacctccaacggtggtgctcacttctttgctggtaaggaatcctccaacgagggccaaaaggcctccattgccggttccatcgccgctgcccactacatccgttccatcgctcctttcttcggtgtccccgtcgtcatgcactctgaccactgcgccaagaagcttctcccctggatggacggtatgttcgaagccgatgaggcctacttcaagattcacggtgagcctcttttctcttctcacatgcttgacttgtccgaggagcccaagaaggagaacattgctcaagttaaggagtactgcaagcgtgccgttcccatgaagatctggatcgagatggagatcggtatcactggtggtgaggaagacggtgtcgacaactctcacgtctcccacaccgagctctacactcaacccgaggacatctgggatgtctaccgtgagctctcctccgttaccccttacttctccattgccgccgctttcggtaacgtccacggtgtctacaagcccggtaacgtcaagctccaacccgctcttttgggtcaacaccaagcctatgttaaggagcaactcaagaccaccaacgacaagcccgttttcttcgtcttccacggtggttccggttcctctgtcaacgagttccgtactggtatcaagtgcggtgtcgtcaaggtcaacattgacactgatacccaattcgcctacgtcgagggtgtccgtgactatgtcttgaagtacaaggactaccttatgacccccgtcggtaaccccgagggagctgacaagcccaacaagaagaagttcgaccctcgtgtctggatccatgagggtgagaagaccatgaccaagcgtgttcttaccgctcttgaggacttctacactgtcaacactctctaa

SEQ ID NO: 150049 - protein, 358 aa, Schizosaccharomyces pombe
MGILDIVPTGVITGDNVLKLFTYAREHGFAIPAINVTSSSTAIAALEAAREARSPIILQTSNGGAHFFAGKESSNEGQKASIAGSIAAAHYIRSIAPFFGVPVVMHSDHCAKKLLPWMDGMFEADEAYFKIHGEPLFSSHMLDLSEEPKKENIAQVKEYCKRAVPMKIWIEMEIGITGGEEDGVDNSHVSHTELYTQPEDIWDVYRELSSVTPYFSIAAAFGNVHGVYKPGNVKLQPALLGQHQAYVKEQLKTTNDKPVFFVFHGGSGSSVNEFRTGIKCGVVKVNIDTDTQFAYVEGVRDYVLKYKDYLMTPVGNPEGADKPNKKKFDPRVWIHEGEKTMTKRVLTALEDFYTVNTL

SEQ ID NO: 150050 - DNA, 1032 bp, Streptomyces coelicolor
  CDS (1)..(1032): transl_table=11
atgcccatcgcaactcccgaggtctacaacgagatgctggaccgggcgaaggcaggaaagttcgcctaccccgccatcaacgtgacctcttcccagacgctgcacgccgccctgcgcggcttcgcggaggcggagagcgacggcatcgtccagatctccaccggcggcgccgagttcctgggcggccagcacaacaaggacatggtgaccggcgccgtcgccctcgccgagttcgcgcacatcgtcgccgagaagtacgacgtcaccgtcgccctgcacacggaccactgccccaaggacaagctcgacgggtacgtacgcccgctgatcgccgtctccgaggagcgcgtcaaggccggccgcaacccgctgttccagtcgcacatgtgggacggctcggccgagaccctggccgacaacctctccatcgcccaggagctgctggcgcgcgcccgcgccgccaggatcatcctcgaggtcgagatcaccccgaccggcggcgaggaggacggcgtctcccacgagatcaacgactccctgtacaccacggtcgacgacgcggtccgcaccgtcgaggccctgggcctgggcgagaagggccgctacctgctcgccgcgtccttcggcaacgtgcacggcgtctacaagccgggcaacgtcgtgctccgccccgagctgctcaaggagctgaacgagggcatcgcgtcgaagtacggccagccggccggcagcaagccgttcgacttcgtcttccacggcggctccggctccaccgccgaggagatcgcgaccgccctggagaacggcgtggtcaagatgaacatcgacacggacacccagtacgccttcacgcgtccggtcgtcgaccacatgttccgcaactacgacggcgtcctcaaggtcgacggcgaggtcggcaacaagaagacgtacgacccgcgcacctggggcaagctggccgaggccggcatggccgcgcgcgtcgtggaggcctgcggccacctgcgctcggcgggccagaagatcaagtaa

SEQ ID NO: 150051 - protein, 343 aa, Streptomyces coelicolor
MPIATPEVYNEMLDRAKAGKFAYPAINVTSSQTLHAALRGFAEAESDGIVQISTGGAEFLGGQHNKDMVTGAVALAEFAHIVAEKYDVTVALHTDHCPKDKLDGYVRPLIAVSEERVKAGRNPLFQSHMWDGSAETLADNLSIAQELLARARAARIILEVEITPTGGEEDGVSHEINDSLYTTVDDAVRTVEALGLGEKGRYLLAASFGNVHGVYKPGNVVLRPELLKELNEGIASKYGQPAGSKPFDFVFHGGSGSTAEEIATALENGVVKMNIDTDTQYAFTRPVVDHMFRNYDGVLKVDGEVGNKKTYDPRTWGKLAEAGMAARVVEACGHLRSAGQKIK

SEQ ID NO: 150052 - DNA, 1023 bp, Streptomyces galbus
  CDS (1)..(1023): transl_table=11
atgcccatcgcaacccctgaggtctacaacgagatgctcgaccgggcgaaggcaggcaagttcgcctacccggccatcaacgtcacctcgagccagaccctgaacgcggcgctgcgcggcttcgcggaggcggagagcgacggcatcgtccagatctcgaccggcggtgccgagttcctcggcggccagtacagcaaggacatggtgaccggcgcggtcgcgctcgccgagttcgcgcacatcatcgccgagaagtacccggtcaacatcgcgctgcacacggaccactgcccgaaggacaagctcgacgggtacgtacgtccgctgctcgcgctctccaagaagcgcgtcgaggccggtctcggcccgctgttccagtcgcacatgtgggacggctcggccgagccgctcgccgacaacctggcgatcgcgcaggagctgctggagacggcccgcgccgcgcagatcatcctcgaggtggagatcaccccgaccggtggcgaggaggacggcgtctcccacgagatcaacgactccctctacaccacggtcgacgacgcgatccgcaccgccgaggccctcggcctgggcgagaagggccgctacctgctcgccgcctccttcggcaacgtgcacggcgtgtacaagccgggcaacgtcgtactgcgtcccgagctgctgaaggagctgaacgagggcgtcgccgcccggttcggcaaggagtccccgttcgacttcgtcttccacggcggctccggctcctccgaggaggagatccggaccgcgctggagaacggcgtcgtgaagatgaacctcgacaccgacacccagtacgccttcacccgtccggtcgccggtcacatgttcgcgaactacgacggcgtcctgaaggtcgacggcgaggtcggcaacaagaaggcctacgacccgcgcacctggggcaagctggccgaggcgagcatggccgcgcgtgtcgtcgaggccacgcagcacctgcgctcggcgggcaacaagatcaagtaa

SEQ ID NO: 150053 - protein, 340 aa, Streptomyces galbus
MPIATPEVYNEMLDRAKAGKFAYPAINVTSSQTLNAALRGFAEAESDGIVQISTGGAEFLGGQYSKDMVTGAVALAEFAHIIAEKYPVNIALHTDHCPKDKLDGYVRPLLALSKKRVEAGLGPLFQSHMWDGSAEPLADNLAIAQELLETARAAQIILEVEITPTGGEEDGVSHEINDSLYTTVDDAIRTAEALGLGEKGRYLLAASFGNVHGVYKPGNVVLRPELLKELNEGVAARFGKESPFDFVFHGGSGSSEEEIRTALENGVVKMNLDTDTQYAFTRPVAGHMFANYDGVLKVDGEVGNKKAYDPRTWGKLAEASMAARVVEATQHLRSAGNKIK

SEQ ID NO: 150054 - DNA, 882 bp, Streptococcus pneumoniae
  CDS (1)..(882): transl_table=11
atggcaatcgtttcagcagaaaaatttgtccaagcagcccgtgacaacggttatgcagttggtggatttaacacaaacaaccttgagtggactcaagctatcttgcgcgcagcagaagctaaaaaagctccagttttgatccaaacttcaatgggtgctgctaaatacatgggtggttacaaagttgctcgcaacttgatcgctaaccttgttgaatcaatgggtatcactgtaccagtagctatccaccttgaccacggtcactacgaagatgcacttgagtgtatcgaagttggttatacttcaatcatgtttgacggttcacaccttccagttgaagaaaaccttaaattggctaaagaagttgttgaaaaagcacacgctaaaggtatctcagtagaagctgaagttggtactatcggtggtgaagaagatggaatcatcggtaaaggtgaattggctccaatcgaagacgctaaagcaatggttgaaactggtatcgacttcttggcagctggtatcggtaacatccacggtccttacccagtaaactgggaaggtcttgaccttgaccacttgcaaaaattgacagaagctcttccaggattcccaatcgtattgcacggtggatcaggtattcctgatgagcaaatccaagcagctatcaaacttggtgttgccaaagttaacgttaacacagaatgccaaatcgcattcgctaacgcaactcgtaaatttgctcgtgactacgaagcaaacgaagcagaatacgacaagaaaaaactcttcgacccacgtaaattcttggctgacggtgtaaaagctatccaagcatcggttgaagaacgtatcgacgtattcggttcagaaggtaaagcataa

SEQ ID NO: 150055 - protein, 293 aa, Streptococcus pneumoniae
MAIVSAEKFVQAARDNGYAVGGFNTNNLEWTQAILRAAEAKKAPVLIQTSMGAAKYMGGYKVARNLIANLVESMGITVPVAIHLDHGHYEDALECIEVGYTSIMFDGSHLPVEENLKLAKEVVEKAHAKGISVEAEVGTIGGEEDGIIGKGELAPIEDAKAMVETGIDFLAAGIGNIHGPYPVNWEGLDLDHLQKLTEALPGFPIVLHGGSGIPDEQIQAAIKLGVAKVNVNTECQIAFANATRKFARDYEANEAEYDKKKLFDPRKFLADGVKAIQASVEERIDVFGSEGKA

SEQ ID NO: 150056 - DNA, 26 bp, Artificial sequence
  primer
atgggtgttgaacaaatcttaaagag

SEQ ID NO: 150057 - DNA, 26 bp, Artificial sequence
  primer
ttataaagtgttagtggtacggaaag

SEQ ID NO: 150058 - protein, 354 aa, Artificial sequence
  consensus sequence
  Variant (2)..(6): Xaa in position 2 to 6 is any amino acid
  Variant (8)..(8): Xaa in position 8 is any amino acid
  Variant (11)..(11): Xaa in position 11 is any amino acid
  Variant (13)..(19): Xaa in position 13 to 19 is any amino acid
  Variant (20)..(20): Xaa in position 20 is any or no amino acid
  Variant (22)..(32): Xaa in position 22 to 32 is any amino acid
  Variant (33)..(33): Xaa in position 33 is any or no amino acid
  Variant (35)..(35): Xaa in position 35 is any amino acid
  Variant (37)..(37): Xaa in position 37 is any amino acid
  Variant (39)..(39): Xaa in position 39 is any amino acid
  Variant (41)..(45): Xaa in position 41 to 45 is any amino acid
  Variant (46)..(46): Xaa in position 46 is any or no amino acid
  Variant (48)..(51): Xaa in position 48 to 51 is any amino acid
  Variant (52)..(67): Xaa in position 52 to 67 is any or no amino acid
  Variant (69)..(77): Xaa in position 69 to 77 is any amino acid
  Variant (79)..(81): Xaa in position 79 to 81 is any amino acid
  Variant (82)..(82): Xaa in position 82 is any or no amino acid
  Variant (84)..(85): Xaa in position 84 to 85 is any amino acid
  Variant (87)..(87): Xaa in position 87 is any amino acid
  Variant (90)..(110): Xaa in position 90 to 110 is any amino acid
  Variant (111)..(125): Xaa in position 111 to 125 is any or no amino acid
  Variant (127)..(132): Xaa in position 127 to 132 is any amino acid
  Variant (134)..(151): Xaa in position 134 to 151 is any amino acid
  Variant (153)..(153): Xaa in position 153 is any amino acid
  Variant (155)..(155): Xaa in position 155 is any amino acid
  Variant (157)..(158): Xaa in position 157 to 158 is any amino acid
  Variant (160)..(166): Xaa in position 160 to 166 is any amino acid
  Variant (172)..(195): Xaa in position 172 to 195 is any amino acid
  Variant (196)..(206): Xaa in position 196 to 206 is any or no amino acid
  Variant (208)..(210): Xaa in position 208 to 210 is any amino acid
  Variant (213)..(213): Xaa in position 213 is any amino acid
  Variant (216)..(216): Xaa in position 216 is any amino acid
  Variant (218)..(241): Xaa in position 218 to 241 is any amino acid
  Variant (242)..(262): Xaa in position 242 to 262 is any or no amino acid
  Variant (264)..(264): Xaa in position 264 is any amino acid
  Variant (269)..(289): Xaa in position 269 to 289 is any amino acid
  Variant (291)..(295): Xaa in position 291 to 295 is any amino acid
  Variant (297)..(302): Xaa in position 297 to 302 is any amino acid
  Variant (305)..(305): Xaa in position 305 is any amino acid
  Variant (307)..(307): Xaa in position 307 is any amino acid
  Variant (309)..(309): Xaa in position 309 is any amino acid
  Variant (313)..(313): Xaa in position 313 is any amino acid
  Variant (315)..(315): Xaa in position 315 is any amino acid
  Variant (317)..(327): Xaa in position 317 to 327 is any amino acid
  Variant (328)..(346): Xaa in position 328 to 346 is any or no amino acid
  Variant (350)..(351): Xaa in position 350 to 351 is any amino acid
AXXXXXAXPAXNXXXXXXXXAXXXXXXXXXXXXIXQXSXGXXXXXXGXXXXXXXXXXXXXXXXXXXXAXXXXXXXXXYXXXXVXXHXDHXXXXXXXXXXXXXXXXXXXXXXXXXXXXXXXXXXXXSXXXXXXNXXXXXXXXXXXXXXXXXXEXEXGXXGXXXXXXXGEEDGXXXXXXXXXXXXXXXXXXXXXXXXXXXXXXXXXXXAXXXGNXHGXYXXXXXXXXXXXXXXXXXXXXXXXXXXXXXXXXXXXXXXXXXXXXXVXHGGSXXXXXXXXXXXXXXXXXXXXXGXXXXXIXXXXXXGVXKXNXDTDXQXAXXXXXXXXXXXXXXXXXXXXXXXXXXXXXXNKKXXDPR

SEQ ID NO: 150059 - protein, 23 aa, Artificial sequence
  protein pattern
  Variant (2)..(2): Xaa in position 2 is Ser or Val
  Variant (3)..(5): Xaa in position 3 to 5 is any amino acid
  Variant (6)..(6): Xaa in position 6 is Asp, Glu or Lys
  Variant (7)..(9): Xaa in position 7 to 9 is any amino acid
  Variant (10)..(10): Xaa in position 10 is Ala, Gly or Ser
  Variant (11)..(13): Xaa in position 11 to 13 is any amino acid
  Variant (16)..(16): Xaa in position 16 is any amino acid
  Variant (18)..(18): Xaa in position 18 is Ile, Met or Val
  Variant (20)..(20): Xaa in position 20 is Ile, Leu or Val
GXXXXXXXXXXXXGVXKXNXDTD

SEQ ID NO: 150060 - protein, 13 aa, Artificial sequence
  protein pattern
  Variant (2)..(2): Xaa in position 2 is any amino acid
  Variant (4)..(4): Xaa in position 4 is Ile, Leu or Val
  Variant (5)..(5): Xaa in position 5 is Gly or Thr
  Variant (6)..(7): Xaa in position 6 to 7 is any amino acid
EXEXXXXGGEEDG

SEQ ID NO: 150061 - protein, 14 aa, Artificial sequence
  protein pattern
  Variant (2)..(5): Xaa in position 2 to 5 is any amino acid
  Variant (6)..(6): Xaa in position 6 is Phe or Tyr
  Variant (7)..(7): Xaa in position 7 is Ala or Gly
  Variant (8)..(8): Xaa in position 8 is any amino acid
  Variant (11)..(11): Xaa in position 11 is Phe, Ile or Val
  Variant (13)..(13): Xaa in position 13 is any amino acid
  Variant (14)..(14): Xaa in position 14 is Asn, Ser, Thr or Val
AXXXXXXXPAXNXX

SEQ ID NO: 150062 - protein, 26 aa, Artificial sequence
  protein pattern
  Variant (2)..(2): Xaa in position 2 is any amino acid
  Variant (3)..(3): Xaa in position 3 is Ile, Leu or Met
  Variant (4)..(4): Xaa in position 4 is any amino acid
  Variant (5)..(5): Xaa in position 5 is Ala, Gly, Ser, Thr or Val
  Variant (6)..(10): Xaa in position 6 to 10 is any amino acid
  Variant (11)..(11): Xaa in position 11 is Ala, Cys, Ser or Thr
  Variant (12)..(12): Xaa in position 12 is Asp or Pro
  Variant (13)..(13): Xaa in position 13 is any amino acid
  Variant (15)..(15): Xaa in position 15 is Ile, Leu, Met or Val
  Variant (17)..(17): Xaa in position 17 is any amino acid
  Variant (19)..(19): Xaa in position 19 is any amino acid
  Variant (21)..(21): Xaa in position 21 is any amino acid
  Variant (22)..(25): Xaa in position 22 to 25 is any or no amino acid
AXXXXXXXXXXXXIXQXSXGXXXXXA

SEQ ID NO: 150063 - DNA, 378 bp, Saccharomyces cerevisiae
  CDS (1)..(378)
atgtttagatccgtttgccgcatttcttcccgcgtggcaccttctgcgtaccgcactataatgggccgttccgttatgtccaacaccatactcgcacaaagattttattctgcaaacttgagcaaagatcaggtttctcaaagggtcattgatgttatcaaggcgtttgataagaactctcccaacattgccaacaagcaaatctccagcgatacccaatttcacaaggatttggggttggactccttggacactgtcgagctgctcgtagctattgaagaagaatttgatattgaaatccctgacaaagtggctgatgagttgagaagtgttggtgaaacggtcgattatatcgcttccaatcccgacgcaaactaa

SEQ ID NO: 150064 - protein, 125 aa, Saccharomyces cerevisiae
MFRSVCRISSRVAPSAYRTIMGRSVMSNTILAQRFYSANLSKDQVSQRVIDVIKAFDKNSPNIANKQISSDTQFHKDLGLDSLDTVELLVAIEEEFDIEIPDKVADELRSVGETVDYIASNPDAN

SEQ ID NO: 150065 - DNA, 462 bp, Bombyx mori
  CDS (1)..(462)
atggctgctgcgaatattttccgaagtgctttcggtggtctattacggagatcaacaacgtatagaacgtccgtaacatgtcgtctttcgaccgttgcgttgcagcaaaagttcagcacaattaaagccgctgtcaaaatatacaaaagtcaggcccttcagaatgggaacgagaaacatggtatccgcaagtacagcggtggccctcccctcaccttagaccttataaaaagtagagtactgcttgtacttcaactttatgacaaaattaaccctgaacagttgactgtagatagccacttcatgaatgatctgggtcttgactcactggaccatgttgaggtcataatggcaatggaagatgaatttggatttgagataccggatggtgatgcagagagactggtcagaccaaaagacattgtccaatacattgctgacaaggaagatatttatgaataa

SEQ ID NO: 150066 - protein, 153 aa, Bombyx mori
MAAANIFRSAFGGLLRRSTTYRTSVTCRLSTVALQQKFSTIKAAVKIYKSQALQNGNEKHGIRKYSGGPPLTLDLIKSRVLLVLQLYDKINPEQLTVDSHFMNDLGLDSLDHVEVIMAMEDEFGFEIPDGDAERLVRPKDIVQYIADKEDIYE

SEQ ID NO: 150067 - DNA, 438 bp, Oryza sativa (japonica cultivar-group)
  CDS (1)..(438)
atggcggcggcgaggagggccctcctgagccacctgcgcgtgccggtgctggctcgtcccgccgcggcggcgggaagcgtccccgccgcgcggctcctgtcgtcggcgacggaggaggggtccaagggctcgttcctcgacaagggcgaggtcgccgaccgcatcgtctccgtcgtcaagaacttccagaaggtcgagccctccaagtcatcagtggcggatccaccatggggtctctggggtctcgagaccctactacccgtgacaccaaatgctcatttccagaaggacctcggacttgatagcttggatacagttgagattgtcatggcctttgaggaagaatttggcttcgagatcccagataacgaggcagagaagattgactccatcaaaacggcagttgacttcgttgcctctcatcctcaagcaaaataa

SEQ ID NO: 150068 - protein, 145 aa, Oryza sativa (japonica cultivar-group)
MAAARRALLSHLRVPVLARPAAAAGSVPAARLLSSATEEGSKGSFLDKGEVADRIVSVVKNFQKVEPSKSSVADPPWGLWGLETLLPVTPNAHFQKDLGLDSLDTVEIVMAFEEEFGFEIPDNEAEKIDSIKTAVDFVASHPQAK

SEQ ID NO: 150069 - DNA, 396 bp, Arabidopsis thaliana
  CDS (1)..(396)
atgcattgcattaggagctcaatcctgcaacacttgagactgagagtctctgtcagacccacttcgcttcttcagaacgagaatggtttcaagagtattggtatttttaatttcacatcagaagcagctgcagatggaggccaagatcaaatattgagcagggttattgaactggtgaagaaatacgacaaaaccaacacctctgaggttactgaaagggctgattttcagaaagatttgtcgttggacagcttggacaagacggagctagttatggctattgaagaagagttctcgattgagatccctgatgagaaagctgataagcttacttgttgtggtgatgttgcaacatacatactctctgaaactcctaccaaagcgtctgagtcctga

SEQ ID NO: 150070 - protein, 131 aa, Arabidopsis thaliana
MHCIRSSILQHLRLRVSVRPTSLLQNENGFKSIGIFNFTSEAAADGGQDQILSRVIELVKKYDKTNTSEVTERADFQKDLSLDSLDKTELVMAIEEEFSIEIPDEKADKLTCCGDVATYILSETPTKASES

SEQ ID NO: 150071 - DNA, 381 bp, Arabidopsis thaliana
  CDS (1)..(381)
atggcggcgagaggtgctatgcttcgatacctgagagtcaacgtcaatccaacaattcaaaaccctagagaatgtgtacttcctttctccattctccttcgtcgtttctccgaggaagttagaggctctttccttgacaaatctgaggtcacagatcgagttctctctgtcgtcaaaaacttccaaaaagttgatccttctaaggtaacaccaaaagccaatttccaaaatgatctagggttggacagtttggacagtgtggaagttgtgatggcattggaggaggaatttgggtttgagatccctgataatgaagcagacaagatccagtccatcgatctagccgttgactttattgcttctcatcctcaggctaagtga

SEQ ID NO: 150072 - protein, 126 aa, Arabidopsis thaliana
MAARGAMLRYLRVNVNPTIQNPRECVLPFSILLRRFSEEVRGSFLDKSEVTDRVLSVVKNFQKVDPSKVTPKANFQNDLGLDSLDSVEVVMALEEEFGFEIPDNEADKIQSIDLAVDFIASHPQAK

SEQ ID NO: 150073 - DNA, 414 bp, Arabidopsis thaliana
  CDS (1)..(414)
atggcttccttatcaaccacttccctaagcttcaaagctccgtccaccacaatttcacaggttttaaggaaagcctcaagttctcagtctgtgacctttggtcgtttcacgtcttcaacaaagagccttcgtcttcaaatcagttgtgccgcgaaagcagagacggtgcagaaagtgagtgacattgtaaaagaacaattggctttagctgctgatgttccgctcactgctgaatccaagttctctgctcttggtgccgattctctcgacaccgtggagatagtgatggcgttggaggaaaagtttaacataagtgtggaggaatctgatgctcaaaacattacgaccatccaagaggcggctgatttgatagaggaccttgttcaaaagaaacccgcggcggaaacttcctga

SEQ ID NO: 150074 - protein, 137 aa, Arabidopsis thaliana
MASLSTTSLSFKAPSTTISQVLRKASSSQSVTFGRFTSSTKSLRLQISCAAKAETVQKVSDIVKEQLALAADVPLTAESKFSALGADSLDTVEIVMALEEKFNISVEESDAQNITTIQEAADLIEDLVQKKPAAETS

SEQ ID NO: 150075 - DNA, 333 bp, Vibrio cholerae O1 biovar eltor str. N16961
  CDS (1)..(333): transl_table=11
gtggttagaccagaaacctcacgcttgcaactttccctagttcgaataaactacggaatcatcgcattaggcgaaatctgtaaaggaaaagaaaaaatgagcaacatcgaagaacgcgtaaagaaaatcattgttgaacagctaggtgtagacgaagcagaagtaaagaatgaatcttctttcgttgaagacctgggtgctgattctctggacactgttgagctggtaatggctctggaagaggaattcgatactgagattcctgatgaagaagcagagaagatcactactgttcaagctgcgatcgattacgtaaccagcaacgctcagtaa

SEQ ID NO: 150076 - protein, 110 aa, Vibrio cholerae O1 biovar eltor str. N16961
MVRPETSRLQLSLVRINYGIIALGEICKGKEKMSNIEERVKKIIVEQLGVDEAEVKNESSFVEDLGADSLDTVELVMALEEEFDTEIPDEEAEKITTVQAAIDYVTSNAQ

SEQ ID NO: 150077 - DNA, 333 bp, Deinococcus radiodurans R1
  CDS (1)..(333): transl_table=11
ttgacggaagcgggcggctcgttgcaccccgttcagccttgcgcccccgcttctgcccggcgtgtacactgcgggcacttcagtttcaggaggaatttggtaatggcgacttttgatgacgtgaaagatgtgattgtggacaagctcggtgtggacgaaggcaaggtgacccccgaagcccgcttcgtggaagacctcggcgccgacagcctggaaaccgtggaactgatcatgggcctggaagacaaattcggcgtgaccattcccgacgaagccgccgaaaccatccgcaccgtgcaggccgcggtcgactacatcgacaacaaccagtaa

SEQ ID NO: 150078 - protein, 110 aa, Deinococcus radiodurans R1
MTEAGGSLHPVQPCAPASARRVHCGHFSFRRNLVMATFDDVKDVIVDKLGVDEGKVTPEARFVEDLGADSLETVELIMGLEDKFGVTIPDEAAETIRTVQAAVDYIDNNQ

SEQ ID NO: 150079 - DNA, 258 bp, Xylella fastidiosa 9a5c
  CDS (1)..(258): transl_table=11
ttgcggagtgataagccaatgagtgacatcgaagcgcgcgtcagaaaaattgtcgccgagaaactcaatgtcgatgaagaaaaagtaactaatacctcgacgttcgtcgatgaactgggtgcggattcgttggataccgtcgagttggtgatggccttggaagacgagttccaatgtgagatcggtgacgaggctgctgagaagatgacttcggtgcaacatgccatcgactacattaagagtaatgctaagtgctaa

SEQ ID NO: 150080 - protein, 85 aa, Xylella fastidiosa 9a5c
MRSDKPMSDIEARVRKIVAEKLNVDEEKVTNTSTFVDELGADSLDTVELVMALEDEFQCEIGDEAAEKMTSVQHAIDYIKSNAKC

SEQ ID NO: 150081 - DNA, 432 bp, Drosophila melanogaster
  CDS (1)..(432)
atgtcgttcacacagatcgcgcgcagctgcagtcgactggcggccactttggccccaaggagggtcgcctccggcattctcatccaatcacaggcctccaggatgatgcacaggatcgccgtgccatcgatgaccagccagttgagccaaaagttcggtgtgcgcagctactcggccaagagcaccatcgaggacatcaagttccgcgtgctaaaggttgtctccgcctacgacaaagtgaccgccgaaaagctcaacgttgagtcgcacttcatcaacgacttgggactggattccttggaccacgtggaggtcatcatggccatggaggacgagttcggtttcgagatccccgactctgatgccgagaagctgcttaaacctgccgacattattaagtacgtcgccgacaaggaggatgtgtacgagtaa

SEQ ID NO: 150082 - protein, 143 aa, Drosophila melanogaster
MSFTQIARSCSRLAATLAPRRVASGILIQSQASRMMHRIAVPSMTSQLSQKFGVRSYSAKSTIEDIKFRVLKVVSAYDKVTAEKLNVESHFINDLGLDSLDHVEVIMAMEDEFGFEIPDSDAEKLLKPADIIKYVADKEDVYE

SEQ ID NO: 150083 - DNA, 459 bp, Drosophila melanogaster
  CDS (1)..(459)
atgtcgttcacacagatcgcgcgcagctgcagtcgactggcggccactttggccccaaggagggtcgcctccggcattctcatccaatcacaggcctccaggatgatgcacaggatcgccgtgccatcgatgaccagccagttgagccaagagtgccgtggtcgctggcaaacgcaattggtgcgcagatactcggcgaaaccgccgctctcgctgaagctgatcaatgagcgcgtcttgcttgtgctcaagctctacgacaagatcgatcccagcaagctcaacgttgagtcgcacttcatcaacgacttgggactggattccttggaccacgtggaggtcatcatggccatggaggacgagttcggtttcgagatccccgactctgatgccgagaagctgcttaaacctgccgacattattaagtacgtcgccgacaaggaggatgtgtacgagtaa

SEQ ID NO: 150084 - protein, 152 aa, Drosophila melanogaster
MSFTQIARSCSRLAATLAPRRVASGILIQSQASRMMHRIAVPSMTSQLSQECRGRWQTQLVRRYSAKPPLSLKLINERVLLVLKLYDKIDPSKLNVESHFINDLGLDSLDHVEVIMAMEDEFGFEIPDSDAEKLLKPADIIKYVADKEDVYE

SEQ ID NO: 150085 - DNA, 300 bp, Thermoanaerobacter tengcongensis MB4
  CDS (1)..(300): transl_table=11
atgttgacggaggaatggttatgtaatattatcataagtgtacaatttttgagaggaggtgaaaagggtatgatttttgaaaaagtgagaaacatcattgctgaacagctcggcattgatccagaggaaataacaatggagtcctcattcatagatgatttaggagcagactccttggacatagtagagcttataatggctttggaagaagagtttgacattgaaattcctgacgaagacgccgaaaaaataaagacggtaggtgatgtcgtagagtacttaagcaatattgttgagtaa

SEQ ID NO: 150086 - protein, 99 aa, Thermoanaerobacter tengcongensis MB4
MLTEEWLCNIIISVQFLRGGEKGMIFEKVRNIIAEQLGIDPEEITMESSFIDDLGADSLDIVELIMALEEEFDIEIPDEDAEKIKTVGDVVEYLSNIVE

SEQ ID NO: 150087 - DNA, 243 bp, Mycoplasma penetrans HF-2
  CDS (1)..(243): transl_table=4
atgactatagaacaaattactactgaagttaataaagttcttgaaaagaaccattcatcacttaaaattaacaacaaaaatattaatagtaacttaaaagaccttggtttaaattcattagatatgttagaaatgattgttcaagttgaagaacaactaaaaatcagtttaccagatgaaaaactgatagaaattaaaacaccaagtgatttgctgaatttaatccaaagtacaatcaaataa

SEQ ID NO: 150088 - protein, 80 aa, Mycoplasma penetrans HF-2
MTIEQITTEVNKVLEKNHSSLKINNKNINSNLKDLGLNSLDMLEMIVQVEEQLKISLPDEKLIEIKTPSDLLNLIQSTIK

SEQ ID NO: 150089 - DNA, 246 bp, Lactobacillus plantarum WCFS1
  CDS (1)..(246): transl_table=11
atgacgaaagaagaaattttcgataaaattgcggatatcattgctgatcggttcgaagttgataaagcaacgattaccaacgaaatgaacttgcaaaccgatttggatgctgattccatcgattttgttgagtttgtactggaattagaagacacctttggtagcgaaatctcagacgaagatgccgaaaaattgtcaacggtcggcgaagtcgtcgattacgtggcagcgcaccaagcaaaataa

SEQ ID NO: 150090 - protein, 81 aa, Lactobacillus plantarum WCFS1
MTKEEIFDKIADIIADRFEVDKATITNEMNLQTDLDADSIDFVEFVLELEDTFGSEISDEDAEKLSTVGEVVDYVAAHQAK

SEQ ID NO: 150091 - DNA, 249 bp, Lactobacillus plantarum WCFS1
  CDS (1)..(249): transl_table=11
atgactaaaactgaaatttttgaccaaattaaaaagatgatcgtggaacaattagacgtggatgctgacaagattacgatgacaacgaactttaccgaagacttagcacttgatagtctagacgtttttgaagtgatcgataagatcgaagacgaatatgatatcgaaatcgaaacggatgacgcgttagccacggttggtgatttagttgattatgtggcgactcatcaggaaactagcgaggactaa

SEQ ID NO: 150092 - protein, 82 aa, Lactobacillus plantarum WCFS1
MTKTEIFDQIKKMIVEQLDVDADKITMTTNFTEDLALDSLDVFEVIDKIEDEYDIEIETDDALATVGDLVDYVATHQETSED

SEQ ID NO: 150093 - DNA, 240 bp, Enterococcus faecalis V583
  CDS (1)..(240): transl_table=11
ttgactcgtgaagaagtacttcaaaaagtagcgaagattatctcaaaccactttgatattgaagcggatcaagtaacagatcaattaaacattaaagatgatttgaacgctgactcaattagcgtaatggagtttgttttagaacttgaagatgaatttggaacagagatttcagatgaagatgcagaaaaaattgaaacagttggtgccgctgtagattatattgtgagtaattcataa

SEQ ID NO: 150094 - protein, 79 aa, Enterococcus faecalis V583
MTREEVLQKVAKIISNHFDIEADQVTDQLNIKDDLNADSISVMEFVLELEDEFGTEISDEDAEKIETVGAAVDYIVSNS

SEQ ID NO: 150095 - DNA, 252 bp, Coxiella burnetii RSA 493
  CDS (1)..(252): transl_table=11
atgaaaaatcaaattaatcatcgtataaaaacaattatcgcagcgcaatcgcaaattcctattgagaatattcacgataactccaaatttcatgcaaacttaggttttgattctttagatgtggtgaatttaataagcgctataaatatggaattttcattaaatttgatggaaaacgatattattcatttagaaaccgtcgctgaactggtggactgtgtcgaacaaaaaattgaaaataagtcagcttaa

SEQ ID NO: 150096 - protein, 83 aa, Coxiella burnetii RSA 493
MKNQINHRIKTIIAAQSQIPIENIHDNSKFHANLGFDSLDVVNLISAINMEFSLNLMENDIIHLETVAELVDCVEQKIENKSA

SEQ ID NO: 150097 - DNA, 255 bp, Coxiella burnetii RSA 493
  CDS (1)..(255): transl_table=11
atggcaacagttgaagaacgagtcaaaaagattgtcgttgaacaattaggcgtaaaggaagaagaagttaccaacagtgcttcgtttgtagacgatttaggtgctgattccctagatacggtggagttggtgatggcatttgaagaggaattcgaaactgaaatccccgatgaagatgctgaaaaaattaccactgtccaacaagcgattgactatatcaaagaacattccgcgagcgaatccacttctgcgtga

SEQ ID NO: 150098 - protein, 84 aa, Coxiella burnetii RSA 493
MATVEERVKKIVVEQLGVKEEEVTNSASFVDDLGADSLDTVELVMAFEEEFETEIPDEDAEKITTVQQAIDYIKEHSASESTSA

SEQ ID NO: 150099 - DNA, 249 bp, Streptomyces avermitilis MA-4680
  CDS (1)..(249): transl_table=11
atggccgccactcaggaagagatcgtcgaaggtctcgccgagatcgtgaacgagatcgccgggatccccaccgaggacgtccagctggacaagtccttcaccgacgacctggacgtcgactcgctgtccatggtcgaggtcgtcgtcgccgccgaagagcgcttcgacgtcaagatccccgacgaggacgtcaagaacctcaagaccgtcggtgacgccgccgactacatcctcaagcaccaggcctga

SEQ ID NO: 150100 - protein, 82 aa, Streptomyces avermitilis MA-4680
MAATQEEIVEGLAEIVNEIAGIPTEDVQLDKSFTDDLDVDSLSMVEVVVAAEERFDVKIPDEDVKNLKTVGDAADYILKHQA

SEQ ID NO: 150101 - DNA, 246 bp, Nitrosomonas europaea ATCC 19718
  CDS (1)..(246): transl_table=11
atggaaattactgaaatagagcagcgcatcaaaaaaatcgtagccgagcaattgggcgtcaacgaatcagatgtcaaaaatgaatcttcctttgtcagcgatctgggtgcagattcactggatactgttgagctggtcatggcgctcgaagaagagttcgaatgcgaaattcctgatgagcaagctgaaaaaatcaatacggttcaggaagcgatcgatttcgtagcagccaacgcagctcagtaa

SEQ ID NO: 150102 - protein, 81 aa, Nitrosomonas europaea ATCC 19718
MEITEIEQRIKKIVAEQLGVNESDVKNESSFVSDLGADSLDTVELVMALEEEFECEIPDEQAEKINTVQEAIDFVAANAAQ

SEQ ID NO: 150103 - DNA, 297 bp, Bordetella parapertussis 12822
  CDS (1)..(297): transl_table=11
ttgcattcctctacgcttggctataattcgcgggatttttcccaattggagatctgcatggaaagcatcgaacagcgcgtcaagaagatcgtcgctgaacaacttggcgtgaacgaagccgagatcaagaacgagtcctccttccttgacgacctcggtgccgattcgctcgacatggtcgaactggtcatggcgctcgaagacgaattcgagaccgagatccccgacgaagaggccgaaaagatcactaccgtgcagcaagcggttgactacatcaattcgcacggtaagcagtaa

SEQ ID NO: 150104 - protein, 98 aa, Bordetella parapertussis 12822
MHSSTLGYNSRDFSQLEICMESIEQRVKKIVAEQLGVNEAEIKNESSFLDDLGADSLDMVELVMALEDEFETEIPDEEAEKITTVQQAVDYINSHGKQ

SEQ ID NO: 150105 - DNA, 243 bp, Prochlorococcus marinus subsp. pastoris str. CCMP1986
  CDS (1)..(243): transl_table=11
atgtcacaagaagaaatccttcaaaaagtatgctctattgtttctgagcaactaagtgttgaatcagccgaagtaaaatctgattcaaactttcaaaatgatttaggtgcagactccctagacaccgtagagctagttatggctcttgaagaagcatttgatatcgagatacctgatgaagcagctgaaggtatcgcaacagtaggagatgctgttaaattcatcgaagaaaaaaaaggttaa

SEQ ID NO: 150106 - protein, 80 aa, Prochlorococcus marinus subsp. pastoris str. CCMP1986
MSQEEILQKVCSIVSEQLSVESAEVKSDSNFQNDLGADSLDTVELVMALEEAFDIEIPDEAAEGIATVGDAVKFIEEKKG

SEQ ID NO: 150107 - DNA, 276 bp, Chromobacterium violaceum ATCC 12472
  CDS (1)..(276): transl_table=11
gtgatcccgaatcagaaaggtcaagggtttaaacaaatggaaaacatcgaagcgcgcgtcaagaagatcgttgccgagcaactgggcgtgaacgaagccgaaatcaaggtggaaagctccttcgttgacgatctgggcgccgattccctggataccgttgagctggtgatggcactggaagaagagttcgagtgcgaaatcccggacgaggaagccgagaagatcaccaccgttcagcaagccatcgactacgtgaccggccatctgaacaagtaa

SEQ ID NO: 150108 - protein, 91 aa, Chromobacterium violaceum ATCC 12472
MIPNQKGQGFKQMENIEARVKKIVAEQLGVNEAEIKVESSFVDDLGADSLDTVELVMALEEEFECEIPDEEAEKITTVQQAIDYVTGHLNK

SEQ ID NO: 150109 - DNA, 312 bp, Gloeobacter violaceus PCC 7421
  CDS (1)..(312): transl_table=11
gtgtactatcagcgattgggtcaggcacagccgggccgaacaatatgcactttagaggcaggaatgaacgaagtggaagtttatcaacgcgtcaagaagatcgtcgtggagcaactgtccgtcgaggagtcggaggtgacttccgaatcgagctttgccaacgacctcggtgccgattccctcgaccaggtggaactggtcatggcacttgaacaggagtttgaaaccgaaatcccggacgaagacgccgaaaagatcaccaccgtcggcgacgccgtcacatatgtgctcaagcgcggcagcgaagtttaa

SEQ ID NO: 150110 - protein, 103 aa, Gloeobacter violaceus PCC 7421
MYYQRLGQAQPGRTICTLEAGMNEVEVYQRVKKIVVEQLSVEESEVTSESSFANDLGADSLDQVELVMALEQEFETEIPDEDAEKITTVGDAVTYVLKRGSEV

SEQ ID NO: 150111 - DNA, 237 bp, Photorhabdus luminescens subsp. laumondii TTO1
  CDS (1)..(237): transl_table=11
atgagcactattgaagaacgcgttaaaaaaatcatcgttgaacaacttggtgttaaagaggaagaagttgttaattcagcttcttttgtagatgacttgggcgctgattctcttgacacagttgagctggtaatggctctggaagaagagttcgatatcgaaattccagatgaagaagcagaaaagatcactacagttcaggcagctattgattacgtccagaaccaaagcgaataa

SEQ ID NO: 150112 - protein, 78 aa, Photorhabdus luminescens subsp. laumondii TTO1
MSTIEERVKKIIVEQLGVKEEEVVNSASFVDDLGADSLDTVELVMALEEEFDIEIPDEEAEKITTVQAAIDYVQNQSE

SEQ ID NO: 150113 - DNA, 240 bp, Rhodopseudomonas palustris CGA009
  CDS (1)..(240): transl_table=11
atgagtgagattggcgagcgggttaagaagatcgtggtcgaacaccttggtgtcgaacccgagaaagtggtcgatagcgccagcttcatcgacgatctcggcgccgacagcctcgacaccgtcgaactcgtgatggcgttcgaagaagagttcggctgcgaaattccggacgatgccgccgagacgattctcaccgtcggcgacgccaccaagtttcttgaaaagaacgcaaagagctaa

SEQ ID NO: 150114 - protein, 79 aa, Rhodopseudomonas palustris CGA009
MSEIGERVKKIVVEHLGVEPEKVVDSASFIDDLGADSLDTVELVMAFEEEFGCEIPDDAAETILTVGDATKFLEKNAKS

SEQ ID NO: 150115 - DNA, 258 bp, Geobacter sulfurreducens PCA
  CDS (1)..(258): transl_table=11
atgtccgaccaacttattgtgcaggtaaagcagatgatcatcgacgccctccggatcgagggaatgtcccccgacgacatcgacaccgacgcccccctcttcggcgaagggctcggcctcgattccatcgacgccctccaactcgtggtggccatggagaaggatttcggcgtggtggtccccgacgccgccaccggcaccaaggtcttcgcgtcggtccgaagcatggccgaccatatcgccgccaaccggaaatga

SEQ ID NO: 150116 - protein, 85 aa, Geobacter sulfurreducens PCA
MSDQLIVQVKQMIIDALRIEGMSPDDIDTDAPLFGEGLGLDSIDALQLVVAMEKDFGVVVPDAATGTKVFASVRSMADHIAANRK

SEQ ID NO: 150117 - DNA, 348 bp, Mycobacterium avium subsp. paratuberculosis K-10
  CDS (1)..(348): transl_table=11
gtggctgtcagccaggaagaaatcatcgccggtatcgccgagatcatcgaagaggtgaccggtatcgagccctccgaggtcaccccggagaagtccttcgtcgacgacctggacatcgactcgctgtcgatggtcgagatcgccgtgcagaccgaggacaagtacggcgtcaagattcccgacgaggacctcgccggtctgcgcaccgtcggtgacgtcgtggcctatatccagaagctcgaggaagagaaccccgaggctgccgaggcgttgcgcgccaagctggagaccgagaaccccgaggcggtcgccaacgtcaaggcaaggctggaagcggacagcaagtga

SEQ ID NO: 150118 - protein, 115 aa, Mycobacterium avium subsp. paratuberculosis K-10
MAVSQEEIIAGIAEIIEEVTGIEPSEVTPEKSFVDDLDIDSLSMVEIAVQTEDKYGVKIPDEDLAGLRTVGDVVAYIQKLEEENPEAAEALRAKLETENPEAVANVKARLEADSK

SEQ ID NO: 150119 - DNA, 243 bp, Lactobacillus johnsonii NCC 533
  CDS (1)..(243): transl_table=11
atgaccgaagaggaaatttttaataaaattgctgatatgatttcagaacgctttagtattgatcgtgataagatcactaaagatttaaattttcagaatgatttagatgcagattcaattgatttcgttgagttagtaatggatctagaagatacatttggagcagagattccagatgatgatgcggaaaaattacaaactgttggtgaagcagtagaatatattaagagtcaccaaaattaa

SEQ ID NO: 150120 - protein, 80 aa, Lactobacillus johnsonii NCC 533
MTEEEIFNKIADMISERFSIDRDKITKDLNFQNDLDADSIDFVELVMDLEDTFGAEIPDDDAEKLQTVGEAVEYIKSHQN

SEQ ID NO: 150121 - DNA, 261 bp, Wolbachia endosymbiont of Drosophila melanogaster
  CDS (1)..(261): transl_table=11
gtgaatagcgaactagcaaagagcactagagaagacatagaagaaaaagtgaaaaagattatactagagcatattagtaaggatgtagagaaattcaacagctcttcaaagctttcggagcatggtacagacagcttagatgcagttgaaatcatcatggcagcagaagaagagtttggaatagaaattccagatgaagacgcacaaaaaatggaaactatggagcaaatagttgagtacattaataataaaaaaggctaa

SEQ ID NO: 150122 - protein, 86 aa, Wolbachia endosymbiont of Drosophila melanogaster
MNSELAKSTREDIEEKVKKIILEHISKDVEKFNSSSKLSEHGTDSLDAVEIIMAAEEEFGIEIPDEDAQKMETMEQIVEYINNKKG

SEQ ID NO: 150123 - DNA, 465 bp, Nasonia vitripennis
  CDS (1)..(465)
atggcgtcgatcgcgggcgtacgagtctttgcgcgaagcgccggtttgctcagaaacacgacgagccgactggctgtcctggccccggctacctcgagtcagctcaaccagagactcgtccacgcgatcaggcgaacgtcggcgccgatcctcggccagagcttagcggacccatgcgtcaagcaggtgcgccagtacagtgaaaaaccaccgctcacattgaattttatccgtgaccgagtccttttggtgcttaagctttatgataaaatagatgcttcaaagctcaccgtagactctcattttataaacgaccttggtctggactccttggaccacgttgaagtcattatggctatggaggatgaatttggtttcgaaataccagatatggatgccgaaagacttgtaacaccagctgccatagcgcgttatgttgcagacaaagaagatatttatgaataa

SEQ ID NO: 150124 - protein, 154 aa, Nasonia vitripennis
MASIAGVRVFARSAGLLRNTTSRLAVLAPATSSQLNQRLVHAIRRTSAPILGQSLADPCVKQVRQYSEKPPLTLNFIRDRVLLVLKLYDKIDASKLTVDSHFINDLGLDSLDHVEVIMAMEDEFGFEIPDMDAERLVTPAAIARYVADKEDIYE

SEQ ID NO: 150125 - DNA, 471 bp, Anopheles gambiae str. PEST
  CDS (1)..(471)
atggcatcgttggtgaatagtgtacgcggcctggcttgccgcaatacgtccctgctccgttgcgtgtttttacgctcggtatcgtcggccacggtcgcccggcgggataggtgtaatgagaagtttttgacagccccggcctccgcactgctgtccccctttgagcaaaatggtcgatggcaactagagatagtcagaaattacagtgctaaggaaccgctaacgcttcagctgatcaaagagcgtgtcctgctggtgctcaagctgtacgacaaagtcaatcccgaaaagcttacactggagtcgcacttcatcaatgacctcgggctcgattcgctggatcatgtcgaggtgataatggccatggaagacgaattcggatttgaaattcctgacggcgatgcggaaaagcttttcagacctgccgacattgtccagtatatcgccgacaaggaagatatttatgaataa

SEQ ID NO: 150126 - protein, 156 aa, Anopheles gambiae str. PEST
MASLVNSVRGLACRNTSLLRCVFLRSVSSATVARRDRCNEKFLTAPASALLSPFEQNGRWQLEIVRNYSAKEPLTLQLIKERVLLVLKLYDKVNPEKLTLESHFINDLGLDSLDHVEVIMAMEDEFGFEIPDGDAEKLFRPADIVQYIADKEDIYE

SEQ ID NO: 150127 - DNA, 438 bp, Magnaporthe grisea 70-15
  CDS (1)..(438)
atgatgttccgcgctacagctctgcgcagcgccgctgcctccgttgcccgtgccggcgccgtccgtcctgtcgtctcttcttccgccgtcgccagattagctactcgccgtgccgctcccaccgcttgggttcccaggactgctgctccgtggactgccgtccgctgctacgccgctgctggtggccttgacaagccccaggtcgagggcaggattatctctttgctgcagaagtttgacaaggtcaacgacccttccaagatccagccatcatcgcatttcgccaacgatcttggcctggacagcttggacaccgttgaggttgtcatggcgatcgaggaggagttcagcattgagatccccgacaaggatgccgaccagattcacagtgtcgacaaggctgttgagtacatactcagccagcccgatgccaactaa

SEQ ID NO: 150128 - protein, 145 aa, Magnaporthe grisea 70-15
MMFRATALRSAAASVARAGAVRPVVSSSAVARLATRRAAPTAWVPRTAAPWTAVRCYAAAGGLDKPQVEGRIISLLQKFDKVNDPSKIQPSSHFANDLGLDSLDTVEVVMAIEEEFSIEIPDKDADQIHSVDKAVEYILSQPDAN

SEQ ID NO: 150129 - DNA, 444 bp, Gibberella zeae PH-1
  CDS (1)..(444)
atgttccgatccgccgtcctccgatccctccgcgtcgccgcccgaccggccgccgtccgctccttcgctgctccccgcgtcgcttccgtagccgtccccaagatccagagcttccaggccgtgcggttctacagcgccggaggtgcgctcaacaaggatgaggtcgagggccgaattatgagcttgttgcagggctttgataagcaattgccgaatagtatagaagcagaagctaacgtcatcttcaaggtcaacgatgtttctaacatcaagtcctccgctcacttcgccaacgacctcggtctcgactctcttgacaccgtcgaggtcgtcatggccatcgaggaggaattcagcattgagatccccgacaaggacgccgactccatccactccgttaaccaggctgttgagtacatcctgaaccagcccgacgccgcctaa

SEQ ID NO: 150130 - protein, 147 aa, Gibberella zeae PH-1
MFRSAVLRSLRVAARPAAVRSFAAPRVASVAVPKIQSFQAVRFYSAGGALNKDEVEGRIMSLLQGFDKQLPNSIEAEANVIFKVNDVSNIKSSAHFANDLGLDSLDTVEVVMAIEEEFSIEIPDKDADSIHSVNQAVEYILNQPDAA

SEQ ID NO: 150131 - DNA, 447 bp, Apis mellifera
  CDS (1)..(447)
atggcgtctctcgcgggagttcgtattttaataagaaataccggtgcttttagaaatttgatctctcgaacgtgtttacgaagtgctattacacaatttcaattaaatgaaagattatttcattgtaaaagacaaagtattctcacagttatacctcaggtaaatatacaaaatattcgtacatccacttcaaaacctaaaactcaagaactagaagaacgtgttttaaatgtggtccaagcttatgataaaataactgctgacaagttatctttgaactctcattttatgcaagatctgggtttggattctttggatcatgtagaaattataatggctatagaagatgaatttggttttgaaataccagatatggatgcacagaagcttctacgacctgcggatatagtacgttacgttgccgatagagaagatgtttacgaataa

SEQ ID NO: 150132 - protein, 148 aa, Apis mellifera
MASLAGVRILIRNTGAFRNLISRTCLRSAITQFQLNERLFHCKRQSILTVIPQVNIQNIRTSTSKPKTQELEERVLNVVQAYDKITADKLSLNSHFMQDLGLDSLDHVEIIMAIEDEFGFEIPDMDAQKLLRPADIVRYVADREDVYE

SEQ ID NO: 150133 - DNA, 351 bp, Candida glabrata CBS 138
  CDS (1)..(351)
atgctaagaactgtggtgaatgtcgctagacaaagacctatgatgatggccaaggccaacatgcagatgctgagacctgtcaggttctactctcaaggcctatccaaggatgttgttcagaagcgtgttgttgatgtgatcaaggccttcgataagactagtgccagcgctaacatcactgaggacaccttgttccacaaggacttgaagctggactctctggacacggtcgagttgctagttgccatcgaggaagagttcgatgttgaattcccagacaaggttgccgatgagctaaagagcgtcaaggagactgtggactacattctgtccaacccagatgccaactaa

SEQ ID NO: 150134 - protein, 116 aa, Candida glabrata CBS 138
MLRTVVNVARQRPMMMAKANMQMLRPVRFYSQGLSKDVVQKRVVDVIKAFDKTSASANITEDTLFHKDLKLDSLDTVELLVAIEEEFDVEFPDKVADELKSVKETVDYILSNPDAN

SEQ ID NO: 150135 - DNA, 354 bp, Candida glabrata CBS 138
  CDS (1)..(354)
atgttttctcgactagtaccacgcttagccacccgtgctttaataccaagtacagttattgccagaccaatgctcgtgactcccatgctgatgagacaatacagtgttaagagtaaagatgagatttctcagaaattgattgaagttgtgaagaactttgtcaagggtgagtcatcacagaatgttactgctgattcaaagtttcacaaagacctaggtcttgactcactggacaccgttgagttgattgtgtcaattgaggaagagtttgatactgaaatcccagatgatgttgcagacagattgactagtatccgtgaaaccattgattatttagcatctcaaaagaattaa

SEQ ID NO: 150136 - protein, 117 aa, Candida glabrata CBS 138
MFSRLVPRLATRALIPSTVIARPMLVTPMLMRQYSVKSKDEISQKLIEVVKNFVKGESSQNVTADSKFHKDLGLDSLDTVELIVSIEEEFDTEIPDDVADRLTSIRETIDYLASQKN

SEQ ID NO: 150137 - DNA, 366 bp, Kluyveromyces lactis NRRL Y-1140
  CDS (1)..(366)
atgtttagaagtgtattccgtgctgccccaagtttgaccagagtttctggattgagaagcggatttgtaaagccaactttttcaagtgcttccaggttctatgcttcttcttctctatccaaagaagaaatcacaacccgtattgctgatgtgattaaatcttttgataagacagcttctgctacttcgattactgctaacactcaattttccaaggatttaggattagactcattggataccgttgaattgttggtttccattgaggaagaattcgatatcgaattcccagataaggttgcagatgagctcaagtctgtcggtgaaactgtggaatacatcgcttccagcccggaagctaactaa

SEQ ID NO: 150138 - protein, 121 aa, Kluyveromyces lactis NRRL Y-1140
MFRSVFRAAPSLTRVSGLRSGFVKPTFSSASRFYASSSLSKEEITTRIADVIKSFDKTASATSITANTQFSKDLGLDSLDTVELLVSIEEEFDIEFPDKVADELKSVGETVEYIASSPEAN

SEQ ID NO: 150139 - DNA, 372 bp, Debaryomyces hansenii CBS767
  CDS (1)..(372)
atgtttagatctactttattcagaagccttagaacaccattagttagacagccaattgcacctgcagcaatttccataacaaaaccatcatttgttcgtttctacgctgggttcccagctttatctagagatcttgccaaagagagaatcgtggaattattagaaggatacgataaggtcgatagcgctaaggaaatcactgaagaaagtgcgtttgtacaagacttgggtttggactcgttagacgttgtcgaagtggtcatggaagtggaacacgaatttaacatccaaatcccagatcacgaagccgacacattaaagactgttggtcagaccgtcgactatatcctcgcccagcctgatgcttgttaa

SEQ ID NO: 150140 - protein, 123 aa, Debaryomyces hansenii CBS767
MFRSTLFRSLRTPLVRQPIAPAAISITKPSFVRFYAGFPALSRDLAKERIVELLEGYDKVDSAKEITEESAFVQDLGLDSLDVVEVVMEVEHEFNIQIPDHEADTLKTVGQTVDYILAQPDAC

SEQ ID NO: 150141 - DNA, 348 bp, Debaryomyces hansenii CBS767
  CDS (1)..(348)
atgtttagattagctgtccgtgctgcccgtgccccagttgctagagctccattagcttccaacttcgttaaaccaattcgtttttacgcagttgcaccaatcacaaaagaggaagttaccacccgtgcttttgacgctttaaagaccgttgccgctttacaagaatctaagctttccttagaagcttcattccaaaaagatttaggtttagattcgttagataccgtcgaagctttagttgctttggaagaagaattcgacttagaaatccctgataaaatttctgatgacatcaagactgttggtgaagccgttaactacatctatgaagaagaacagaaattataa

SEQ ID NO: 150142 - protein, 115 aa, Debaryomyces hansenii CBS767
MFRLAVRAARAPVARAPLASNFVKPIRFYAVAPITKEEVTTRAFDALKTVAALQESKLSLEASFQKDLGLDSLDTVEALVALEEEFDLEIPDKISDDIKTVGEAVNYIYEEEQKL

SEQ ID NO: 150143 - DNA, 330 bp, Yarrowia lipolytica CLIB122
  CDS (1)..(330)
atgcttcgaaacgtttcccgactcgctctgcgatccaactttgcccgacaggccaccatgggccagcgattctactcggtcgctcgacccgatgccgagaagcgaattgctgctgttctcgagtcttttgacaagatctccaaccccgctgccatcacccccaccgcttccttcgccaaggacctcaacctcgacagcttagacaccgtcgaggttgttgttgccatcgaggaggagttcggcatcgagatccccgacaaggaggctgacgagatcaagtctgtcaaccaggccgtcgagtacattctcgcccagcccgatgctaaataa

SEQ ID NO: 150144 - protein, 109 aa, Yarrowia lipolytica CLIB122
MLRNVSRLALRSNFARQATMGQRFYSVARPDAEKRIAAVLESFDKISNPAAITPTASFAKDLNLDSLDTVEVVVAIEEEFGIEIPDKEADEIKSVNQAVEYILAQPDAK

SEQ ID NO: 150145 - DNA, 456 bp, Apis mellifera
  CDS (1)..(456)
atggcgtctctcgcgggagttcgtattttaataagaaataccggtgcttttagaaatttgatctctcgaacgtgtttacgaagtgctattacacaatttcaattaaatgaaagattatttcattgtaaaagacaaagtattctcacagttatacctcagggcacacgagtcaagcaggtgcgtcagtatggccataaggcaccattatcacttgaccttattcgccagcgtgtacttttagtactcaatctctatgataaagttgatgttcagaagttatctttgaactctcattttatgcaagatctgggtttggattctttggatcatgtagaaattataatggctatagaagatgaatttggttttgaaataccagatatggatgcacagaagcttctacgacctgcggatatagtacgttacgttgccgatagagaagatgtttacgaataa

SEQ ID NO: 150146 - protein, 151 aa, Apis mellifera
MASLAGVRILIRNTGAFRNLISRTCLRSAITQFQLNERLFHCKRQSILTVIPQGTRVKQVRQYGHKAPLSLDLIRQRVLLVLNLYDKVDVQKLSLNSHFMQDLGLDSLDHVEIIMAIEDEFGFEIPDMDAQKLLRPADIVRYVADREDVYE

SEQ ID NO: 150147 - DNA, 414 bp, Aspergillus nidulans FGSC A4
  CDS (1)..(414)
atgttccgttccgctgtcgtccgttcattgagggcctctgtgcctcgtgccgtcaagcctcaggctgctctccaaatccgtagctctcccgttgctcgtccagctcaattggctcctcgctttgccttgccggctgtccgcttctattccgcccctgccggtcttaagaaggaagaggttgagggccggatagtcaacctcttgaagaactttgacaaggttaatgatgctagcaagattaacggctcctcccacttctcgaacgacctcggacttgacagtctcgacaccgttgaggttgtgatggccatcgaggaggagttcagcattgagatccccgacaaggaggctgacgccatccacagcgttgacaaggctgttgagtacatccttgctcagcccgatgctcactaa

SEQ ID NO: 150148 - protein, 137 aa, Aspergillus nidulans FGSC A4
MFRSAVVRSLRASVPRAVKPQAALQIRSSPVARPAQLAPRFALPAVRFYSAPAGLKKEEVEGRIVNLLKNFDKVNDASKINGSSHFSNDLGLDSLDTVEVVMAIEEEFSIEIPDKEADAIHSVDKAVEYILAQPDAH

SEQ ID NO: 150149 - DNA, 435 bp, Candida albicans SC5314
  CDS (1)..(435): transl_table=12
atgtttagaactactttattaaaatcattaagagcttcagtatcaaaaccttcaatggtgaaaaccattcaatcatcatcaagatcattattcaccatcaccaccatcactaacaacaaaaatgtcactcctttgacttcatcaatgaactttattcgttgttatagtgccttcccagaattaactagagatattgctaaagaaagaattattgaattattagaaggttatgataaagtagatcaatctaaaggtgaaatcactgaacaaaactcatttacttctgatttaggtttggattctttagatgttgttgaagtgattatggaattagaacatgaatttaatattcaaatccctgataatgaagccgatagtttaaaaactgttggtcaaactattgattatattttagctcaaccagattcttgttaa

SEQ ID NO: 150150 - protein, 144 aa, Candida albicans SC5314
MFRTTLLKSLRASVSKPSMVKTIQSSSRSLFTITTITNNKNVTPLTSSMNFIRCYSAFPELTRDIAKERIIELLEGYDKVDQSKGEITEQNSFTSDLGLDSLDVVEVIMELEHEFNIQIPDNEADSLKTVGQTIDYILAQPDSC

SEQ ID NO: 150151 - DNA, 333 bp, Candida albicans SC5314
  CDS (1)..(333): transl_table=12
atgtttaaattagctttccgttccattcgtgcaccagttgctagagcttcatttgtcaaaccaattcgtttttatgttgccccaccaatttccaaagatgaagttacttcaagagccattcaagctttgaaaaccgttgctccattacaagaatccaatatcacattagaatcttctttccaaaaggatttgggcttagattctttagatactgttgaagctttagtggcattggaagaagaattcgatttagaaattcctgataagatttctgatgagataaagactgttggggaagctgttgattacatttacaaagaagaatctaaataa

SEQ ID NO: 150152 - protein, 110 aa, Candida albicans SC5314
MFKLAFRSIRAPVARASFVKPIRFYVAPPISKDEVTSRAIQALKTVAPLQESNITLESSFQKDLGLDSLDTVEALVALEEEFDLEIPDKISDEIKTVGEAVDYIYKEESK

SEQ ID NO: 150153 - DNA, 396 bp, Ustilago maydis 521
  CDS (1)..(396)
atggttgccgctcttcgatctgctgtctcttcgctcgtccgagctcgtgctccattggccattgcccgccaggctactcctgtcgcgcgtgccgccatcgtcaccccccgcttcgcacctgtgcgcttctacgccgcctcggcaggtctctccaagtcggacatcgagaccagaatcgttgacgttttgaagactttcgaaaaggttgatcccagcaaggtctctgccgcttcgtcgttcaccactgacctgggtttggattcgcttgacgctgtcgaggtcgtcatggccatcgaggaggagttcaccattgagattcccgacgaggaggctgacaacatcaccaccgttcaacaagccatcgactacatcgccaagacccccgaggccgtgtaa

SEQ ID NO: 150154 - protein, 131 aa, Ustilago maydis 521
MVAALRSAVSSLVRARAPLAIARQATPVARAAIVTPRFAPVRFYAASAGLSKSDIETRIVDVLKTFEKVDPSKVSAASSFTTDLGLDSLDAVEVVMAIEEEFTIEIPDEEADNITTVQQAIDYIAKTPEAV

SEQ ID NO: 150155 - DNA, 384 bp, Cryptococcus neoformans var. neoformans B-3501A
  CDS (1)..(384)
atgttccgcactcttcctctcctccgcaccgcccgcaccgccctcaggcaaacggcccccgtcgcgctccgaccacagcccctcgccctctccctcaggcccctcgctgccaggggttacgccgctgccgccggtctcagcaaggacgacattactgttaggatcctcgatgtcttgaagagctttgagaaggttgacagcagcaagctcacaaacaacgcttcattcaccagcgatctcggccttgactctcttgacgctgtcgaggttgtcatggccattgaagaggaattcgctattgagattcctgatgccgaggccgatgagatcacaactgtccaggatgctatcaactatgttgccaacacctctgaagcgcattaa

SEQ ID NO: 150156 - protein, 127 aa, Cryptococcus neoformans var. neoformans B-3501A
MFRTLPLLRTARTALRQTAPVALRPQPLALSLRPLAARGYAAAAGLSKDDITVRILDVLKSFEKVDSSKLTNNASFTSDLGLDSLDAVEVVMAIEEEFAIEIPDAEADEITTVQDAINYVANTSEAH

SEQ ID NO: 150157 - DNA, 453 bp, Tribolium castaneum
  CDS (1)..(453)
atgtccggtttgataaaaagcgtgcgcgttttatcccgaaattcgagttatttacgagctgttgcgattaggccactgactgtcattgccaataaacacaaaaattatgaccagcccccggttacaagcagctcagtatttgcaccccttagccagagactggttttgccacttgagcgatgttacagttccaagccaccgttgactttaaaacttatcacagaccgcgtcctcttggtattaaaactgtacgataaagtcaatccagacaagctcacgctagactcacactttattaatgatctggggcttgattccttggaccatgtggaggtgatcatggccatggaggacgaattcgggttcgaaattccagacggagacgccgaaaaactgctaaaacccgctgatatcgtgaggtatgttgcggacagggaagacatttacgaatag

SEQ ID NO: 150158 - protein, 150 aa, Tribolium castaneum
MSGLIKSVRVLSRNSSYLRAVAIRPLTVIANKHKNYDQPPVTSSSVFAPLSQRLVLPLERCYSSKPPLTLKLITDRVLLVLKLYDKVNPDKLTLDSHFINDLGLDSLDHVEVIMAMEDEFGFEIPDGDAEKLLKPADIVRYVADREDIYE

SEQ ID NO: 150159 - DNA, 240 bp, Prochlorococcus marinus str. AS9601
  CDS (1)..(240): transl_table=11
atgtcacaagaaatcctcgaaaaagtctgttctattgtttcagaacaattaagtgttgaagcaggagaagtaaaatcagattcaaatttccaaaatgatttaggtgcagattctctagatactgttgaactagtgatggctcttgaagaagcatttgatatcgaaattcctgatgaagccgctgaaggaatcgcaactgttggcgatgcagtaaaattcatcgaagaaaaaaaaggttaa

SEQ ID NO: 150160 - protein, 79 aa, Prochlorococcus marinus str. AS9601
MSQEILEKVCSIVSEQLSVEAGEVKSDSNFQNDLGADSLDTVELVMALEEAFDIEIPDEAAEGIATVGDAVKFIEEKKG

SEQ ID NO: 150161 - DNA, 243 bp, Prochlorococcus marinus str. MIT 9515
  CDS (1)..(243): transl_table=11
atgtcacaagaagaaatccttcaaaaagtttgctctattgtttctgagcaattaagtgttgaatctggagaagtcaaatctgattccaattttcaaaacgacttgggtgcagactccctagatactgtggagctagtaatggcactcgaagaggcatttgatatcgagatacctgacgaagcagctgaaggtatagcaacagtaggtgatgctgttaaattcatcgaagcaaaaaaaggttaa

SEQ ID NO: 150162 - protein, 80 aa, Prochlorococcus marinus str. MIT 9515
MSQEEILQKVCSIVSEQLSVESGEVKSDSNFQNDLGADSLDTVELVMALEEAFDIEIPDEAAEGIATVGDAVKFIEAKKG

SEQ ID NO: 150163 - DNA, 243 bp, Prochlorococcus marinus str. NATL1A
  CDS (1)..(243): transl_table=11
atgtcccaggaagcaattcttgaaaaagttcgttctattgtcgcagaacaacttagcgttgaagccggtgaagttaaaccggattcaaatttccaaaacgacctcggagctgactctctcgacactgtcgaattagttatggctcttgaagaggcatttgacatagaaatccccgacgaggctgctgaaggcattgccactgttggtgatgcagtcaaatacatcgaagaaaaacagtcttga

SEQ ID NO: 150164 - protein, 80 aa, Prochlorococcus marinus str. NATL1A
MSQEAILEKVRSIVAEQLSVEAGEVKPDSNFQNDLGADSLDTVELVMALEEAFDIEIPDEAAEGIATVGDAVKYIEEKQS

SEQ ID NO: 150165 - DNA, 312 bp, Prochlorococcus marinus str. MIT 9303
  CDS (1)..(312): transl_table=11
gtgttgccgtcaccgttgttaaccccactaccgccagctcgtaggatgcgtcgtcccgtcttcacggctatgtcccaggaagcgatccttgagaaagtccgttcaatcgttacggagcaactgagtgttgaggccggcgaagtgaagccagaatcgagttttcagaacgaccttggtgccgactccctcgacaccgtggaactcgtgatggccctcgaagaggcctttgacatcgagatccccgacgaggcggctgagggcatcacgaccgtcggtgatgccgtcaagtacatcgaagacaagcaagcctga

SEQ ID NO: 150166 - protein, 103 aa, Prochlorococcus marinus str. MIT 9303
MLPSPLLTPLPPARRMRRPVFTAMSQEAILEKVRSIVTEQLSVEAGEVKPESSFQNDLGADSLDTVELVMALEEAFDIEIPDEAAEGITTVGDAVKYIEDKQA

SEQ ID NO: 150167 - DNA, 225 bp, Clostridium thermocellum ATCC 27405
  CDS (1)..(225): transl_table=11
atgttcgaaaaagttagaaagattattgcagagcagttgggtattgaggaagatgagataacaatggaatcatcttttatagatgaccttggtgcagactctttggatattgttgaattgataatggccctggaagaagagttcgatctcgaaattcctgacagcgaggccgaaaagattacgacggtaggagacgttgttgagtacattaaaaataattcataa

SEQ ID NO: 150168 - protein, 74 aa, Clostridium thermocellum ATCC 27405
MFEKVRKIIAEQLGIEEDEITMESSFIDDLGADSLDIVELIMALEEEFDLEIPDSEAEKITTVGDVVEYIKNNS

SEQ ID NO: 150169 - DNA, 225 bp, Clostridium difficile 630
  CDS (1)..(225): transl_table=11
atgtttaataaagttgtagaaataataatagagcaattaggagtagaagataaagaaataactatggaaacatcattaatgaaggatttagaagcagattcattagatgcagtagaaataataatggcacttgaagatgaatttggtatagaaataccagatacagaagcagaaaacttcaaatctataggagatatagttaagtatatagaagctaataaatag

SEQ ID NO: 150170 - protein, 74 aa, Clostridium difficile 630
MFNKVVEIIIEQLGVEDKEITMETSLMKDLEADSLDAVEIIMALEDEFGIEIPDTEAENFKSIGDIVKYIEANK

SEQ ID NO: 150171 - DNA, 243 bp, Herminiimonas arsenicoxydans
  CDS (1)..(243): transl_table=11
atgtcggatatcgaacaacgcgttaagaagatcgtcgctgaacaactgggcgtcgccgaagcagacatcaaaatcgaatcgtctttcgtggacgatctgggtgccgattcgctcgacaccgttgagctcgtgatggcactcgaagacgaattcgaaatggaaatccctgacgaacaagctgagaaaatcactaccgtgcagcaggcgatcgattacgccaaggcacacgtcaaagcagcctaa

SEQ ID NO: 150172 - protein, 80 aa, Herminiimonas arsenicoxydans
MSDIEQRVKKIVAEQLGVAEADIKIESSFVDDLGADSLDTVELVMALEDEFEMEIPDEQAEKITTVQQAIDYAKAHVKAA

SEQ ID NO: 150173 - DNA, 240 bp, Bradyrhizobium sp. ORS278
  CDS (1)..(240): transl_table=11
atgagtgagattggcgagcgggttaagaagatcgtggtcgaacaccttggtgtcgagcccgagaaagtggtcgacaacgcgagcttcattgacgacctcggtgccgacagcctcgacacggtcgagctcgtcatggctttcgaggaagaattcggctgcgaaattccggacgatgccgccgagaccatcctgacggtcggcgacgccaccaagttcctcgagaagaacgccaagagctga

SEQ ID NO: 150174 - protein, 79 aa, Bradyrhizobium sp. ORS278
MSEIGERVKKIVVEHLGVEPEKVVDNASFIDDLGADSLDTVELVMAFEEEFGCEIPDDAAETILTVGDATKFLEKNAKS

SEQ ID NO: 150175 - DNA, 231 bp, Dichelobacter nodosus VCS1703A
  CDS (1)..(231): transl_table=11
atgagtaatattgaagaacgtgtgatcaaagtgattgcggaacaattaaacgttgatgaaggacaagtgaaagctgatgcccattttatcgatgatttaggcgcagactcattggatttggtggaattggtgatgactttagaaaaagaatttgactgcgaaattcctgatgaagaagcagaaaaaatcacaaccgtccaatctgcaattgattttgtaaaatcacgctaa

SEQ ID NO: 150176 - protein, 76 aa, Dichelobacter nodosus VCS1703A
MSNIEERVIKVIAEQLNVDEGQVKADAHFIDDLGADSLDLVELVMTLEKEFDCEIPDEEAEKITTVQSAIDFVKSR

SEQ ID NO: 150177 - DNA, 243 bp, Thermus thermophilus HB27
  CDS (1)..(243): transl_table=11
atgacggagcaagagatctttgaaaaggtgaaggcggtgatcgcggacaagctccaggtggagccggagaaggtgaccctcgaggcccgcttcattgaggacctgggggcggacagcctggacaccgtggagctcatcatgggcctggaggacgagttcggcctggagatctccgacgaggaggccgagaagatccgcaccgtcaaggacgccgtggagtacatcaaggccaagctgggctaa

SEQ ID NO: 150178 - protein, 80 aa, Thermus thermophilus HB27
MTEQEIFEKVKAVIADKLQVEPEKVTLEARFIEDLGADSLDTVELIMGLEDEFGLEISDEEAEKIRTVKDAVEYIKAKLG

SEQ ID NO: 150179 - DNA, 228 bp, Desulfotalea psychrophila LSv54
  CDS (1)..(228): transl_table=11
atggctttagatgaaaaaatggttgatattatcgtagaacagttgagtgttgagaaagagaaagttgttgccaaggcatcttttgttgatgatttgggtgctgattctcttgatcttgttgagttgatcatggcaatggaagaaggttatgatattgaaattcctgatgaagatgcagaaaaaattgcgactgttcaggatgcaattgattacgtaagcaacaagtaa

SEQ ID NO: 150180 - protein, 75 aa, Desulfotalea psychrophila LSv54
MALDEKMVDIIVEQLSVEKEKVVAKASFVDDLGADSLDLVELIMAMEEGYDIEIPDEDAEKIATVQDAIDYVSNK

SEQ ID NO: 150181 - DNA, 246 bp, Rickettsia typhi str. Wilmington
  CDS (1)..(246): transl_table=11
atgagtacaacggacaagatcgaacagaaagttattgaaatggttgctgagaagctaaataaagataaagcgataataactacagattcaagatttatagaagatttgaaagctgatagccttgataccgtagaattaatgatggcaatagaagttgaatacggtattgatatccctgatgatgaagccactaaaattaaaaccgtatccgatgtcataaaatatatcaaagaacgccaatcttaa

SEQ ID NO: 150182 - protein, 81 aa, Rickettsia typhi str. Wilmington
MSTTDKIEQKVIEMVAEKLNKDKAIITTDSRFIEDLKADSLDTVELMMAIEVEYGIDIPDDEATKIKTVSDVIKYIKERQS

SEQ ID NO: 150183 - DNA, 252 bp, Symbiobacterium thermophilum IAM 14863
  CDS (1)..(252): transl_table=11
gtgaacctgcccatgtccactgatccgattttcgagaaagtcaaggcgatcatcgtggaccagctctccgtcgaggaggaagaggtgacgatggaggcctcgttcatcgaggacctcggcgccgactccctcgacatcgtggagctgattatggctctggaagaggagttcgatctcgaggtccccgacgaggacgcggagaagctcaccactgttggcgctgcggtgaactacatcaaggagcataagtag

SEQ ID NO: 150184 - protein, 83 aa, Symbiobacterium thermophilum IAM 14863
MNLPMSTDPIFEKVKAIIVDQLSVEEEEVTMEASFIEDLGADSLDIVELIMALEEEFDLEVPDEDAEKLTTVGAAVNYIKEHK

SEQ ID NO: 150185 - DNA, 249 bp, Legionella pneumophila subsp. pneumophila str. Philadelphia 1
  CDS (1)..(249): transl_table=11
atgagtacagttgaagagcgtgttcgcaaaattgttgttgaacaactgggtgttaaagaagaagaattaaagaatgatgcatcctttgttgatgatttgggtgctgattccctggatacagtagaattggttatggctcttgaagaagaatttgaaacagaaattcctgatgaaaaagctgagaaaattactacaattcaagaagcaattgattatattgaatctaacttaaataaagaagaagcttaa

SEQ ID NO: 150186 - protein, 82 aa, Legionella pneumophila subsp. pneumophila str. Philadelphia 1
MSTVEERVRKIVVEQLGVKEEELKNDASFVDDLGADSLDTVELVMALEEEFETEIPDEKAEKITTIQEAIDYIESNLNKEEA

SEQ ID NO: 150187 - DNA, 348 bp, Anaplasma marginale str. St. Maries
  CDS (1)..(348): transl_table=11
gtgcggttctggcacggtccgtggtttctgtttttagtttatgggtgcgtcatggaaggtggtgaggtagggaacttgaagtctgacgatgctgttttggaagacatcaaatctaaggtcatggaggccgtgattggctgtctaaaattgaaggatgagcagaagcaggttctttctgggactaccaacctggccaaggatttcaacctggatagcctggattttgtggatctgattatgtccctggaggagaagttctccatagagattaccgacgaggaggcgcagggattggaaaccgtagatgatatatgtaaatacatacatggcaaatctaagtctgagtag

SEQ ID NO: 150188 - protein, 115 aa, Anaplasma marginale str. St. Maries
MRFWHGPWFLFLVYGCVMEGGEVGNLKSDDAVLEDIKSKVMEAVIGCLKLKDEQKQVLSGTTNLAKDFNLDSLDFVDLIMSLEEKFSIEITDEEAQGLETVDDICKYIHGKSKSE

SEQ ID NO: 150189 - DNA, 240 bp, Azoarcus sp. EbN1
  CDS (1)..(240): transl_table=11
atggagaacatcgaacagcgcgtcaagaagattgtcgccgagcagcttggcgtgaacgaatcggagatcaagaccgagtcgtctttcgtcgacgatctgggcgcggattcgctggacaccgtggaactggtcatggcgctggaagaagaattcgagtgcgaaatcccggacgaagaggccgagaagatcaccacggttcagcaggcgattgactacgtcaccgctcatctgaagaaataa

SEQ ID NO: 150190 - protein, 79 aa, Azoarcus sp. EbN1
MENIEQRVKKIVAEQLGVNESEIKTESSFVDDLGADSLDTVELVMALEEEFECEIPDEEAEKITTVQQAIDYVTAHLKK

SEQ ID NO: 150191 - DNA, 234 bp, Silicibacter pomeroyi DSS-3
  CDS (1)..(234): transl_table=11
atgagcgacgtcgcagatcgcgttaagaagatcgttgtggagcacctgggtgtcgaagaagacaaagtgaccgagaatgcctcgttcatcgacgacctgggcgccgacagcctcgacaccgtcgagctggtcatggctttcgaagaagagttcggcatcgagatcccggacgacgcggccgaaaccatccagaccttcggcgacgccgtcaagttcatcagcgaagcctcctga

SEQ ID NO: 150192 - protein, 77 aa, Silicibacter pomeroyi DSS-3
MSDVADRVKKIVVEHLGVEEDKVTENASFIDDLGADSLDTVELVMAFEEEFGIEIPDDAAETIQTFGDAVKFISEAS

SEQ ID NO: 150193 - DNA, 234 bp, Campylobacter jejuni RM1221
  CDS (1)..(234): transl_table=11
atggcaacatttgatgatgtaaaagcagtagtagtagagcaattaagtattgatgcagatgcagttaaaatggaatcaaaaattattgaagatttaggtgctgattctttagatgttgtagagcttattatggctttagaagaaaaatttgaaatagaaattccagatagtgatgctgaaaaattaattaaaattgaagatgttgtaaattatattgacaatctaaaaaaataa

SEQ ID NO: 150194 - protein, 77 aa, Campylobacter jejuni RM1221
MATFDDVKAVVVEQLSIDADAVKMESKIIEDLGADSLDVVELIMALEEKFEIEIPDSDAEKLIKIEDVVNYIDNLKK

SEQ ID NO: 150195 - DNA, 279 bp, Ehrlichia ruminantium str. Welgevonden
  CDS (1)..(279): transl_table=11
atgggaaacaacgatacacagtcagagtctatcaaagatactgttattaaaattgtaattgattgtttaaaactcaaagatgaacaacaagctaccctttctggtagcactaacttggcaaaagatttaaatcttgatagtcttgattttgtagatcttgtcatgtgcttagaagatcatttttctatagaaatctctgatgaagaagcacaagaacttgaaactatagataaaatagaggagtacatacgtaataaattatcagacaaaactaactaa

SEQ ID NO: 150196 - protein, 92 aa, Ehrlichia ruminantium str. Welgevonden
MGNNDTQSESIKDTVIKIVIDCLKLKDEQQATLSGSTNLAKDLNLDSLDFVDLVMCLEDHFSIEISDEEAQELETIDKIEEYIRNKLSDKTN

SEQ ID NO: 150197 - DNA, 237 bp, Neisseria gonorrhoeae FA 1090
  CDS (1)..(237): transl_table=11
atgtcaaacatcgaacaacaagttaagaaaattattgctgaacaactgggcgtaaacgaagccgacgtgaaaaacgaatcttccttccaagacgacttgggcgcggattctttggataccgtggagttggttatggctttggaagaagccttcggctgcgaaatccccgacgaagatgccgaaaaaatcaccaccgtccaactggctatcgactacatcaatgcccacaacggctaa

SEQ ID NO: 150198 - protein, 78 aa, Neisseria gonorrhoeae FA 1090
MSNIEQQVKKIIAEQLGVNEADVKNESSFQDDLGADSLDTVELVMALEEAFGCEIPDEDAEKITTVQLAIDYINAHNG

SEQ ID NO: 150199 - DNA, 243 bp, Pseudomonas syringae pv. syringae B728a
  CDS (1)..(243): transl_table=11
atgagcaccacatccatcgaagagcgcgtcaagaaaatcgttgcagagcaacttggcgtcaaacaagaagaggttgtcaacactgcttctttcgttgaggacctgggcgctgactccctggacaccgtcgagctggtaatggctctggaagaggaattcgagaccgaaatccctgacgaagaagcggaaaagatcactaccgttcaagcagcaatcgactacgtcactagccatcaggcttaa

SEQ ID NO: 150200 - protein, 80 aa, Pseudomonas syringae pv. syringae B728a
MSTTSIEERVKKIVAEQLGVKQEEVVNTASFVEDLGADSLDTVELVMALEEEFETEIPDEEAEKITTVQAAIDYVTSHQA

SEQ ID NO: 150201 - DNA, 237 bp, Pseudomonas fluorescens Pf-5
  CDS (1)..(237): transl_table=11
atgagcaccatcgaagagcgcgtcaagaaaatcgttgctgagcaactgggcgttaaagaagaagaagttgttaacaccgcttccttcgttgaagacctgggtgccgactcccttgacaccgttgagctggtgatggctctggaagaggaattcgagaccgaaatccctgacgaagaagctgaaaagatcactaccgttcaagcagctatcgactacgttaccagccaccaggcttaa

SEQ ID NO: 150202 - protein, 78 aa, Pseudomonas fluorescens Pf-5
MSTIEERVKKIVAEQLGVKEEEVVNTASFVEDLGADSLDTVELVMALEEEFETEIPDEEAEKITTVQAAIDYVTSHQA

SEQ ID NO: 150203 - DNA, 234 bp, Colwellia psychrerythraea 34H
  CDS (1)..(234): transl_table=11
atgagtaatatcgaagaacgcgtaaaaaaaatcacagttgaacagttaggtgttagtgaagcagaagtaaaaattgattcatcatttgttgatgacttaggtgctgactcattagacactgttgaattagttatggcgttagaagaagaatttgatactgaaattcctgacgaagaagctgaaaaaatcacaacagttcaagcagcaatcgattacgttactgctaaccagtaa

SEQ ID NO: 150204 - protein, 77 aa, Colwellia psychrerythraea 34H
MSNIEERVKKITVEQLGVSEAEVKIDSSFVDDLGADSLDTVELVMALEEEFDTEIPDEEAEKITTVQAAIDYVTANQ

SEQ ID NO: 150205 - DNA, 237 bp, Pseudomonas syringae pv. phaseolicola 1448A
  CDS (1)..(237): transl_table=11
atgagcaccatcgaagagcgcgtcaagaaaatcgttgcagagcaacttggcgtcaaatcagaagaggttgtcaacactgcttctttcgttgaagacctgggcgctgactccctggacactgtcgagctggtaatggctctggaagaggaattcgagaccgaaatccctgacgaagaagcggaaaagatcactaccgttcaagcagcaatcgactacgtcactagccatcaggcttaa

SEQ ID NO: 150206 - protein, 78 aa, Pseudomonas syringae pv. phaseolicola 1448A
MSTIEERVKKIVAEQLGVKSEEVVNTASFVEDLGADSLDTVELVMALEEEFETEIPDEEAEKITTVQAAIDYVTSHQA

SEQ ID NO: 150207 - DNA, 237 bp, Dechloromonas aromatica RCB
  CDS (1)..(237): transl_table=11
atggataacatcgtagagcgcgtcaaaaagatcgtcgccgaacaactgggcgtgaacgaagcggacatcaagaacgagtcctcttttgtggatgatctgggcgctgactccctggacaccgtcgagctggtcatggctctggaagaggaattcgagtgcgagattcctgacgaccaggctgagaaaatcaccactgtccagcaggctgtcgattacatcctcgccggcaagaagtaa

SEQ ID NO: 150208 - protein, 78 aa, Dechloromonas aromatica RCB
MDNIVERVKKIVAEQLGVNEADIKNESSFVDDLGADSLDTVELVMALEEEFECEIPDDQAEKITTVQQAVDYILAGKK

SEQ ID NO: 150209 - DNA, 276 bp, Ehrlichia canis str. Jake
  CDS (1)..(276): transl_table=11
atggaaagtaatgatggaaagttagaatctattaaagatactgtgactaaaatcgtcattgattgtttaaagctcaaagatgagcaaaaagctacactctctggtagcacaaatttagcaaaagatctgaatcttgatagccttgattttgtagacttggtaatgtgcttagaagatcacttctctatagaaatttctgatgaagaagcacaagaactagaaactatagataaaatagaagaatatatacgtaataaaatatcaagcaaaaactaa

SEQ ID NO: 150210 - protein, 91 aa, Ehrlichia canis str. Jake
MESNDGKLESIKDTVTKIVIDCLKLKDEQKATLSGSTNLAKDLNLDSLDFVDLVMCLEDHFSIEISDEEAQELETIDKIEEYIRNKISSKN

SEQ ID NO: 150211 - DNA, 234 bp, Thiobacillus denitrificans ATCC 25259
  CDS (1)..(234): transl_table=11
atggataacgtacagcgtgtaattaaagtcgtcgccgagcagttgggcgtgaacgaggcggacatcaagagcgagtcctccttcgttggcgaccttggcgccgactcgctcgacaccgtcgagctggtgatggcgctggaagaagaattcggttgcgaaattcccgacgaagacgccgagaaaatcaccaccgtccagcaggccatcgactacgtcaacagccactcgaactga

SEQ ID NO: 150212 - protein, 77 aa, Thiobacillus denitrificans ATCC 25259
MDNVQRVIKVVAEQLGVNEADIKSESSFVGDLGADSLDTVELVMALEEEFGCEIPDEDAEKITTVQQAIDYVNSHSN

SEQ ID NO: 150213 - DNA, 255 bp, Anabaena variabilis ATCC 29413
  CDS (1)..(255): transl_table=11
atgagccaatcagaaacttttgaaaaagtcaaaagcattgttgtcgaacaactaagtgtggaagaccctgacaaagtaactccagaagctagttttgccaacgatttacaggctgattccctcgatacagtagaactagtaatggctttggaagaagaatttgagatcgaaattcccgatgaagccgcagagaaaatcaccaccgttcaagaggcggtggattacatcaataaccaagttgccgcatcagcttaa

SEQ ID NO: 150214 - protein, 84 aa, Anabaena variabilis ATCC 29413
MSQSETFEKVKSIVVEQLSVEDPDKVTPEASFANDLQADSLDTVELVMALEEEFEIEIPDEAAEKITTVQEAVDYINNQVAASA

SEQ ID NO: 150215 - DNA, 234 bp, Rhodobacter sphaeroides 2.4.1
  CDS (1)..(234): transl_table=11
atgagcgacatcgctgatcgcgtgaagaagatcgtcgtcgagcatctgggcgtcgaagaggagaaggtgaccgagaatgcctcgttcatcgacgacctcggcgcggacagcctcgacacggtcgagctcgtgatggccttcgaggaagagttcggcatcgagatcccggacgatgcggccgaaaccatccagaccttcggcgatgcggtgaagttcatctcggaagccgcctga

SEQ ID NO: 150216 - protein, 77 aa, Rhodobacter sphaeroides 2.4.1
MSDIADRVKKIVVEHLGVEEEKVTENASFIDDLGADSLDTVELVMAFEEEFGIEIPDDAAETIQTFGDAVKFISEAA

SEQ ID NO: 150217 - DNA, 234 bp, Carboxydothermus hydrogenoformans Z-2901
  CDS (1)..(234): transl_table=11
atggcaggagtgtttgagcgggttaaaaaaataatcgtggatcaattaggagtcgaagaagatgaagttactatggaagcatcgtttattgacgaccttggagcggattcattggacattgtggagttaattatggcttttgaagaagagtttgaattagagatacccgatgaagatgcggaaaaaattcgcaccgttggggatgctgttaactatattcaggagagagtttaa

SEQ ID NO: 150218 - protein, 77 aa, Carboxydothermus hydrogenoformans Z-2901
MAGVFERVKKIIVDQLGVEEDEVTMEASFIDDLGADSLDIVELIMAFEEEFELEIPDEDAEKIRTVGDAVNYIQERV

SEQ ID NO: 150219 - DNA, 267 bp, Synechococcus sp. CC9605
  CDS (1)..(267): transl_table=11
atgcagcgtcccgttgccacggctatgtcccaggaagcgattctcgaaaaggtgcgctcaatcgttgcggagcaactgagtgttgactccggcgaagtgaagcccgaatccaacttccagaatgatctgggagctgattctttggacaccgtggaactcgtgatggccctggaagaggcctttgacatcgagatccccgacgaagcagctgagggcatcaccaccgttggtgacgccgtcaaatacatcgaagacaagcaggcctga

SEQ ID NO: 150220 - protein, 88 aa, Synechococcus sp. CC9605
MQRPVATAMSQEAILEKVRSIVAEQLSVDSGEVKPESNFQNDLGADSLDTVELVMALEEAFDIEIPDEAAEGITTVGDAVKYIEDKQA

SEQ ID NO: 150221 - DNA, 234 bp, Geobacter metallireducens GS-15
  CDS (1)..(234): transl_table=11
atgtcagcgatagacaaaagggttaaagagatcgttgccgaacagcttggcgtcgatgaagcacaggtaacgaatgaggcatcgttcatggacgatctgggtgccgattctcttgataccgtggaactggtgatggccctcgaggaggagttcgacatcgagatctccgacgaagacgcagagaagatccaaagcgtacaggacgccatcgactacatcaccgagcatacctaa

SEQ ID NO: 150222 - protein, 77 aa, Geobacter metallireducens GS-15
MSAIDKRVKEIVAEQLGVDEAQVTNEASFMDDLGADSLDTVELVMALEEEFDIEISDEDAEKIQSVQDAIDYITEHT

SEQ ID NO: 150223 - DNA, 231 bp, Desulfovibrio desulfuricans G20
  CDS (1)..(231): transl_table=11
atgtccgtcgaagaaaaagtcaaaaagatcatcatggaccagctcggcgtttccgccgaagaagtaaagcccgaagcttcctttgtggaagatctgggtgctgactccctggacctgaccgaactgatcatggccatggaagaagaattcggtaccgagattgatgacgacgacgctcagaaaattctgaaagtcaaagacgccatcgactacatcgctggcaagcaatag

SEQ ID NO: 150224 - protein, 76 aa, Desulfovibrio desulfuricans G20
MSVEEKVKKIIMDQLGVSAEEVKPEASFVEDLGADSLDLTELIMAMEEEFGTEIDDDDAQKILKVKDAIDYIAGKQ

SEQ ID NO: 150225 - DNA, 240 bp, Prochlorococcus marinus str. MIT 9312
  CDS (1)..(240): transl_table=11
atgtcacaagaaatcctcgaaaaagtctgttctattgtttcagagcaattaagcgttgaagcagcagaagtgaaatcagattcaaatttccaaaatgatttgggtgcagattccttagatactgttgaattagtgatggctctggaggaagcatttgatattgaaatacctgatgaagcagctgaaggcattgcaacagttggagatgcagttaaattcatcgaagaaaaaaaaggttaa

SEQ ID NO: 150226 - protein, 79 aa, Prochlorococcus marinus str. MIT 9312
MSQEILEKVCSIVSEQLSVEAAEVKSDSNFQNDLGADSLDTVELVMALEEAFDIEIPDEAAEGIATVGDAVKFIEEKKG

SEQ ID NO: 150227 - DNA, 243 bp, Synechococcus elongatus PCC 7942
  CDS (1)..(243): transl_table=11
atgagccaagaagacatcttcagcaaagtcaaagacattgtggctgagcagctgagtgtggatgtggctgaagtcaagccagaatccagcttccaaaacgatctgggagcggactcgctggacaccgtggaactggtgatggctctggaagaggctttcgatatcgaaatccccgatgaagccgctgaaggcattgcgaccgttcaagacgccgtcgatttcatcgctagcaaagctgcctag

SEQ ID NO: 150228 - protein, 80 aa, Synechococcus elongatus PCC 7942
MSQEDIFSKVKDIVAEQLSVDVAEVKPESSFQNDLGADSLDTVELVMALEEAFDIEIPDEAAEGIATVQDAVDFIASKAA

SEQ ID NO: 150229 - DNA, 234 bp, Rhodospirillum rubrum ATCC 11170
  CDS (1)..(234): transl_table=11
atgagcgacgtcgccgaccgcgttaagaagatcgttgtcgagcatctgggtgtcgaagaagccaaggtaactgaaaacgccagcttcatcgatgacctgggcgccgatagtctggatacggttgaattggttatggcgttcgaggaggaattcggttgcgaaatccccgatgacgccgccgagaagatcctgaccgtcaaggatgccatcgacttcatcgaaagcaacggctga

SEQ ID NO: 150230 - protein, 77 aa, Rhodospirillum rubrum ATCC 11170
MSDVADRVKKIVVEHLGVEEAKVTENASFIDDLGADSLDTVELVMAFEEEFGCEIPDDAAEKILTVKDAIDFIESNG

SEQ ID NO: 150231 - DNA, 240 bp, Moorella thermoacetica ATCC 39073
  CDS (1)..(240): transl_table=11
gtgaggtcagtggacgtttttgaaaaaatcaaggggatcgtcgctgagcagctgggggtcgaggaagacacgataaccatggagacctcctttgaggacttgaatgccgattccctggatatcgtagaactcatcatggccctggaagaggaattcgacctggagattcccgacgaggatgctgaaaagctcacgactgtcggggcagcagtggcctatattaaagaacataccaagtaa

SEQ ID NO: 150232 - protein, 79 aa, Moorella thermoacetica ATCC 39073
MRSVDVFEKIKGIVAEQLGVEEDTITMETSFEDLNADSLDIVELIMALEEEFDLEIPDEDAEKLTTVGAAVAYIKEHTK

SEQ ID NO: 150233 - DNA, 237 bp, Novosphingobium aromaticivorans DSM 12444
  CDS (1)..(237): transl_table=11
atgagcgataccgccgaccgcgttaagaagatcgttgtcgagcacctcggcgtcgaggctgacaaggtcaccgaagaagccagcttcatcgacgatctgggcgctgactcgctcgacatcgtcgagctggtcatggccttcgaagaagaatttggcgtcgagatccccgacgatgcggccgagaagatctcgaccgtttcggacgcgatcaagtacatcgacgaaaacaagggctga

SEQ ID NO: 150234 - protein, 78 aa, Novosphingobium aromaticivorans DSM 12444
MSDTADRVKKIVVEHLGVEADKVTEEASFIDDLGADSLDIVELVMAFEEEFGVEIPDDAAEKISTVSDAIKYIDENKG

SEQ ID NO: 150235 - DNA, 255 bp, Anaplasma phagocytophilum HZ
  CDS (1)..(255): transl_table=11
gtgtcagaagaaataaaagcacaggttatggagtcagtgatcgggtgtctaaaattaaacgacgaacaaaagcagattctttctggcactacaaacttagcaaaagattttaatcttgatagcttggattttgttgatcttatcatgtcgctagaagagaggttttccctagaaatatcagatgaagatgcacaaaagctggaaacagttgatgacatttgtcgctacatagcaagtaagtctagtgacgcttga

SEQ ID NO: 150236 - protein, 84 aa, Anaplasma phagocytophilum HZ
MSEEIKAQVMESVIGCLKLNDEQKQILSGTTNLAKDFNLDSLDFVDLIMSLEERFSLEISDEDAQKLETVDDICRYIASKSSDA

SEQ ID NO: 150237 - DNA, 276 bp, Ehrlichia chaffeensis str. Arkansas
  CDS (1)..(276): transl_table=11
atggaaagtaatgacgaaaagttagaatctgtcaaagatactgtgactaaaattgtgattgattgtttaaaactaaaagacgaacaaaaagctactctatccggtagcactaatttagcaaaagacttgaatcttgatagccttgatttcgtagatttggtaatgtgcttagaagaccatttctccatagaaatttccgatgaagaagcacaagaacttgaaactatagataaaatagaagagtatatacgtaataagttatcaagtaagaattga

SEQ ID NO: 150238 - protein, 91 aa, Ehrlichia chaffeensis str. Arkansas
MESNDEKLESVKDTVTKIVIDCLKLKDEQKATLSGSTNLAKDLNLDSLDFVDLVMCLEDHFSIEISDEEAQELETIDKIEEYIRNKLSSKN

SEQ ID NO: 150239 - DNA, 285 bp, Francisella tularensis subsp. holarctica
  CDS (1)..(285): transl_table=11
atgagtacacataacgaagattctaaaaaaaataatgctgatgaaaaagcaaaaatattttctagagttaaccatataatagttgagcaattaggcgttaaagaagaagatcttaagccagaagcttcttttatcgatgatttaggtgcggactcattagacacagtagagcttgtaatggctctagaagaagaatttgatactgagattccagatgaagatgctgagaaaatcagaactgttaaagacgtttacgactatatcgaatctaaagatgtaggttaa

SEQ ID NO: 150240 - protein, 94 aa, Francisella tularensis subsp. holarctica
MSTHNEDSKKNNADEKAKIFSRVNHIIVEQLGVKEEDLKPEASFIDDLGADSLDTVELVMALEEEFDTEIPDEDAEKIRTVKDVYDYIESKDVG

SEQ ID NO: 150241 - DNA, 228 bp, Desulfitobacterium hafniense Y51
  CDS (1)..(228): transl_table=11
atgagcgtttttgacaaagtgaaatcaatcgtagtggatcaacttggggtagaagaagatgaaattacattagaaaccaccttcgcagatcttaatgcggattccctggatatcgttgaacttattatggctcttgaagaagaatttgatctcgatattccggatgaggatgcagagaaaattcgtaatgtcggtgatgcagtaaattacatcaaggaaaaccaataa

SEQ ID NO: 150242 - protein, 75 aa, Desulfitobacterium hafniense Y51
MSVFDKVKSIVVDQLGVEEDEITLETTFADLNADSLDIVELIMALEEEFDLDIPDEDAEKIRNVGDAVNYIKENQ

SEQ ID NO: 150243 - DNA, 237 bp, Saccharophagus degradans 2-40
  CDS (1)..(237): transl_table=11
atgagcagcattgaagaacgcgttaaaaagattgtcgcagagcaactaggtgttaaagaagaagaagtaaaaaacgaagcgtccttcgttgaagacttaggtgcagattctctagataccgttgaattggttatggctttagaagaggaattcgaaactgaaattcctgatgaagaagcagagaaaatcactactgttcaactagctatcaactacatcaacgaaaatttggcgtaa

SEQ ID NO: 150244 - protein, 78 aa, Saccharophagus degradans 2-40
MSSIEERVKKIVAEQLGVKEEEVKNEASFVEDLGADSLDTVELVMALEEEFETEIPDEEAEKITTVQLAINYINENLA

SEQ ID NO: 150245 - DNA, 237 bp, Methylobacillus flagellatus KT
  CDS (1)..(237): transl_table=11
atgtctgacatcgaacaacgcgttaaaaagatcgtttccgagcaacttggtgcaaacgaggctgacgtcaagaacgaatcctcctttgttgacgatctgggtgctgattctctcgacaccgtagaattagtgatggcgctggaagaagaattcgactgcgaaattcctgacgaagaagccgaaaaaatcacaacagttcagcaagcgattgattacgtcaacgcaaacctgaaataa

SEQ ID NO: 150246 - protein, 78 aa, Methylobacillus flagellatus KT
MSDIEQRVKKIVSEQLGANEADVKNESSFVDDLGADSLDTVELVMALEEEFDCEIPDEEAEKITTVQQAIDYVNANLK

SEQ ID NO: 150247 - DNA, 246 bp, Acidobacteria bacterium Ellin345
  CDS (1)..(246): transl_table=11
atggcttccgtagaagaaaaagtaaaacagatcattgtcgagcagctcggtgtggatgagggtgaggttacgcccaatgcttcgttcgtggacgatctcggcgccgactcgctcgatacggtcgagctggtgatggctttcgaggaagcgtttgaaatcgagattccagatgaggacgccgaaaagatccgcaccgtaaaagacgcggtagattacatcacagcccacgcgaaaggtggcaagtag

SEQ ID NO: 150248 - protein, 81 aa, Acidobacteria bacterium Ellin345
MASVEEKVKQIIVEQLGVDEGEVTPNASFVDDLGADSLDTVELVMAFEEAFEIEIPDEDAEKIRTVKDAVDYITAHAKGGK

SEQ ID NO: 150249 - DNA, 234 bp, Silicibacter sp. TM1040
  CDS (1)..(234): transl_table=11
atgagcgacgtcgcagatcgcgtgaaaaagatcgttgtagagcacctgggtgttgaagaagacaaggtgaccgagagcgcctccttcatcgacgaccttggcgcagacagcctcgacacagttgagctggttatggcgttcgaagaagagttcggcatcgagatcccggacgacgcggccgagaccatccagaccttcggcgacgcagtgaagttcatctccgaagcgtcctga

SEQ ID NO: 150250 - protein, 77 aa, Silicibacter sp. TM1040
MSDVADRVKKIVVEHLGVEEDKVTESASFIDDLGADSLDTVELVMAFEEEFGIEIPDDAAETIQTFGDAVKFISEAS

SEQ ID NO: 150251 - DNA, 243 bp, Myxococcus xanthus DK 1622
  CDS (1)..(243): transl_table=11
atgtcgacgtcaaccattgaggccaaggtcaagtccatcatcgccgaccagctcggtgtcggagaggatgagatcaagccggagtcctccttcatcgaggacctcggcgcggacagcctcgacatcgtggagctcgtcatggcgatggaagaggagttcgaggtcgagattcccgacgaagaggcggagaacatcaagaccgtcaacgacgccgtcagctacatcaacacccacaagaagtag

SEQ ID NO: 150252 - protein, 80 aa, Myxococcus xanthus DK 1622
MSTSTIEAKVKSIIADQLGVGEDEIKPESSFIEDLGADSLDIVELVMAMEEEFEVEIPDEEAENIKTVNDAVSYINTHKK

SEQ ID NO: 150253 - DNA, 237 bp, Mesorhizobium sp. BNC1
  CDS (1)..(237): transl_table=11
atgagtgatactgcagagcgcgtcaagaagatcgttgttgagcatcttggcgtagacgccgacaaggtgaccgaacaggccagctttatcgacgatctgggcgcggacagcctcgacaccgttgaactggtaatggccttcgaggaagaattcggtgtcgagatccccgacgacgcggccgagacgatcctcacagtcggcgacgctgtgaagtacatcgaaaaggccacagcctga

SEQ ID NO: 150254 - protein, 78 aa, Mesorhizobium sp. BNC1
MSDTAERVKKIVVEHLGVDADKVTEQASFIDDLGADSLDTVELVMAFEEEFGVEIPDDAAETILTVGDAVKYIEKATA

SEQ ID NO: 150255 - DNA, 231 bp, Haemophilus somnus 129PT
  CDS (1)..(231): transl_table=11
atgagcattgaagaacgtgtaaaaaaaatcattgttgaacaattaggtgttaaagaagatgatgttaagcctgaagcttcatttattgaagatttaggtgcagattctttggatacagttgaattagtaatggctttagaggaagaatttgatattgaaattccggatgaagaagctgagaaaattacaacagttcaatcagcaattgattatgttcaaaataatcaatag

SEQ ID NO: 150256 - protein, 76 aa, Haemophilus somnus 129PT
MSIEERVKKIIVEQLGVKEDDVKPEASFIEDLGADSLDTVELVMALEEEFDIEIPDEEAEKITTVQSAIDYVQNNQ

SEQ ID NO: 150257 - DNA, 267 bp, Trichodesmium erythraeum IMS101
  CDS (1)..(267): transl_table=11
atgaccaacgatagtgttccggcgaaagtcatggaaattgtggctaaacaactggaaaaagaccaaaaagaagtcacgccagaatcgagttttgctaacgatctaggagctgattctttagatactgtagaattagtcatggcattggaagaagaatttggtacagagattccagatgaagaagcagaaaaaattactactgtccaagctgctgtggattatattcaaaacaagatggatgatggaaaaataaaactggaaaaataa

SEQ ID NO: 150258 - protein, 88 aa, Trichodesmium erythraeum IMS101
MTNDSVPAKVMEIVAKQLEKDQKEVTPESSFANDLGADSLDTVELVMALEEEFGTEIPDEEAEKITTVQAAVDYIQNKMDDGKIKLEK

SEQ ID NO: 150259 - DNA, 285 bp, Synechococcus sp. CC9311
  CDS (1)..(285): transl_table=11
atggggcaagcccgtaagatgcgacgtcacgtctgctcggccatgtcccaggaatcgatcctcgaaaaagtccgttcgatcgttacggagcaactcagcgtcgatgccggcgaagtcaaaccggagtccaactttcagaacgatctgggagctgactcactcgacaccgtcgagttggtgatggctcttgaagaagccttcgacatcgaaattcccgatgaagccgccgaagggattgccaccgttggcgatgccgtcaaatacatcgaagacaagcaagcctga

SEQ ID NO: 150260 - protein, 94 aa, Synechococcus sp. CC9311
MGQARKMRRHVCSAMSQESILEKVRSIVTEQLSVDAGEVKPESNFQNDLGADSLDTVELVMALEEAFDIEIPDEAAEGIATVGDAVKYIEDKQA

SEQ ID NO: 150261 - DNA, 240 bp, Alkalilimnicola ehrlichei MLHE-1
  CDS (1)..(240): transl_table=11
atgagcagcatcgaagaacgcgttaagaaaatcgtcgtcgagcagcttggggtcaaagaggaagaggtgagcggtgaggcctcctttgtcgacgatcttggcgctgactcgctggataccgtggaactggtcatggcgctcgaggaggagttcgagtgcgaaattcctgacgaagaagctgagaagatcaccaccgttcaacaggcggtcgactacatcaacaagcatctgggctcctaa

SEQ ID NO: 150262 - protein, 79 aa, Alkalilimnicola ehrlichei MLHE-1
MSSIEERVKKIVVEQLGVKEEEVSGEASFVDDLGADSLDTVELVMALEEEFECEIPDEEAEKITTVQQAVDYINKHLGS

SEQ ID NO: 150263 - DNA, 234 bp, Hyphomonas neptunium ATCC 15444
  CDS (1)..(234): transl_table=11
atgtctgacgtttttgaacgtgtgaagaaaatcgtagtcgagaacctcgacgtggaagcagacaaggttgttgagagcgcaagcttcatcgacgacctcggtgcggactcgctggacctcgtcgaactcgtgatggctttcgaagaagagtttaacatcgagatccctgatgacgtgcaagagtcgatccgttcggtcggtgacgccgtctcgcacatcaaggcccacgtctaa

SEQ ID NO: 150264 - protein, 77 aa, Hyphomonas neptunium ATCC 15444
MSDVFERVKKIVVENLDVEADKVVESASFIDDLGADSLDLVELVMAFEEEFNIEIPDDVQESIRSVGDAVSHIKAHV

SEQ ID NO: 150265 - DNA, 243 bp, Pediococcus pentosaceus ATCC 25745
  CDS (1)..(243): transl_table=11
ttgtcaaaagaagaaatttttaataaaattgctgaaattttagcagatcggtttgaattaaaaaccgaacaaattaccaatacactaaactttaaagaagatttaaatgctgactcaattgatattgttgagttcgtgttagagttagaagatacttttggagctgaaattactgatgaagctgctgagaacctagttactgttggggatgcagttgattatattagtgaacatcaggcttaa

SEQ ID NO: 150266 - protein, 80 aa, Pediococcus pentosaceus ATCC 25745
MSKEEIFNKIAEILADRFELKTEQITNTLNFKEDLNADSIDIVEFVLELEDTFGAEITDEAAENLVTVGDAVDYISEHQA

SEQ ID NO: 150267 - DNA, 240 bp, Pediococcus pentosaceus ATCC 25745
  CDS (1)..(240): transl_table=11
atgactaaagaagaagtattcacaaaggtacaagcagtaatcgcagaacaattggaaaaagacgcagacaagatcactatggaaacaagtttttcagaagacttggacgctgatagcttagacatttttgaagttgttgacaagttagaagatgaatttgatatcgatattgatacagacgaaaatatggatactgttggcaagttagttgattacgttagcgaaaacatcgataagtaa

SEQ ID NO: 150268 - protein, 79 aa, Pediococcus pentosaceus ATCC 25745
MTKEEVFTKVQAVIAEQLEKDADKITMETSFSEDLDADSLDIFEVVDKLEDEFDIDIDTDENMDTVGKLVDYVSENIDK

SEQ ID NO: 150269 - DNA, 255 bp, Oenococcus oeni PSU-1
  CDS (1)..(255): transl_table=11
atgaataaagatgaaattgctgctcaactagcagatgaagtttctaaacgctttggtttatcaaaatcaaaaattaccccggatttggattttacaaaggatgtcaacgccgattcaatcgattttgttgaattggtgatggaattagaagataaatatgatattgaaatttccgatgacgatgctgccaagctgattactttccaatcgactgtcgactatctctatgatcatgcgagtaaaaaagcttcatga

SEQ ID NO: 150270 - protein, 84 aa, Oenococcus oeni PSU-1
MNKDEIAAQLADEVSKRFGLSKSKITPDLDFTKDVNADSIDFVELVMELEDKYDIEISDDDAAKLITFQSTVDYLYDHASKKAS

SEQ ID NO: 150271 - DNA, 249 bp, Leuconostoc mesenteroides subsp. mesenteroides ATCC 8293
  CDS (1)..(249): transl_table=11
atggcaatggaaaaagaagcaatttataatatgatggcggatgaaattgcagaacgatttaatgtgaaaagagataccattacgccggatttgaattttttgacagatatcgatgcggattctatcgactttgttgagctggtattagaagtagaagatatgtttaatgtcgaaatttctgatgatgatgctgaaaatttggttacgttgcaacagacagtcgactacattgttgaacaccaaaattaa

SEQ ID NO: 150272 - protein, 82 aa, Leuconostoc mesenteroides subsp. mesenteroides ATCC 8293
MAMEKEAIYNMMADEIAERFNVKRDTITPDLNFLTDIDADSIDFVELVLEVEDMFNVEISDDDAENLVTLQQTVDYIVEHQN

SEQ ID NO: 150273 - DNA, 255 bp, Solibacter usitatus Ellin6076
  CDS (1)..(255): transl_table=11
ttgatccagcgcgttttgaaggtcattgccacttccaaacgcatacccctcgaaaccgtgacgatcgatagcgatttccagcagttgggaatcgactcgatggatgccgtcgagatcctgtttgcgctcgagaatgaattcgacatcagtattcccgacgacgaagtgcgctctgtccgcaacgtacgcgatatgtgcaccggagtagataagctggtggccgccaaggcgtccggcagtcaggccggcgagtaa

SEQ ID NO: 150274 - protein, 84 aa, Solibacter usitatus Ellin6076
MIQRVLKVIATSKRIPLETVTIDSDFQQLGIDSMDAVEILFALENEFDISIPDDEVRSVRNVRDMCTGVDKLVAAKASGSQAGE

SEQ ID NO: 150275 - DNA, 330 bp, Solibacter usitatus Ellin6076
  CDS (1)..(330): transl_table=11
atggggtttcgggcgggaacgcatgcgacttgcggaatctccgcgaaggtagctaaaatcaacgcgttcacaaaaatcccaggaggaattatggcagttgagcagaaggtgaagcagattattgtcgagcaactgggcgtagatgagagccaggttgatagcaacgcgtctttcgttgacgacctgggcgccgattcgctcgacatcgtcgagctcgtgatggcttttgaagaagccttcgaactcgagatcccagatgaggacgccgagaaaatcactacggtgaaagacgcggtggattacatcgaaggcaagaccaccaagaaatag

SEQ ID NO: 150276 - protein, 109 aa, Solibacter usitatus Ellin6076
MGFRAGTHATCGISAKVAKINAFTKIPGGIMAVEQKVKQIIVEQLGVDESQVDSNASFVDDLGADSLDIVELVMAFEEAFELEIPDEDAEKITTVKDAVDYIEGKTTKK

SEQ ID NO: 150277 - DNA, 237 bp, Magnetococcus sp. MC-1
  CDS (1)..(237): transl_table=11
atgagtgatatcgcggaacgtgtcaaaaagatcgttgcagaacagatgggcgttgacctggacaaagttaccgacgacgccaagtttgtcgaagacctgggtgcagactccctggacaacgtggagttggtcatggctttcgaggaagagttcggctgcgagatcccagacgaaaccgccgagaagatcacctcggtgagtgacgccatcaagtacattggcgaaaacatggaataa

SEQ ID NO: 150278 - protein, 78 aa, Magnetococcus sp. MC-1
MSDIAERVKKIVAEQMGVDLDKVTDDAKFVEDLGADSLDNVELVMAFEEEFGCEIPDETAEKITSVSDAIKYIGENME

SEQ ID NO: 150279 - DNA, 240 bp, Azoarcus sp. BH72
  CDS (1)..(240): transl_table=11
atggagaacatcgaacagcgcgtcaagaagatcgtcgctgagcaacttggcgtgaacgaatcggagatcaagaacgagtcttcgttcgtggacgatctgggcgcggattcgctggacaccgtggaactggttatggcgctggaagaagagttcgagtgcgagatcccggacgaagaggccgagaagatcaccaccgtccagcaggcgatcgactacgtcaacgcccatctgaagaagtaa

SEQ ID NO: 150280 - protein, 79 aa, Azoarcus sp. BH72
MENIEQRVKKIVAEQLGVNESEIKNESSFVDDLGADSLDTVELVMALEEEFECEIPDEEAEKITTVQQAIDYVNAHLKK

SEQ ID NO: 150281 - DNA, 237 bp, Magnetospirillum magnetotacticum MS-1
  CDS (1)..(237): transl_table=11
atgagcgatatcgccgagcgcgtgaagaagatcgtcgtcgagcacctgggcgtcgagcctgagaaggtcaccgaggcctccaacttcatcgacgatcttggcgccgacagcctcgacaccgtcgagctggtgatggcgttcgaggaggagttcaacgtcgagatcccggacgacgcggccgagaccatccagacggtcggcgacgcgatcaagttcctggagaagaactccgcctaa

SEQ ID NO: 150282 - protein, 78 aa, Magnetospirillum magnetotacticum MS-1
MSDIAERVKKIVVEHLGVEPEKVTEASNFIDDLGADSLDTVELVMAFEEEFNVEIPDDAAETIQTVGDAIKFLEKNSA

SEQ ID NO: 150283 - DNA, 255 bp, Nostoc punctiforme PCC 73102
  CDS (1)..(255): transl_table=11
atgagccaaacggaactttttgaaaaggtcaagaaaatcgtcatcgaacaactgagtgttgaagatgcttccaaaatcactccacaagctaagtttatggaagatttaggagctgattccctggatactgttgaactcgtgatggctttggaagaagaatttgatatcgaaattcccgacgaagctgccgagcagattgtatcggttcaagacgcagtagattacatcaataacaaagttgctgcatcagcttaa

SEQ ID NO: 150284 - protein, 84 aa, Nostoc punctiforme PCC 73102
MSQTELFEKVKKIVIEQLSVEDASKITPQAKFMEDLGADSLDTVELVMALEEEFDIEIPDEAAEQIVSVQDAVDYINNKVAASA

SEQ ID NO: 150285 - DNA, 246 bp, Rickettsia sibirica 246
  CDS (1)..(246): transl_table=11
atgagtacaacggataagatcgaacagaaagttattgaaatggttgctgaaaagctcaataaagataaatcgataataactacggattcaagatttatagaagatttgaaagctgatagccttgataccgtagagttaatgatggcaatagaagttgaatacggtattgatattcctgatgatgaagccactaaaattaaaaccgtatccgatgttataaaatatatcaaagaacgccaatcttaa

SEQ ID NO: 150286 - protein, 81 aa, Rickettsia sibirica 246
MSTTDKIEQKVIEMVAEKLNKDKSIITTDSRFIEDLKADSLDTVELMMAIEVEYGIDIPDDEATKIKTVSDVIKYIKERQS

SEQ ID NO: 150287 - DNA, 210 bp, Fusobacterium nucleatum subsp. vincentii ATCC 49256
  CDS (1)..(210): transl_table=11
atgttagataaagtaaaagaaattatagttgaacaattaggagtggatgctgatcaaataaaacctgaatcaaatttcgtagatgatttaggagcagattctttagatactgttgaattaataatgtcttttgaagaagaatttggagtagaaatcccagatacagaagcagaaaaaatcaaaactgtacaagatgttataactacatag

SEQ ID NO: 150288 - protein, 69 aa, Fusobacterium nucleatum subsp. vincentii ATCC 49256
MLDKVKEIIVEQLGVDADQIKPESNFVDDLGADSLDTVELIMSFEEEFGVEIPDTEAEKIKTVQDVITT

SEQ ID NO: 150289 - DNA, 261 bp, Rickettsia rickettsii
  CDS (1)..(261): transl_table=11
atggagttcaaaattatgagtacaacggataagatcgaacagaaagttattgaaatggttgctgaaaagctaaataaagataaatcgataataactacggattcaagatttatagaagatttgaaagctgatagccttgataccgtagagttaatgatggcaatagaagttgaatacggtattgatatccctgatgatgaagccactaaaattaaaaccgtatccgatgttatacaatatatcaaagaacgccaatcttaa

SEQ ID NO: 150290 - protein, 86 aa, Rickettsia rickettsii
MEFKIMSTTDKIEQKVIEMVAEKLNKDKSIITTDSRFIEDLKADSLDTVELMMAIEVEYGIDIPDDEATKIKTVSDVIQYIKERQS

SEQ ID NO: 150291 - DNA, 282 bp, Haemophilus influenzae R2846
  CDS (1)..(282): transl_table=11
ttgacaagaagtgatgatcgtgcgattattcacgtactactggttggaaaaatgagtaatgaagaacgcgtgaaaaaaatcatcgttgaacaattaggtgttaaagaagaagatgtgaaacctgaagcttcttttgttgaagatttaggtgcagattcattagacacagttgaattagtaatggctttagaagaagaatttgatattgaaattcctgatgaagaagctgaaaaaattaccactgttcaatctgcgattgattacgtgcaaaacaatcaataa

SEQ ID NO: 150292 - protein, 93 aa, Haemophilus influenzae R2846
MTRSDDRAIIHVLLVGKMSNEERVKKIIVEQLGVKEEDVKPEASFVEDLGADSLDTVELVMALEEEFDIEIPDEEAEKITTVQSAIDYVQNNQ

SEQ ID NO: 150293 - DNA, 261 bp, Rickettsia akari str. Hartford
  CDS (1)..(261): transl_table=11
atggagttcaaaattatgagtataacggacaagatcgaacagaaagttattgaaatggttgctgaaaagctaaataaagataaatcgataataactacgaattcaagatttatagaagatttggcagccgatagccttgataccgtagagttaatgatggcaatagaagttgagtacggtattgagatccctgatgatgaagccactaaaattaaaaccgtatccgatgttataacatatatcaaagaacgccaatcttaa

SEQ ID NO: 150294 - protein, 86 aa, Rickettsia akari str. Hartford
MEFKIMSITDKIEQKVIEMVAEKLNKDKSIITTNSRFIEDLAADSLDTVELMMAIEVEYGIEIPDDEATKIKTVSDVITYIKERQS

SEQ ID NO: 150295 - DNA, 240 bp, Crocosphaera watsonii WH 8501
  CDS (1)..(240): transl_table=11
atgaaccaacaaatatttgaagaagtacaaaaaatcgtcgtcgaacaacttgaagtcgaagcagacaaagtgactaaagatgccaactttgccaatgacttaggggctgattctctagatacagtagaattagtaatggctctagaagacaagtttgagatcgaaattcctgacgaagcagccgaaaacattgctacagtcgaagctgctgttaagtacatagaagaaaaacaggcttag

SEQ ID NO: 150296 - protein, 79 aa, Crocosphaera watsonii WH 8501
MNQQIFEEVQKIVVEQLEVEADKVTKDANFANDLGADSLDTVELVMALEDKFEIEIPDEAAENIATVEAAVKYIEEKQA

SEQ ID NO: 150297 - DNA, 240 bp, Exiguobacterium sibiricum 255-15
  CDS (1)..(240): transl_table=11
atgacaaaagaacaaattttagtagacgtgcaagaagcaatcgcagagaagttagggaaagaacagagtgaaatcacactcgacaaatcgtttaaagacgatctcggagcagattcacttgaagtcatggaactcgtcatggatctcgaagataaattcgaaatcacaatcgaagatgaccaagcagaaaacttaaaaacagtcggcgatgtcgttagctacatcgaaacacaagtctaa

SEQ ID NO: 150298 - protein, 79 aa, Exiguobacterium sibiricum 255-15
MTKEQILVDVQEAIAEKLGKEQSEITLDKSFKDDLGADSLEVMELVMDLEDKFEITIEDDQAENLKTVGDVVSYIETQV

SEQ ID NO: 150299 - DNA, 243 bp, Prosthecochloris aestuarii DSM 271
  CDS (1)..(243): transl_table=11
atgaacgtagaagaaatcaaagacaaagtgtttgacattatcgtcagcaaaatgggcgtcaacaaagatcagatcaaaaccgaatccaagttcgcagacgatctcggcgcagactctcttgataccgtcgagctgattatggagcttgaaaacgaatttgatgttcagattcctgatgaagacgctgaaaaaatcagcaacgttcagcaggcaatcgactacatcgtcaatgcaaaaaagtaa

SEQ ID NO: 150300 - protein, 80 aa, Prosthecochloris aestuarii DSM 271
MNVEEIKDKVFDIIVSKMGVNKDQIKTESKFADDLGADSLDTVELIMELENEFDVQIPDEDAEKISNVQQAIDYIVNAKK

SEQ ID NO: 150301 - DNA, 234 bp, Croceibacter atlanticus HTCC2559
  CDS (1)..(234): transl_table=11
atgtcagacattgcatcaagagtaaaagcaataatcgtagacaaattaggtgttgacgaaaacgaagtagttaacgacgcaagcttcacaaacgatttaggagcagattcattggacacagtggaattaattatggaattcgaaaaagaattcgatattcagattccagacgaccaagctgaaaacattgcaacagttggtcaagcaatttcttatatagaagaggctaaataa

SEQ ID NO: 150302 - protein, 77 aa, Croceibacter atlanticus HTCC2559
MSDIASRVKAIIVDKLGVDENEVVNDASFTNDLGADSLDTVELIMEFEKEFDIQIPDDQAENIATVGQAISYIEEAK

SEQ ID NO: 150303 - DNA, 234 bp, Roseovarius nubinhibens ISM
  CDS (1)..(234): transl_table=11
atgagcgatatcgcagaccgcgtgaaaaagatcgttgtggaacatcttggcgtcgaagaagacaaggtcactgaaagcgcctccttcatcgacgatctgggcgcagacagcctcgacacggtcgaactggtcatggccttcgaagaagagttcggcatcgagatccccgatgacgccgcagagaacatccagaccttcggcgacgcggtgaaattcatcaacgaggcctcctaa

SEQ ID NO: 150304 - protein, 77 aa, Roseovarius nubinhibens ISM
MSDIADRVKKIVVEHLGVEEDKVTESASFIDDLGADSLDTVELVMAFEEEFGIEIPDDAAENIQTFGDAVKFINEAS

SEQ ID NO: 150305 - DNA, 234 bp, Oceanicola batsensis HTCC2597
  CDS (1)..(234): transl_table=11
atgagcgatgtcgcggaacgcgtgaagaagatcgtcgtcgagcatctgggcgtggaagaagacaaggtgaccgagaacgcctcgttcatcgacgacctgggtgcggacagcctcgatacggtcgagctggtgatggccttcgaggaagagttcggcatcgagatccccgacgacgccgccgagaacatccagaccttcggtgacgccgtgaagttcatcaaggacgctgcctga

SEQ ID NO: 150306 - protein, 77 aa, Oceanicola batsensis HTCC2597
MSDVAERVKKIVVEHLGVEEDKVTENASFIDDLGADSLDTVELVMAFEEEFGIEIPDDAAENIQTFGDAVKFIKDAA

SEQ ID NO: 150307 - DNA, 243 bp, Prochlorococcus marinus str. MIT 9211
  CDS (1)..(243): transl_table=11
atgtctcaggacgcaaccctcgaaaaagttcgttctattgtttcagaacaactaagtgttgatgcaggcgaagtaaagcttgaatcaaatttccaaaatgaccttggcgcagactctctcgacactgttgagttagtaatggctctggaagaagcttttgacattgaaattccagatgaagctgctgaaggcatcgccacagttggagatgctgtcaagtacatagaagacaagcaaggttga

SEQ ID NO: 150308 - protein, 80 aa, Prochlorococcus marinus str. MIT 9211
MSQDATLEKVRSIVSEQLSVDAGEVKLESNFQNDLGADSLDTVELVMALEEAFDIEIPDEAAEGIATVGDAVKYIEDKQG

SEQ ID NO: 150309 - DNA, 237 bp, Erythrobacter sp. NAP1
  CDS (1)..(237): transl_table=11
atgagcgatactgccgaccgcgtgcagaaaattgtcgtcgaacatctcggcgtcgaaggtgacaaggtcactcaggatgcaagcttcatcgatgatcttggcgcagacagcctcgacatcgtcgagcttgtgatggctttcgaagaagaattcggcgtcgaaattcccgacgatgcagccgagaagatctcgaccgttggcgatgccacgaaattcatcgaggaaaacaagggctaa

SEQ ID NO: 150310 - protein, 78 aa, Erythrobacter sp. NAP1
MSDTADRVQKIVVEHLGVEGDKVTQDASFIDDLGADSLDIVELVMAFEEEFGVEIPDDAAEKISTVGDATKFIEENKG

SEQ ID NO: 150311 - DNA, 243 bp, Erythrobacter sp. NAP1
  CDS (1)..(243): transl_table=11
atgaccgaagccgaagttgatgaacgcatccgcgcgctgatcgaaccctttaacaagaagggcgtgacgatcacgaatgacacgactttcgcaaacgatctggaattcgacagcctcacggtgatggacttcgtcgccgagatcgaggacgaattcgacatcatcatcagcatgaaccagcaggccgagatcgagacttacggccagctcgtcacagccgtgcacaagctgcaaggcagctaa

SEQ ID NO: 150312 - protein, 80 aa, Erythrobacter sp. NAP1
MTEAEVDERIRALIEPFNKKGVTITNDTTFANDLEFDSLTVMDFVAEIEDEFDIIISMNQQAEIETYGQLVTAVHKLQGS

SEQ ID NO: 150313 - DNA, 243 bp, Synechococcus sp. RS9917
  CDS (1)..(243): transl_table=11
atgtcccaggaagcgatcctcgaaaaagtccgttcgatcgtggcggagcagctcagcgttgatgccggcgacgtgaagccggaatccaatttccagaatgatctcggcgccgactcgctcgacaccgtcgagctggtgatggctctggaggaagccttcgacatcgaaatccccgacgaagccgctgaaggcatcgccaccgtgggtgacgcagttaagtacatcgaagacaagcaggcctga

SEQ ID NO: 150314 - protein, 80 aa, Synechococcus sp. RS9917
MSQEAILEKVRSIVAEQLSVDAGDVKPESNFQNDLGADSLDTVELVMALEEAFDIEIPDEAAEGIATVGDAVKYIEDKQA

SEQ ID NO: 150315 - DNA, 243 bp, Synechococcus sp. WH 5701
  CDS (1)..(243): transl_table=11
atgtcacaggaagcgatcttcgagaaagtccgttcgatcgttgccgagcagctcagcgtcgatgccgctgaagtgaagccagagtcgaacttccagaatgatctgggcgccgactcgctcgacacggtggaactggtcatggccctggaagaggccttcgacatcgagattcccgacgagtcggccgaaggcatcaccaccgtcggtgacgccgtcaagtacatcctggacaagcaggcctga

SEQ ID NO: 150316 - protein, 80 aa, Synechococcus sp. WH 5701
MSQEAIFEKVRSIVAEQLSVDAAEVKPESNFQNDLGADSLDTVELVMALEEAFDIEIPDESAEGITTVGDAVKYILDKQA

SEQ ID NO: 150317 - DNA, 243 bp, Synechococcus sp. WH 7805
  CDS (1)..(243): transl_table=11
atgtctcaggaagcgatcctcgaaaaagtccgttcgatcgtggcggagcagctcagcgtcgacgccggtgaagtgaagccggagtcgaatttccagaacgatctaggcgccgattcgctcgacaccgtcgagctggtgatggccctggaggaagccttcgacatcgaaattcccgacgaatccgccgaaggcatcgccaccgtgggcgacgccgttaagtacatcgaagacaagcaggcctga

SEQ ID NO: 150318 - protein, 80 aa, Synechococcus sp. WH 7805
MSQEAILEKVRSIVAEQLSVDAGEVKPESNFQNDLGADSLDTVELVMALEEAFDIEIPDESAEGIATVGDAVKYIEDKQA

SEQ ID NO: 150319 - DNA, 237 bp, Pseudoalteromonas tunicata D2
  CDS (1)..(237): transl_table=11
atgagcaacatccaagaacgcgttaagaaaatcatcattgagcaactaggtgttaaagaagaagaagttaaaaatgaatcttcttttgttgatgacttaggtgcagattctctagacactgttgaacttgtaatggctttagaagaagaatttgatactgagatcccagacgaagaagctgagaaaattactacagttcaagctgctatcgattacgtaactgcacacgcagagtaa

SEQ ID NO: 150320 - protein, 78 aa, Pseudoalteromonas tunicata D2
MSNIQERVKKIIIEQLGVKEEEVKNESSFVDDLGADSLDTVELVMALEEEFDTEIPDEEAEKITTVQAAIDYVTAHAE

SEQ ID NO: 150321 - DNA, 234 bp, Oceanospirillum sp. MED92
  CDS (1)..(234): transl_table=11
atgagcaacattgaagagcgcgtaaagaagatcatcgctgagcagctgggtgttaaagaagaagaagttactcaggaagcttcttttgttgaagatctgggcgcagactctctggacacagttgagctggtaatggcgctggaagaagaattcgaaactgaaattccagacgaagaagctgaaaagatcactacagttcagctggctatcgattacatcaacgctcaccagtaa

SEQ ID NO: 150322 - protein, 77 aa, Oceanospirillum sp. MED92
MSNIEERVKKIIAEQLGVKEEEVTQEASFVEDLGADSLDTVELVMALEEEFETEIPDEEAEKITTVQLAIDYINAHQ

SEQ ID NO: 150323 - DNA, 234 bp, delta proteobacterium MLMS-1
  CDS (1)..(234): transl_table=11
atggcggtagagcaaaaactgattgatatcattgccgagcagttgagcgtggacaaggataaggtggtgcccaaggcctccttcatcgacgacctgggggccgactccctggatctggtggagctgatcatggccatggaagaggcctttgatatcgagatcgccgatgaggtggccgagaagatcaccaccgtgcaggacgccatcgaccatatcaagcagatttccgagtaa

SEQ ID NO: 150324 - protein, 77 aa, delta proteobacterium MLMS-1
MAVEQKLIDIIAEQLSVDKDKVVPKASFIDDLGADSLDLVELIMAMEEAFDIEIADEVAEKITTVQDAIDHIKQISE

SEQ ID NO: 150325 - DNA, 240 bp, Oceanobacter sp. RED65
  CDS (1)..(240): transl_table=11
atgtccgatatttataatcaagtagtagaagttgtcgtagagcaactcggcgtagaagtagaccaagtgaaaatggaatcacatttcattgaagatttgggtgcagattcattggatactgttgagttgttgatggctttagaagaaaaattcgattgcgaaatcgaagaagacaaagctgaaaaattaacgactgtaaaagatattgtcgagtttgttcagtcgctagagactgcataa

SEQ ID NO: 150326 - protein, 79 aa, Oceanobacter sp. RED65
MSDIYNQVVEVVVEQLGVEVDQVKMESHFIEDLGADSLDTVELLMALEEKFDCEIEEDKAEKLTTVKDIVEFVQSLETA

SEQ ID NO: 150327 - DNA, 234 bp, Oceanobacter sp. RED65
  CDS (1)..(234): transl_table=11
atgagcagcattgaagaacgcgtaaagaaagtggtttgtgaacaacttggcgtaaaagaagaagaggccaagggtactgcacgcttcgttgaagatcttggagccgattctctagatacagttgagctagtaatggctctagaagaagaattcgaaacagaaattcctgatgaggatgctgaaaagctaaccacagttcaggaagccattgactatatcatcgctcacctttaa

SEQ ID NO: 150328 - protein, 77 aa, Oceanobacter sp. RED65
MSSIEERVKKVVCEQLGVKEEEAKGTARFVEDLGADSLDTVELVMALEEEFETEIPDEDAEKLTTVQEAIDYIIAHL

SEQ ID NO: 150329 - DNA, 237 bp, marine gamma proteobacterium HTCC2143
  CDS (1)..(237): transl_table=11
atgagcagcattgaagaacgcgttaaaaagattgtcgcagagcagttaggtgttaaagaagatgaagtacaaacctctgcatcatttgtagaagatttgggcgctgattctctggatactgttgaattagttatggctcttgaagaggagtttgaaaccgaaattcccgatgaggaagctgagcaaatcaccaccgtgcagttggctatcgactatatcaacaaaaacctgggatag

SEQ ID NO: 150330 - protein, 78 aa, marine gamma proteobacterium HTCC2143
MSSIEERVKKIVAEQLGVKEDEVQTSASFVEDLGADSLDTVELVMALEEEFETEIPDEEAEQITTVQLAIDYINKNLG

SEQ ID NO: 150331 - DNA, 237 bp, marine gamma proteobacterium HTCC2080
  CDS (1)..(237): transl_table=11
atgagcagcattgaagatcgcgtaaagaaaatcgttgccgagcagctgggcgttaaagaagacgaagtgcgtactgaggcgtcttttgtcgacgacttgggcgcagattctctagacaccgtggagctcgttatggcccttgaggaggagtttgaaaccgaaattcccgatgaagaagccgagaaaatcaccacagtgcagttggccatcaactacattaatgaaaaccttgcctaa

SEQ ID NO: 150332 - protein, 78 aa, marine gamma proteobacterium HTCC2080
MSSIEDRVKKIVAEQLGVKEDEVRTEASFVDDLGADSLDTVELVMALEEEFETEIPDEEAEKITTVQLAINYINENLA

SEQ ID NO: 150333 - DNA, 231 bp, Candidatus Desulfococcus oleovorans Hxd3
  CDS (1)..(231): transl_table=11
atgtccattgaagataaggttaaacgcattctggccgagcggcttgaggtcgatcccagtgaaatccggccggatgccgagtttatcagcgacctgggcgccgattccctggatattgtggagctgctcatgtccctggaggacgagtttgatatcgagatatccgacgatgaggccgagcagatcatgacggtgaaggacgcggtggagtttatcacaaaacggctgtag

SEQ ID NO: 150334 - protein, 76 aa, Candidatus Desulfococcus oleovorans Hxd3
MSIEDKVKRILAERLEVDPSEIRPDAEFISDLGADSLDIVELLMSLEDEFDIEISDDEAEQIMTVKDAVEFITKRL

SEQ ID NO: 150335 - DNA, 237 bp, Pseudomonas putida GB-1
  CDS (1)..(237): transl_table=11
atgagcaccatcgaagaacgcgtcaagaaaatcgtcgccgagcaactgggcgtgaaggaagatgaagtgaccaacgagaagtccttcgtcgatgacctgggtgccgattcgcttgacaccgttgagctggtgatggctctggaagaggaattcgagaccgaaatccctgacgaagaagccgagaaaatcactaccgttcaagccgctatcgactacgtcaacagccacaaggcctaa

SEQ ID NO: 150336 - protein, 78 aa, Pseudomonas putida GB-1
MSTIEERVKKIVAEQLGVKEDEVTNEKSFVDDLGADSLDTVELVMALEEEFETEIPDEEAEKITTVQAAIDYVNSHKA

SEQ ID NO: 150337 - DNA, 261 bp, Marinobacter sp. ELB17
  CDS (1)..(261): transl_table=11
ttggttgacacacaaagtgaggacattatgagtacagttgaagagcgcgttaagaagattgtttgtgagcagttgggcgttaaagagtccgaagttcagaactcatcttcttttgttgaagatttgggcgctgactcactggacaccgttgagctggttatggcgttggaagaggaattcgaaactgaaattcctgacgaagaagccgaaaagctggccagcgttcagaatgccatcgactacatcgtatcgcatacctga

SEQ ID NO: 150338 - protein, 86 aa, Marinobacter sp. ELB17
MVDTQSEDIMSTVEERVKKIVCEQLGVKESEVQNSSSFVEDLGADSLDTVELVMALEEEFETEIPDEEAEKLASVQNAIDYIVSHT

SEQ ID NO: 150339 - DNA, 234 bp, Bacillus sp. SG-1
  CDS (1)..(234): transl_table=11
atggcagaagtactagatcgcgtaacaaaaattatcgttgaccgccttggagttgacgagtctcaagtaactcttgaagcttctttcaaagaagacttaggggctgattcactagatgtagtagaattggttatggaacttgaagatgagttcgatatggaaatttctgatgatgatgcagaaaaaatcgcaacagtcggtgacgctgtgaactacataaataacaaaggctaa

SEQ ID NO: 150340 - protein, 77 aa, Bacillus sp. SG-1
MAEVLDRVTKIIVDRLGVDESQVTLEASFKEDLGADSLDVVELVMELEDEFDMEISDDDAEKIATVGDAVNYINNKG

SEQ ID NO: 150341 - DNA, 237 bp, Erythrobacter sp. SD-21
  CDS (1)..(237): transl_table=11
atgagcgatactgccgaccgcgtgcagaagattgtcgtcgagcatctcggcgtcgaagcagacaaggtcacccaggaagccagcttcatcgatgacctgggcgcagacagcctcgacatcgtcgagctcgtgatggccttcgaagaagaattcggcgtggaaatccccgacgatgcggctgagaagatcaccaccgtcggcgacgcgactaagtacattgaagagcataagggctaa

SEQ ID NO: 150342 - protein, 78 aa, Erythrobacter sp. SD-21
MSDTADRVQKIVVEHLGVEADKVTQEASFIDDLGADSLDIVELVMAFEEEFGVEIPDDAAEKITTVGDATKYIEEHKG

SEQ ID NO: 150343 - DNA, 234 bp, unidentified eubacterium SCB49
  CDS (1)..(234): transl_table=11
atgtcagacattgcatcaagagtaaaagcaattatcgttgataaattaggtgtagacgagaacgaagttgtaaacgaagctagcttcacaaacgacctaggagcagactcactagatacggtagagcttattatggaatttgaaaaagaatttgatattcaaataccagacgatcaagctgaaaacattgcgaccgtaggtcaagcagtttcttatattgaagagaacaaataa

SEQ ID NO: 150344 - protein, 77 aa, unidentified eubacterium SCB49
MSDIASRVKAIIVDKLGVDENEVVNEASFTNDLGADSLDTVELIMEFEKEFDIQIPDDQAENIATVGQAVSYIEENK

SEQ ID NO: 150345 - DNA, 234 bp, Shewanella hanedai
  CDS (1)..(234): transl_table=11
atgagcaacatcgaagaacgtgtaaagaaaatcattattgagcaactaggtgttaaagaggaagacgttaagtctgctgcatctttcgttgacgacttgggtgcagattctctggacacggttgagttggttatggctctagaagaagagtttgataccgagatccctgatgaagaagctgaaaagatcactactgttcaagcagcagttgattacgtttcaaagaatcagtaa

SEQ ID NO: 150346 - protein, 77 aa, Shewanella hanedai
MSNIEERVKKIIIEQLGVKEEDVKSAASFVDDLGADSLDTVELVMALEEEFDTEIPDEEAEKITTVQAAVDYVSKNQ

SEQ ID NO: 150347 - DNA, 270 bp, Medicago truncatula
  CDS (1)..(270)
atgtcttcacacgacgatcatatcaccaaagaagaagtcgtcgagcgagtcctctctgtcatcaaagatttccccaaagttgatccttcaaaggtgactccagaagtgcattttcagaaggatttgggtttggacagcttagacaacgtcgaaattgtaatggcactagaagaggagttcaagctggaaatcccagacaaggaagctgataaaattgactcttgtcatcttgctattgagtatatttctaaccaccccatgtctagttaa

SEQ ID NO: 150348 - protein, 89 aa, Medicago truncatula
MSSHDDHITKEEVVERVLSVIKDFPKVDPSKVTPEVHFQKDLGLDSLDNVEIVMALEEEFKLEIPDKEADKIDSCHLAIEYISNHPMSS

SEQ ID NO: 150349 - DNA, 234 bp, Magnetospirillum gryphiswaldense
  CDS (1)..(234): transl_table=11
atgagcgacgtcgccgagcgggttaagaagattgtcgttgagcatctgggcgttgaagaagccaaggtgaccgagaacgccagcttcatcgatgacctgggcgccgacagcctcgacaccgtcgagctggtcatggcctttgaagaagaattcggctgcgaaatccccgatgacgccgctgaaaagattttgaccgtcaaggacgcgatcgacttcatctcgaaggccgcgtaa

SEQ ID NO: 150350 - protein, 77 aa, Magnetospirillum gryphiswaldense
MSDVAERVKKIVVEHLGVEEAKVTENASFIDDLGADSLDTVELVMAFEEEFGCEIPDDAAEKILTVKDAIDFISKAA

SEQ ID NO: 150351 - DNA, 351 bp, Ostreococcus tauri
  CDS (1)..(351)
atgcttcgtcgaggggcgcttcgcgcgatcgcgcgcgcgagcgcgacgcgcgcgccgaccgcgagtgaggcgttgacgttgcgggcgtacggcgccgggtttttaaataaggatgatgtcaccgatcgtgtggtgcgcgtggtgaagaattttgcaaaggtggacgcggccaaggtgagcgccacgagcgcgttcgcgagcgatctgggactcgattcgctcgacgtcgtggaggtggtgatggcgatggaggaggagttcgcggtggagattcccgacgctgaggcggataagattcagagcgtgcccgaggcggtggcgtacctcgccgcgaatccgaacgcaaagtga

SEQ ID NO: 150352 - protein, 116 aa, Ostreococcus tauri
MLRRGALRAIARASATRAPTASEALTLRAYGAGFLNKDDVTDRVVRVVKNFAKVDAAKVSATSAFASDLGLDSLDVVEVVMAMEEEFAVEIPDAEADKIQSVPEAVAYLAANPNAK

SEQ ID NO: 150353 - DNA, 273 bp, Onchocerca volvulus endobacterium
  CDS (1)..(273): transl_table=11
atggatagcgaactagcaaaaagtactagagaagacatagaagaaaaagtgaaaaagattgtgttagaacacattagtaaagatgtagagaagtttgatagttcttcaaagctttcggagcatggagcagatagtttagatgcagttgagataattatggcagcagaagaagagtttggaatagaaattcctgatgaagatgctcaaataatggaaactatggaacaaatagttgattatgtagtaaaaaaacaaatagttagtggtaaatga

SEQ ID NO: 150354 - protein, 90 aa, Onchocerca volvulus endobacterium
MDSELAKSTREDIEEKVKKIVLEHISKDVEKFDSSSKLSEHGADSLDAVEIIMAAEEEFGIEIPDEDAQIMETMEQIVDYVVKKQIVSGK

SEQ ID NO: 150355 - DNA, 393 bp, Medicago truncatula
  CDS (1)..(393)
atggcggcgagaagaaccggtttacctctgatcaactacttgagagtgcaggttgattctcgtccactgaatcaccaatctcctttccgtcttattcccaattttttccttcgtcgcttcagcgaagaggttaggggtacgtttctcgacaaatctgaggtcacagatcgcgtcgtttcttgcgtcaaaaacttccagaaagttgatccttctaaggttaccccaagtgctcatttccagaatgaccttggattggatagtttggatgctgtagagattgtgatggctcttgaggaagagtttgggtttgagattcctgataatgaagcagacaagatcaactctgttaatcttgcaattgacttcattgcatctcatcctcaggcaaagtag

SEQ ID NO: 150356 - protein, 130 aa, Medicago truncatula
MAARRTGLPLINYLRVQVDSRPLNHQSPFRLIPNFFLRRFSEEVRGTFLDKSEVTDRVVSCVKNFQKVDPSKVTPSAHFQNDLGLDSLDAVEIVMALEEEFGFEIPDNEADKINSVNLAIDFIASHPQAK

SEQ ID NO: 150357 - DNA, 279 bp, Brassica oleracea
  CDS (1)..(279)
atgaatttcacatcaggaggaggccaagatcaggttttgagtaaggttattgaactggttaagaagtacgacacgaccagtgcctctaaggttactgaaacggctgactttaagaaagatttgtcgctggacagtttagatagggtggagatagtgatggctattgaagaagagttctccgttgagatccctgatgaaaaagctgataagcttacttgttgtgctgatattgcaagcttcatagtctctgaaactcaatccaaggcgccagagtcctga

SEQ ID NO: 150358 - protein, 92 aa, Brassica oleracea
MNFTSGGGQDQVLSKVIELVKKYDTTSASKVTETADFKKDLSLDSLDRVEIVMAIEEEFSVEIPDEKADKLTCCADIASFIVSETQSKAPES

SEQ ID NO: 150359 - DNA, 411 bp, Gossypium hirsutum
  CDS (1)..(411)
atggcttctattgctggttcatccatctccatgcaaccttgcccctttgctaaaggcagtgtttccgggttgaaattgggttcatttatgaaccagggaagaagcaccctctcatttacgatgcgtccaatgcctgctcgcttgcagatctgctgtgctgccaaacaagagaccgtggataaggtatgtgaagtagtaaagagacaattacctttacacaatgacaaaccaatcaccggtgaatcaacatttcttgatcttggagctgattctcttgatacggttgagattgtgttgggacttgaggaagaattcggaatcacggtggaagaggacaacgcacaatccatcacaactgttcaagatgctgcagaacttcttgagaagctgtgcagtgagaaaagtgcctag

SEQ ID NO: 150360 - protein, 136 aa, Gossypium hirsutum
MASIAGSSISMQPCPFAKGSVSGLKLGSFMNQGRSTLSFTMRPMPARLQICCAAKQETVDKVCEVVKRQLPLHNDKPITGESTFLDLGADSLDTVEIVLGLEEEFGITVEEDNAQSITTVQDAAELLEKLCSEKSA

SEQ ID NO: 150361 - DNA, 387 bp, Solanum tuberosum
  CDS (1)..(387)
atggcggcgaggatcgcattgctaaagcacctgagagtggaagctcgcccagtgcagcttcgaaaccctaggctcatcggaggttcagtcagtcagctttacaaacgtcatttctcggaggaagtaaggggatcgtttctcgacaaggatgaagttagggatcgtgttatcaacgtcgtcaaaaactttcagaaagttgatccttgcaaggttgtcccaaatgctcacttccaaaatgatctcggcttagatagtttagacaccgtggaagttgtgatggcccttgaagaagaatttaggtttgagattccagacaatgaagccgacaagatcaactcaataaatttagcagttgatttcattgcatctcaccctcaggcaaaataa

SEQ ID NO: 150362 - protein, 128 aa, Solanum tuberosum
MAARIALLKHLRVEARPVQLRNPRLIGGSVSQLYKRHFSEEVRGSFLDKDEVRDRVINVVKNFQKVDPCKVVPNAHFQNDLGLDSLDTVEVVMALEEEFRFEIPDNEADKINSINLAVDFIASHPQAK

SEQ ID NO: 150363 - DNA, 414 bp, Coriandrum sativum
  CDS (1)..(414)
atggctgctttcactgcttcttctgtttcattcacccctctttcaatctcccttaaccaaaccaaggggtttgcccgcggttcagtttccattcctgctaaggcgaagtcctttggtgcacttacgctgcgtaatgcaccccttcgcttcagagtgtcatgcgctgctaagcctgagacagcggagaaggtgtgtgagattgtgaagaaacaacttgcactcccccctactactgaagtttcgggagactcaaaatttgcagcacttggagctgattctctcgatacggttgagattgtgatgggactagaggaggagtttgggatcagcgttgaggaagaaagtgctcaggccattgccactgttcaagatgcagcggatctgattgagaagctttgcgagaagaaagagtaa

SEQ ID NO: 150364 - protein, 137 aa, Coriandrum sativum
MAAFTASSVSFTPLSISLNQTKGFARGSVSIPAKAKSFGALTLRNAPLRFRVSCAAKPETAEKVCEIVKKQLALPPTTEVSGDSKFAALGADSLDTVEIVMGLEEEFGISVEEESAQAIATVQDAADLIEKLCEKKE

SEQ ID NO: 150365 - DNA, 234 bp, Vibrio anguillarum
  CDS (1)..(234): transl_table=11
atgagcaacatcgaagaacgcgtaaagaaaatcattgttgaacagctaggtgtagacgaagcagaagtaaagaatgaagcttctttcgtagaagatctaggtgctgattctctagatacagttgagctagtaatggctctagaagaagaattcgatactgaaattccagatgaagaagctgagaagatcactactgttcaagctgcaatcgactacgtaaacagcgctcagtaa

SEQ ID NO: 150366 - protein, 77 aa, Vibrio anguillarum
MSNIEERVKKIIVEQLGVDEAEVKNEASFVEDLGADSLDTVELVMALEEEFDTEIPDEEAEKITTVQAAIDYVNSAQ

SEQ ID NO: 150367 - DNA, 237 bp, Helicobacter pylori
  CDS (1)..(237): transl_table=11
atggctttatttgaagatattcaggcagttattgctgagcagttgaatgtggatgcggcgcaagttacgccagaggcggaatttgtgaaagatttgggtgcggactctttagatgtcgtggaattaatcatggcgttagaagaaaagtttggcattgagattcctgatgagcaagcggaaaaaatcgtcaatgtgggcgatgtggtgaagtatattgaggacaataaactagcttaa

SEQ ID NO: 150368 - protein, 78 aa, Helicobacter pylori
MALFEDIQAVIAEQLNVDAAQVTPEAEFVKDLGADSLDVVELIMALEEKFGIEIPDEQAEKIVNVGDVVKYIEDNKLA

SEQ ID NO: 150369 - DNA, 390 bp, Helicosporidium sp
  CDS (1)..(390)
atggcgttcctgcagagagggtttgccgggctgcgccagggagtcctggccaaggtcaggctcgctcctggctcttctgtcttccagggcctggctgcctctcagtgccaggccgtgcgcggcttcgccgagtcctcctacctcagcaagtctgatgtcacggctcgcgttctcgacattgtcaagaactttgagaaggtggacgctggaaaggtcaccgagagcgccgcctttcaaaaggacctgggtctggactctctggacacggtggagctggtgatggcgttggaggaggagtttgcgatcgagatccccgatgccgaagccgacaagattctgtctgtttccgaggcggtctcgtacatcacctccaaccccctggccaagtga

SEQ ID NO: 150370 - protein, 129 aa, Helicosporidium sp
MAFLQRGFAGLRQGVLAKVRLAPGSSVFQGLAASQCQAVRGFAESSYLSKSDVTARVLDIVKNFEKVDAGKVTESAAFQKDLGLDSLDTVELVMALEEEFAIEIPDAEADKILSVSEAVSYITSNPLAK

SEQ ID NO: 150371 - DNA, 387 bp, Helicosporidium sp
  CDS (1)..(387)
atgtctctgctcgcgctctcagcaagcaagcccgctgcggctcctcgggctctggcgatgaggccgcagatgcatcgtcacatttctggattacgtgttgttggctcgcggagtcttgcgccgcggcctattctttgcagagcagtgaaagacaagactttggttttggatgacgtgcgctctattattgccgatcagcttggcaaagatgtggagcaggttcaccccacaagcaagtttgtggacttgaacgctgattctttggacactgtggaaattatgttggcgctggaggagaagtttgatgtcagcctcgacgatgaaaacgcagaaaaactctccactgtgcaggatgctgctgaccttatcgtctcccagctgaagtga

SEQ ID NO: 150372 - protein, 128 aa, Helicosporidium sp
MSLLALSASKPAAAPRALAMRPQMHRHISGLRVVGSRSLAPRPILCRAVKDKTLVLDDVRSIIADQLGKDVEQVHPTSKFVDLNADSLDTVEIMLALEEKFDVSLDDENAEKLSTVQDAADLIVSQLK

SEQ ID NO: 150373 - DNA, 402 bp, Solanum lycopersicum
  CDS (1)..(402)
atggctagtctttcagctacttgtctcagatttggctgttctgtcaacacatctcagataaacggaggcactgtgaagttggtttcagtgggttggggaaggagtagtgctggtttcccttctctaagaacatcccgccttcgtgttgcagctgcaaaggcagagacaattgataaggtaataagcatagtgagaaaacaactagctttaccagcagacactaaggtcagccctgaaagtactttcactaaggacctcggagccgactctctggacactgtagaaattgtgatggccctagaagaagagtttgggattgcagtagaagaagagaactctgagaatattgtaacagttcaagatgctgctgacttgattgaaaaacttgttgagaagaagtag

SEQ ID NO: 150374 - protein, 133 aa, Solanum lycopersicum
MASLSATCLRFGCSVNTSQINGGTVKLVSVGWGRSSAGFPSLRTSRLRVAAAKAETIDKVISIVRKQLALPADTKVSPESTFTKDLGADSLDTVEIVMALEEEFGIAVEEENSENIVTVQDAADLIEKLVEKK

SEQ ID NO: 150375 - DNA, 237 bp, Pseudomonas syringae
  CDS (1)..(237): transl_table=11
atgagcaccatcgaagagcgcgtcaagaaaatcgttgcagagcaacttggcgtcaaacaagaagaggttgtcaacactgcttctttcgttgaggacctgggcgctgactccctggacaccgttgagctggtaatggctctggaagaggaattcgagaccgaaattccggacgaagaagcggaaaagatcactaccgttcaagcagcaatcgactacgtcactagccatcaggcttaa

SEQ ID NO: 150376 - protein, 78 aa, Pseudomonas syringae
MSTIEERVKKIVAEQLGVKQEEVVNTASFVEDLGADSLDTVELVMALEEEFETEIPDEEAEKITTVQAAIDYVTSHQA

SEQ ID NO: 150377 - DNA, 387 bp, Chlamydomonas reinhardtii
  CDS (1)..(387)
atggccctctcttctgctgccaacgtggtccggtcggctgttctgcagcacttgcgcgtgactgtgacctccagccttcaatcgagctctctgccgaccttcaccaacataatcagccgtggctttggtggtggcttcctggacaaggattccgtcacggagcgcgtgctgcacgtcacaaagcactttgagaagattgatgcatccaaggtgagcccggcggcctctttcgagaaggacctgggcctggacagcctggacgtggtggagctggtcatggcattggaagaggagtttggcctggagattccggacgctgaggcagataagattgcttccgtgggtgacgctatcaactacatctgcagcaaccctatggcaaagtag

SEQ ID NO: 150378 - protein, 128 aa, Chlamydomonas reinhardtii
MALSSAANVVRSAVLQHLRVTVTSSLQSSSLPTFTNIISRGFGGGFLDKDSVTERVLHVTKHFEKIDASKVSPAASFEKDLGLDSLDVVELVMALEEEFGLEIPDAEADKIASVGDAINYICSNPMAK

SEQ ID NO: 150379 - DNA, 237 bp, Brachyspira pilosicoli
  CDS (1)..(237): transl_table=11
atggcattaatcgatgaaattaaggatgttgttgctaatcaattaaacatttcagacaaaagtaaaatcacagatacagcttctttcgtagatgatttgaacgctgattcacttgatttagtagaacttattatggaattagaaaaacgttatgatatcaaaattcctcaagaagaacaagaaaaaattaaaaatgtagctgatgctgctaaatatattgaagagcataagaagtaa

SEQ ID NO: 150380 - protein, 78 aa, Brachyspira pilosicoli
MALIDEIKDVVANQLNISDKSKITDTASFVDDLNADSLDLVELIMELEKRYDIKIPQEEQEKIKNVADAAKYIEEHKK

SEQ ID NO: 150381 - DNA, 258 bp, Pseudomonas aurantiaca
  CDS (1)..(258): transl_table=11
atgactatggaaacgctcgaacaacgtgtgaaaagagtggtggcgaccgaactggccgtcgaactggcgcagatcggcaaccaggactcgttcgtcgagaacctgggcgccgactcgctggcccgggtggaactggtgtcggccctggaggccgagttcgacctgaccatcccggacgatgaagccgatggcctgcagaccgtgcagcaggtgatcgactacgtcctgcaagccaatgagcaagccgtcccggcctga

SEQ ID NO: 150382 - protein, 85 aa, Pseudomonas aurantiaca
MTMETLEQRVKRVVATELAVELAQIGNQDSFVENLGADSLARVELVSALEAEFDLTIPDDEADGLQTVQQVIDYVLQANEQAVPA

SEQ ID NO: 150383 - DNA, 405 bp, Brassica campestris
  CDS (1)..(405)
atggcgaccactttcagcgcttcagtctccatgcaagctacctctctggtcacaacaacgaggattagtttccaaaagccagttttggtttcaaaccatggaaggactaatctctccttcaacctaagccgcactcgcctctcaatctcttgcgcggccaaacaagagacagtagagaaagtgtctgagatagtcaagaagcaactctcactcaaagacgatcaacaagtcgttgcagaaaccaaatttgtcgatcttggagcagattctctcgacacggttgagatagtgatgggtttagaggaagagtttgggatccaaatggcagaagagaaagcacagaagattgcaacagttgagcaagctgctgaactcattgaagagctcatgcaagccaaaaagtaa

SEQ ID NO: 150384 - protein, 134 aa, Brassica campestris
MATTFSASVSMQATSLVTTTRISFQKPVLVSNHGRTNLSFNLSRTRLSISCAAKQETVEKVSEIVKKQLSLKDDQQVVAETKFVDLGADSLDTVEIVMGLEEEFGIQMAEEKAQKIATVEQAAELIEELMQAKK

SEQ ID NO: 150385 - DNA, 369 bp, Arabidopsis thaliana
  CDS (1)..(369)
atggcactgagaaatgcaattcttcgtcacctgagggttccggtgcaaaccctaggattgaatcagtctaaaattgggttccttggtacgatccggtcattttcttcgcacgatgatcatcttagcagagaagctgtcgtcgatagagtactcgatgttgtcaagagcttccccaaagtcgattcctctaaggtgactcctgaggttcatttccaaaacgatttgggattagatagtttggacacagtggagatagtgatggctattgaagaggaattcaagctggaaattccagacaaagaagctgacaagatcgattcttgctctctcgccattgaatacgtttacaatcatccaatgtctagctaa

SEQ ID NO: 150386 - protein, 122 aa, Arabidopsis thaliana
MALRNAILRHLRVPVQTLGLNQSKIGFLGTIRSFSSHDDHLSREAVVDRVLDVVKSFPKVDSSKVTPEVHFQNDLGLDSLDTVEIVMAIEEEFKLEIPDKEADKIDSCSLAIEYVYNHPMSS

SEQ ID NO: 150387 - DNA, 405 bp, Olea europaea
  CDS (1)..(405)
atggcttccattactgcttcctctgtttccttttctgcttcttgccctctgaagcaaaaccaggcctcaaatttgaagaaggtttcgctttctttcagtgggaagagcttcccatctcttaggttgcagccttcacgtttccgcattgcctgtgcagccaaaccagagacagtggaaaaagtgtgtgaaattgtgaggaagcaacttgctctccccgccgattctgctgtaactggagagtccaagtttgcatcacttggtgctgattcccttgacacggttgagattgtcatgggactcgaggaagagtttgggatcagtgtggaagaagaaagtgcccagaccatcaccaccgttcaagaagcagctgatatgatcgagaacctcaaggctaagaaggcttga

SEQ ID NO: 150388 - protein, 134 aa, Olea europaea
MASITASSVSFSASCPLKQNQASNLKKVSLSFSGKSFPSLRLQPSRFRIACAAKPETVEKVCEIVRKQLALPADSAVTGESKFASLGADSLDTVEIVMGLEEEFGISVEEESAQTITTVQEAADMIENLKAKKA

SEQ ID NO: 150389 - DNA, 357 bp, Candida rugosa
  CDS (1)..(357): transl_table=12
atgctctctcggtttgccagtctccgcagcgttgccggccggttggcggtggcgcgcccggcggtccgcgtgatgacgcccttccgcagctacgccgtggacgcccacgccaaggaggcggcggcggagcgcgtgtttgacattctcgagagctacgccaagatcaccgacccgagcaagatcacgctcgacgcgagcttcacgaccgacctccacctcgacctgttggacgtggcggaggtggtgatgcagttggaggaggagtttctgatcgagattcccgacgaggagatcgacgagatcaccactgtgggcggcgccgtcgactacgtcttgcgccagcccgatgcggtgtag

SEQ ID NO: 150390 - protein, 118 aa, Candida rugosa
MLSRFASLRSVAGRLAVARPAVRVMTPFRSYAVDAHAKEAAAERVFDILESYAKITDPSKITLDASFTTDLHLDSLDVAEVVMQLEEEFSIEIPDEEIDEITTVGGAVDYVLRQPDAV

SEQ ID NO: 150391 - DNA, 414 bp, Coriandrum sativum
  CDS (1)..(414)
atggctgctttcactgcttcttctgtttcattcacccctctttcaatctcccttaaccaaaccaaggggtttgctcgcggttcagtttccattcctgctaaggcgaagtcctttggtgcacttaccctgcgtaatgcaccccttcgcttcagagtgtcatgcgctgctaagcctgagacagtggagaaggtgtgtgagattgtgaagaaacaacttgcactcccccctactactgaagtttcaggagactcaaaatttgcagcacttggagctgattctctcgatacggttgagattgtgatgggactagaggaggagtttgggatcagcgttgaggaagaaagtgctcaggccattgccactgttcaagatgcagcggatctgattgagaagctttgcgagaagaaagagtaa

SEQ ID NO: 150392 - protein, 137 aa, Coriandrum sativum
MAAFTASSVSFTPLSISLNQTKGFARGSVSIPAKAKSFGALTLRNAPLRFRVSCAAKPETVEKVCEIVKKQLALPPTTEVSGDSKFAALGADSLDTVEIVMGLEEEFGISVEEESAQAIATVQDAADLIEKLCEKKE

SEQ ID NO: 150393 - DNA, 414 bp, Arabidopsis thaliana
  CDS (1)..(414)
atggcgactcaattcagcgcttctgtctcattgcaaacttcttgtctggcaacaacaaggattagtttccaaaagccagctttgatttccaaccatggaaagactaatctatccttcaacctccgccgttcaatcccatctcgccgcctctctgtttcttgcgcggcaaaacaagagacgatagagaaagtgtctgctatagttaagaagcaactatcacttacaccggataaaaaagtcgttgcagaaaccaaatttgctgaccttggagcagattctctcgacacggttgagatagtaatgggtttagaggaagagtttaacatccaaatggccgaagagaaagcacagaagattgccacagttgagcaagctgctgaactcattgaagagctcatcaacgagaagaagtaa

SEQ ID NO: 150394 - protein, 137 aa, Arabidopsis thaliana
MATQFSASVSLQTSCLATTRISFQKPALISNHGKTNLSFNLRRSIPSRRLSVSCAAKQETIEKVSAIVKKQLSLTPDKKVVAETKFADLGADSLDTVEIVMGLEEEFNIQMAEEKAQKIATVEQAAELIEELINEKK

SEQ ID NO: 150395 - DNA, 411 bp, Casuarina glauca
  CDS (1)..(411)
atggcttctgtcactggtacttcgatttcaatggcctccttcaaggcgagcctggcacctagcagggtctctaatctgagatcagtttcccttcccattaaagggaaaagcttcgcaccacttaggatgcggtcagcacgctttgttgtttgctgtgcggccaagccagagacagtggaaaaggtgtgtgctatagtgaagaagcagctggctctaccagatgattctgcagtcaccggagagtcaaagtttgccacccttggagctgattctcttgacacggttgagattgtgatgggacttgaggaggaattcggaatcaacgtggaggaagagagcgcccagagcattgccaccgttcaagacgcggcggacctgattgagaagctcattgagaagaagagtggttaa

SEQ ID NO: 150396 - protein, 136 aa, Casuarina glauca
MASVTGTSISMASFKASLAPSRVSNLRSVSLPIKGKSFAPLRMRSARFVVCCAAKPETVEKVCAIVKKQLALPDDSAVTGESKFATLGADSLDTVEIVMGLEEEFGINVEEESAQSIATVQDAADLIEKLIEKKSG

SEQ ID NO: 150397 - DNA, 423 bp, Cuphea lanceolata
  CDS (1)..(423)
atggcttccgcagctgccggtgcttccatctgcatcaagtccgcctccttctcgcctctggcaccgggtagaatttcaagcttgagatctgtctcattacctgtgagtcggaaaagctttccctctctcaagtcatccaagagttcgttcgctctccgggtcagctgtcaggctaaaccagaaaccgtggcgaaggtctgcggcatagtgaagaaacaattggccttaccagacgactctgaggttaatggactatccaagtttagtgctctcggagcagattctctcgacacggtggagattgtcatgggactagaggaggaatttgggatcagcgtggaggaagaaagtgcacagagcatccagaccgtccaagatgctgccgatctcatcgagaagctcatggagaagaagggccattga

SEQ ID NO: 150398 - protein, 140 aa, Cuphea lanceolata
MASAAAGASICIKSASFSPLAPGRISSLRSVSLPVSRKSFPSLKSSKSSFALRVSCQAKPETVAKVCGIVKKQLALPDDSEVNGLSKFSALGADSLDTVEIVMGLEEEFGISVEEESAQSIQTVQDAADLIEKLMEKKGH

SEQ ID NO: 150399 - DNA, 450 bp, Hordeum vulgare
  CDS (1)..(450)
atggcgcactgcctcgccgccgtttcctccttctcgccgtccgccgtccgccggcggctgtccagccaggtggctaatgtagtttcgagccggagctcagtttctttccatagccggcagatgagctttgtatccatcagttcaagaccgagttcgcttcggtttaagatttgttgtgcggccatgggagaggcacaggccaagaaagagacagtcgacaaggtttgtatgatagtcaagaagcagctggcagtccctgatggtacacctgtcacagcggagtcgaaattctccgaacttggtgccgactcactagacacggttgagattgtgatgggcctcgaggaagagttcaacatcactgttgatgaaacaagcgcgcaggacattgcaaccgtgcaggatgcagcgaaccttatcgagaagcttgtgacagagaagaccgcataa

SEQ ID NO: 150400 - protein, 149 aa, Hordeum vulgare
MAHCLAAVSSFSPSAVRRRLSSQVANVVSSRSSVSFHSRQMSFVSISSRPSSLRFKICCAAMGEAQAKKETVDKVCMIVKKQLAVPDGTPVTAESKFSELGADSLDTVEIVMGLEEEFNITVDETSAQDIATVQDAANLIEKLVTEKTA

SEQ ID NO: 150401 - DNA, 237 bp, Pseudomonas aeruginosa
  CDS (1)..(237): transl_table=11
atgagcaccatcgaagaacgcgttaagaagatcgtcgctgaacaactcggcgtgaaggaagaagaagtcaccaacagcgcttccttcgtcgaagacctgggcgccgactcccttgacaccgtcgagctggtgatggctctggaagaggaattcgagaccgaaatccctgacgagaaagctgaaaagatcaccaccgttcaggaagccatcgactacatcgttgctcaccagcaataa

SEQ ID NO: 150402 - protein, 78 aa, Pseudomonas aeruginosa
MSTIEERVKKIVAEQLGVKEEEVTNSASFVEDLGADSLDTVELVMALEEEFETEIPDEKAEKITTVQEAIDYIVAHQQ

SEQ ID NO: 150403 - DNA, 240 bp, Ralstonia solanacearum
  CDS (1)..(240): transl_table=11
atggacaacatcgaacaacgcgtcaagaagatcgtcgccgagcaactgggcgtggccgaagctgacatcaagaacgaatcgtcgttcgtcaacgatctcggcgctgactcgctcgacacggttgagctggtgatggcgttggaagatgagttcggtatggaaattccggacgaagaagctgagaagatcaccacggtgcaacaagccatcgattacgctcgcgccaacgtcaaggcgtaa

SEQ ID NO: 150404 - protein, 79 aa, Ralstonia solanacearum
MDNIEQRVKKIVAEQLGVAEADIKNESSFVNDLGADSLDTVELVMALEDEFGMEIPDEEAEKITTVQQAIDYARANVKA

SEQ ID NO: 150405 - DNA, 237 bp, Shigella flexneri
  CDS (1)..(237): transl_table=11
atgagcactatcgaagaacgcgttaagaaaattatcggcgaacagctgggcgttaagcaggaagaagttaccaacaatgcttctttcgttgaagacctgggcgcggattctcttgacaccgttgagctggtaatggctctggaagaagagtttgatactgagattccggacgaagaagctgagaaaatcaccaccgttcaggctgccattgattacatcaacggccaccaggcgtaa

SEQ ID NO: 150406 - protein, 78 aa, Shigella flexneri
MSTIEERVKKIIGEQLGVKQEEVTNNASFVEDLGADSLDTVELVMALEEEFDTEIPDEEAEKITTVQAAIDYINGHQA

SEQ ID NO: 150407 - DNA, 390 bp, Hordeum vulgare
  CDS (1)..(390)
atggcctccgccgcggcgtccgccgtctccttcgccaggcccgtcaaggcaatctgtgtcaactcggtctccttctctgctctaaggaaagacaatgtatccttccgtttgcagccagttccccagagattttctgtttgctgtgcagccaaaaaggagacagtagagaaggtttgtgatattgtgaagagccagcttgcgctgtctgatgacactgaagtttctggctcctccacatttgctgatcttggtgccgattctttggatacggttgagattgttatgggcctcgaggaggcttttggaatcagcgtggaggaatcgagcgctcagaccatcgcaacggtggaagacgccgccaacctgatcgacagccttgttggaaagtaa

SEQ ID NO: 150408 - protein, 129 aa, Hordeum vulgare
MASAAASAVSFARPVKAICVNSVSFSALRKDNVSFRLQPVPQRFSVCCAAKKETVEKVCDIVKSQLALSDDTEVSGSSTFADLGADSLDTVEIVMGLEEAFGISVEESSAQTIATVEDAANLIDSLVGK

SEQ ID NO: 150409 - DNA, 420 bp, Cuphea lanceolata
  CDS (1)..(420)
atggcttccgcagctgccggtgcttccatctgcatcaagtccgcctcctgctcgcctctggcaccgggtagaatttcaagcttgagatcagtctcattacctgtgagtcggaaaagctttccctctctcaggtcatccaagggttcgtttgcccgggtcagctgtcaggctaaaccagaaaccgtggcgaaggtctgccgcatagtgaagaaacaattggccttaccagacgactctgaggttaatggactatccaagtttagtgctctcggagcagattctctcgacacggtggagattgtcatgggactagaggaggaatttgggatcagcgtggaggaagaaagtgcacagagcatccagaccgtccaagatgctgccgatctcatcgagaagctcatggagaagaagggccattga

SEQ ID NO: 150410 - protein, 139 aa, Cuphea lanceolata
MASAAAGASICIKSASCSPLAPGRISSLRSVSLPVSRKSFPSLRSSKGSFARVSCQAKPETVAKVCRIVKKQLALPDDSEVNGLSKFSALGADSLDTVEIVMGLEEEFGISVEEESAQSIQTVQDAADLIEKLMEKKGH

SEQ ID NO: 150411 - DNA, 405 bp, Brassica napus
  CDS (1)..(405)
atggcgaccactttcagcgcttcagtctccatgcaagctacctctctggcaacaacaacgaggattagtttccaaaagccagttttggtttcaaaccatggaaggactaatctctccttcaacctaagccgcactcgcctttcaatctcttgcgcggccaaacaagagacagtagagaaagtatctgagatagtcaagaagcaactatcactcaaagacgatcaacaagtcgttgcagaaaccaaatttgtcgatcttggagcagattctctggacacggttgagatagtgatgggtttagaggaagagtttggtatccaaatggcagaagagaaagctcaaaagattgcaacagttgaacaagctgctgaactcattgaagagctcatgcaagccaagaagtaa

SEQ ID NO: 150412 - protein, 134 aa, Brassica napus
MATTFSASVSMQATSLATTTRISFQKPVLVSNHGRTNLSFNLSRTRLSISCAAKQETVEKVSEIVKKQLSLKDDQQVVAETKFVDLGADSLDTVEIVMGLEEEFGIQMAEEKAQKIATVEQAAELIEELMQAKK

SEQ ID NO: 150413 - DNA, 369 bp, Arabidopsis thaliana
  CDS (1)..(369)
atggcactgagaaatgcaattcttcgtcacctgagggttccggtgcaaaccctaggattgaatcagtctaaaattgggttccttggtacgatccggtcattttcttcgcacgatgatcatcttagcagagaagctgtcgtcgatagagtactcgatgttgtcaagagcttccccaaagtcgatccctctaaggtgactcctgaggttcatttccaaaacgatttgggattagatagtttggacacagtggagatagtgatggctattgaagaggaattcaagctggaaattccagacaaagaagctgacaagatcgattcttgctctctcgccattgaatacgtttacaatcatccaatgtctagctaa

SEQ ID NO: 150414 - protein, 122 aa, Arabidopsis thaliana
MALRNAILRHLRVPVQTLGLNQSKIGFLGTIRSFSSHDDHLSREAVVDRVLDVVKSFPKVDPSKVTPEVHFQNDLGLDSLDTVEIVMAIEEEFKLEIPDKEADKIDSCSLAIEYVYNHPMSS

SEQ ID NO: 150415 - DNA, 459 bp, Drosophila melanogaster
  CDS (1)..(459)
atgtcgttcacacagatcgcgcgcagctgcagtcgactggcggccactttggccccaaggagggtcgcctccggcattctcatccaatcacaggcctccaggatgatgcacaggatcgccgtgccatcgatgaccagccagttgagccaagagtgccgtggtcgctggcaaacgcaattggtgcgcaaatactcggcgaaaccgccgctctcgctgaagctgatcaatgagcgcgtcttgcttgtgctcaagctctacgacaagatcgatcccagcaagctcaacgttgagtcgcacttcatcaacgacttgggactggattccttggaccacgtggaggtcatcatggccatggaggacgagttcggtttcgagatccccgactctgatgccgagaagctgcttaaacctgccgacattattaagtacgtcgccgacaaggaggatgtgtacgagtaa

SEQ ID NO: 150416 - protein, 152 aa, Drosophila melanogaster
MSFTQIARSCSRLAATLAPRRVASGILIQSQASRMMHRIAVPSMTSQLSQECRGRWQTQLVRKYSAKPPLSLKLINERVLLVLKLYDKIDPSKLNVESHFINDLGLDSLDHVEVIMAMEDEFGFEIPDSDAEKLLKPADIIKYVADKEDVYE

SEQ ID NO: 150417 - DNA, 294 bp, Mycobacterium aurum
  CDS (1)..(294): transl_table=11
gtggccgccagccagcaggaaatcatcgccggtctcgccgagatcatcgaagaggtcaccggcatcgagccgtccgaagtgacccccgagaagagcttcgtcgacgacctggacatcgactcgctgtcgatggtcgagatcgccgtgcagaccgaggacaagtacggcgtgaagatccccgacgaggacctcgccggtctgcgcaccgtcggtgacgttgttgcctacatccagaagctcgaggaagaaaacccggaggctgctgccgccctgcgcgagaagttcgcggaatga

SEQ ID NO: 150418 - protein, 97 aa, Mycobacterium aurum
MAASQQEIIAGLAEIIEEVTGIEPSEVTPEKSFVDDLDIDSLSMVEIAVQTEDKYGVKIPDEDLAGLRTVGDVVAYIQKLEEENPEAAAALREKFAE

SEQ ID NO: 150419 - DNA, 348 bp, Mycobacterium bovis
  CDS (1)..(348): transl_table=11
gtgcctgtcactcaggaagaaatcattgccggtatcgccgagatcatcgaagaggtaaccggtatcgagccgtccgagatcaccccggagaagtcgttcgtcgacgacctggacatcgactcgctgtcgatggtcgagatcgccgtgcagaccgaggacaagtacggcgtcaagatccccgacgaggacctcgccggtctgcgtaccgtcggtgacgttgtcgcctacatccagaagctcgaggaagaaaacccggaggcggctcaggcgttgcgcgcgaagattgagtcggagaaccccgatgccgttgccaacgttcaggcgaggcttgaggccgagtccaagtga

SEQ ID NO: 150420 - protein, 115 aa, Mycobacterium bovis
MPVTQEEIIAGIAEIIEEVTGIEPSEITPEKSFVDDLDIDSLSMVEIAVQTEDKYGVKIPDEDLAGLRTVGDVVAYIQKLEEENPEAAQALRAKIESENPDAVANVQARLEAESK

SEQ ID NO: 150421 - DNA, 348 bp, Mycobacterium leprae
  CDS (1)..(348): transl_table=11
gtggccgtcacccaggaagagattattgccggaatcgccgagatcatcgaagaggtgaccggtatcgaaccgtctgagattaccccggagaagtcgttcgtcgacgacctggacattgactcgctgtcgatggtcgagatcgccgtccagaccgaagacaagtacggcgtcaagatccctgacgaagacctcgcgggtctgcgtactgtcggtgacgttgtgacctacatccagaagctcgaagaagagaatcctgaggccgccgaggcgctgcgcgccaagatcgtgtcggagaaccccgaggccgccgcgaacgttcaggcaaggctagaaacagaaagtaagtga

SEQ ID NO: 150422 - protein, 115 aa, Mycobacterium leprae
MAVTQEEIIAGIAEIIEEVTGIEPSEITPEKSFVDDLDIDSLSMVEIAVQTEDKYGVKIPDEDLAGLRTVGDVVTYIQKLEEENPEAAEALRAKIVSENPEAAANVQARLETESK

SEQ ID NO: 150423 - DNA, 405 bp, Neurospora crassa
  CDS (1)..(405)
atgttccgcaccgccgccctcactgccgcccgcgtggcccgtcccgccgtcgcctccgccgtccgcgctggtgttgcccgtcctgcttttgtccaggccgtccccaaggtcgctgccttccaggctgtccggttttacagcgccggtggtcatctcaagaaggatgaggtctttagcaggattgcgcaggtgttgagtggatttgacaaggtcaacgaccccaagaacatcaccgagaccgcccacttcgccaacgacctcggtcttgacagcttggacaccgttgaggttgttatggctattgaggaggagttctccatcgagatccccgacaaggacgccgaccagatccactcggtcgacaaggccgtcgagtacatcctcagccagcccgatgccaactaa

SEQ ID NO: 150424 - protein, 134 aa, Neurospora crassa
MFRTAALTAARVARPAVASAVRAGVARPAFVQAVPKVAAFQAVRFYSAGGHLKKDEVFSRIAQVLSGFDKVNDPKNITETAHFANDLGLDSLDTVEVVMAIEEEFSIEIPDKDADQIHSVDKAVEYILSQPDAN

SEQ ID NO: 150425 - DNA, 339 bp, Schizosaccharomyces pombe
  CDS (1)..(339)
atgctttcccgtttttcttcccagttgcgctttatttccgcagttaggccggtgattcccaaatttcaacctttgcgattttatagcgttgctcgccctgatgctgaaaaacgaatccttaaagttgtttcttcctttgacaaaattcaggaccctaaaaaggtcacacctacatcaacatttgcgaatgacttgggtcttgattctttagatgctgtcgaggtcgttatggctatcgaagaagaatttagcattcaaattcctgataaggatgcagatgaaattacttcagtcggggatgccatctcgtatattacaaaaaaccccgaagcaaaataa

SEQ ID NO: 150426 - protein, 112 aa, Schizosaccharomyces pombe
MLSRFSSQLRFISAVRPVIPKFQPLRFYSVARPDAEKRILKVVSSFDKIQDPKKVTPTSTFANDLGLDSLDAVEVVMAIEEEFSIQIPDKDADEITSVGDAISYITKNPEAK

SEQ ID NO: 150427 - DNA, 237 bp, Agrobacterium tumefaciens
  CDS (1)..(237): transl_table=11
atgagcgatatcgcagaacgcgtaaagaaaattgtaattgatcatcttggcgttgacgccgacaaggttgtcgaaggcgccagcttcattgacgatctgggcgctgattcgctcgacaccgttgaactggtcatggctttcgaagaagaattcggcgttgaaattcccgacgacgcagctgactcgatcctgactgtcggcgacgccgtcaagttcatcgagaaggcccaggcctga

SEQ ID NO: 150428 - protein, 78 aa, Agrobacterium tumefaciens
MSDIAERVKKIVIDHLGVDADKVVEGASFIDDLGADSLDTVELVMAFEEEFGVEIPDDAADSILTVGDAVKFIEKAQA

SEQ ID NO: 150429 - DNA, 255 bp, Anabaena sp
  CDS (1)..(255): transl_table=11
atgagccaatcagaaacttttgaaaaagtcaaaaaaattgttatcgaacaactaagtgtggagaaccctgacacagtaactccagaagctagttttgccaacgatttacaggctgattccctcgatacagtagaactagtaatggctttggaagaagaatttgatatcgaaattcccgatgaagccgcagagaaaattaccactgttcaagaagcggtggattacatcaataaccaagttgccgcatcagcttaa

SEQ ID NO: 150430 - protein, 84 aa, Anabaena sp
MSQSETFEKVKKIVIEQLSVENPDTVTPEASFANDLQADSLDTVELVMALEEEFDIEIPDEAAEKITTVQEAVDYINNQVAASA

SEQ ID NO: 150431 - DNA, 237 bp, Aquifex aeolicus
  CDS (1)..(237): transl_table=11
atgagtttagaagagagggtcaaggaaattattgcggaacaacttggagttgagaaggaaaagataactcccgaggcaaaattcgttgaggacctcggggcggattctcttgacgtcgttgaactcataatggcctttgaagaggagttcggtattgagatccctgacgaggacgcggaaaagatacagactgtcggggatgtaataaattaccttaaagaaaaggtaggaggatga

SEQ ID NO: 150432 - protein, 78 aa, Aquifex aeolicus
MSLEERVKEIIAEQLGVEKEKITPEAKFVEDLGADSLDVVELIMAFEEEFGIEIPDEDAEKIQTVGDVINYLKEKVGG

SEQ ID NO: 150433 - DNA, 240 bp, Azospirillum brasilense
  CDS (1)..(240): transl_table=11
atgagcgatgtcgccgagcgcgttaagaagatcgttgtggaccacctcggggtcgaggagtcgaaggtgacggagaacgcctccttcatcgacgatctcggcgccgacagcctcgacacggtcgagctggttatggctttcgaggaagagttcggctgcgagattccggacgacgccgccgagaagattttgacggtgaaggacgccatcgacttcatcaaggcgaacgccgccgcctga

SEQ ID NO: 150434 - protein, 79 aa, Azospirillum brasilense
MSDVAERVKKIVVDHLGVEESKVTENASFIDDLGADSLDTVELVMAFEEEFGCEIPDDAAEKILTVKDAIDFIKANAAA

SEQ ID NO: 150435 - DNA, 237 bp, Bacteroides fragilis
  CDS (1)..(237): transl_table=11
atgtctgaaattgcatcaagagtgaaagcgattatcgtcgataaattgggcgtagaagaatcagaagttacagaaacagcaagcttcactaacgacctgggagctgattctcttgacactgtagaacttatcatggaattcgaaaaagaattcggtatctctattcctgatgaccaagctgaaaagattggcacagtacaggatgctgtagcttacatcgaagaacacgctaagtaa

SEQ ID NO: 150436 - protein, 78 aa, Bacteroides fragilis
MSEIASRVKAIIVDKLGVEESEVTETASFTNDLGADSLDTVELIMEFEKEFGISIPDDQAEKIGTVQDAVAYIEEHAK

SEQ ID NO: 150437 - DNA, 237 bp, Bartonella henselae
  CDS (1)..(237): transl_table=11
atgagtgatacagtagagcgcgttaagaaaattatcgtagagcatcttggggttaatgcagataaggtagtagaagatgcgagctttatcgatgatctaggagcagatagccttgatacggtcgagctcgttatggcttttgaagaagaatttggtgtagaaatcccagatgaggctgctgaaacgattttcacagtgggtgatgcagtaaagtttattgataaagcttctgcataa

SEQ ID NO: 150438 - protein, 78 aa, Bartonella henselae
MSDTVERVKKIIVEHLGVNADKVVEDASFIDDLGADSLDTVELVMAFEEEFGVEIPDEAAETIFTVGDAVKFIDKASA

SEQ ID NO: 150439 - DNA, 237 bp, Bartonella quintana
  CDS (1)..(237): transl_table=11
atgagtgatacagtagagcgcgttaagaaaattattgtggagcatcttggggttaatgcagataaggtagtagaaaatgcaagctttatcgatgatctaggagcagatagccttgatacggttgagctcgttatggcttttgaagaagaatttggtgtagaaatcccagatgaagccgctgaaacgattttcacagttggtgatgcagtaaagtttatcgataaagcttctgcatga

SEQ ID NO: 150440 - protein, 78 aa, Bartonella quintana
MSDTVERVKKIIVEHLGVNADKVVENASFIDDLGADSLDTVELVMAFEEEFGVEIPDEAAETIFTVGDAVKFIDKASA

SEQ ID NO: 150441 - DNA, 237 bp, Bdellovibrio bacteriovorus
  CDS (1)..(237): transl_table=11
atggctattcatccaaaggttaaagatatcatcgttgaacaacttggcgtagatccagataaagttaaagcggaagcttctttcatcgacgatctgggcgcagacagcttggatatcgttgaacttgtgatggcaatggaagaagaattcgatcttgaaatccctgacgaagacgctgaaaagctgaagacagttcaagacgtagcttcttaccttgagaaaaaaggaaaagcttaa

SEQ ID NO: 150442 - protein, 78 aa, Bdellovibrio bacteriovorus
MAIHPKVKDIIVEQLGVDPDKVKAEASFIDDLGADSLDIVELVMAMEEEFDLEIPDEDAEKLKTVQDVASYLEKKGKA

SEQ ID NO: 150443 - DNA, 237 bp, Blochmannia floridanus
  CDS (1)..(237): transl_table=11
atgagcattgttgaagaaaaagtaaaaactattattgctgaacaattaggagtaaaacaggaagaagtagtaaatcatgcttcgtttgttgatgatttaggagctgattctcttgatactgttgaattagttatggcattagaggaagagtttgatattgaaatcccagatgaagaggcagaaaaaattactactgttcaagcagctatagatttcattcatactaatcagaaatag

SEQ ID NO: 150444 - protein, 78 aa, Blochmannia floridanus
MSIVEEKVKTIIAEQLGVKQEEVVNHASFVDDLGADSLDTVELVMALEEEFDIEIPDEEAEKITTVQAAIDFIHTNQK

SEQ ID NO: 150445 - DNA, 240 bp, Bordetella bronchiseptica
  CDS (1)..(240): transl_table=11
atggaaagcatcgaacagcgcgtcaagaagatcgtcgctgaacaacttggcgtgaacgaagccgagatcaagaacgagtcctccttccttgacgacctcggtgccgattcgctcgacatggtcgaactggtcatggcgctcgaagacgaattcgagaccgagatccccgacgaagaggccgaaaagatcactaccgtgcagcaagcgattgactacatcaattcgcacggtaagcagtaa

SEQ ID NO: 150446 - protein, 79 aa, Bordetella bronchiseptica
MESIEQRVKKIVAEQLGVNEAEIKNESSFLDDLGADSLDMVELVMALEDEFETEIPDEEAEKITTVQQAIDYINSHGKQ

SEQ ID NO: 150447 - DNA, 243 bp, Borrelia burgdorferi
  CDS (1)..(243): transl_table=11
atggataatgatgaaatttttagcaaggttaggtctattatatctgagcaacttgataaaaaagaagatgaaattaccacagactctagatttgttgaagatcttaatgcagatagtctagatatttatgagcttttgtatttgcttgaagaggcctttgatgataagattccagagaatgaagccaatgaatttgagacggtaggcgatgttgttaattttattaaaaagagaaagggttga

SEQ ID NO: 150448 - protein, 80 aa, Borrelia burgdorferi
MDNDEIFSKVRSIISEQLDKKEDEITTDSRFVEDLNADSLDIYELLYLLEEAFDDKIPENEANEFETVGDVVNFIKKRKG

SEQ ID NO: 150449 - DNA, 243 bp, Borrelia garinii
  CDS (1)..(243): transl_table=11
atggataatgatgaaatttttagtaaggttaggtctattatatctgagcaacttgataaaaaagaagatgaaattactatagattctagatttgttgaggatcttaatgcagatagtcttgatatttatgagcttttatatttacttgaagaggcttttgatgataagattccagagaacgaagccaatgaatttgagacagtaggtgatgttgttaattttattaaaaagagaaaaggttga

SEQ ID NO: 150450 - protein, 80 aa, Borrelia garinii
MDNDEIFSKVRSIISEQLDKKEDEITIDSRFVEDLNADSLDIYELLYLLEEAFDDKIPENEANEFETVGDVVNFIKKRKG

SEQ ID NO: 150451 - DNA, 297 bp, Bordetella parapertussis; identical to SEQ ID NO: 150103
  CDS (58)..(297): transl_table=11

SEQ ID NO: 150452 - protein, 79 aa, Bordetella parapertussis
MESIEQRVKKIVAEQLGVNEAEIKNESSFLDDLGADSLDMVELVMALEDEFETEIPDEEAEKITTVQQAVDYINSHGKQ

SEQ ID NO: 150453 - DNA, 405 bp, Brassica campestris
  CDS (1)..(405)
atgtcgaccactttctgctcttccgtctccatgcaagccacttctctggcagcaacaacgaggattagtttccagaagccagctttggtttcaacgactaatctctccttcaacctccgccgttcaatccccactcgtttctcaatctcctgcgcggccaaaccagagacggttgagaaagtgtctaagatagttaagaagcagctatcactcaaagacgaccaaaaggtcgttgcggagaccaagtttgctgatcttggagcagattctctcgacactgttgagatagtgatgggtttagaggaagagtttgatatcgaaatggctgaagagaaagctcagaagattgctactgtggaggaagctgctgaactcattgaagagctcgttcaacttaagaagtaa

SEQ ID NO: 150454 - protein, 134 aa, Brassica campestris
MSTTFCSSVSMQATSLAATTRISFQKPALVSTTNLSFNLRRSIPTRFSISCAAKPETVEKVSKIVKKQLSLKDDQKVVAETKFADLGADSLDTVEIVMGLEEEFDIEMAEEKAQKIATVEEAAELIEELVQLKK

SEQ ID NO: 150455 - DNA, 240 bp, Bradyrhizobium japonicum
  CDS (1)..(240): transl_table=11
atgagtgacattggcgagcgggttaagaagatcgtggtcgaacaccttggtgttgaacccgagaaggttgtcgacgctgcgagcttcatcgacgacctcggcgccgacagtctggacaccgtcgagctggtgatggcgttcgaagaagaattcggttgcgagattccggacgacgccgcggagacgattctcaccgtcggcgacgccacgaagtttctcgagaagaacgcgaagagctaa

SEQ ID NO: 150456 - protein, 79 aa, Bradyrhizobium japonicum
MSDIGERVKKIVVEHLGVEPEKVVDAASFIDDLGADSLDTVELVMAFEEEFGCEIPDDAAETILTVGDATKFLEKNAKS

SEQ ID NO: 150457 - DNA, 237 bp, Brucella melitensis
  CDS (1)..(237): transl_table=11
atgagcgataccgcagagcgcgtcaagaaaatcgttgttgaacatctgggcgtagatgccgacaaggtcacggaaggcgcaagcttcattgatgacctcggcgcagacagcctcgacaccgtcgagctggtcatggcctttgaagaagaattcggcgttgaaattcctgacgacgctgccgaaacgatccttacggtcggtgatgctgtgaagttcatcgataaggcttctgcctga

SEQ ID NO: 150458 - protein, 78 aa, Brucella melitensis
MSDTAERVKKIVVEHLGVDADKVTEGASFIDDLGADSLDTVELVMAFEEEFGVEIPDDAAETILTVGDAVKFIDKASA

SEQ ID NO: 150459 - DNA, 243 bp, Buchnera aphidicola subsp
  CDS (1)..(243): transl_table=11
atgaaaaatattgaagaacgtataaaaaaaataatttttgaaaaactagatataaaacaagaaaagatttttaatgatgcatctttcatagatgatcttggcgcagattctcttgataccgtggaacttattatggctttagaagaagaatttgatattgaaatatcggatgaagaagcagaaaaaattaatacagtacaaaaatctattgattttatacaaaagaaaaatttaaaaaaataa

SEQ ID NO: 150460 - protein, 80 aa, Buchnera aphidicola subsp
MKNIEERIKKIIFEKLDIKQEKIFNDASFIDDLGADSLDTVELIMALEEEFDIEISDEEAEKINTVQKSIDFIQKKNLKK

SEQ ID NO: 150461 - DNA, 240 bp, Buchnera aphidicola subsp
  CDS (1)..(240): transl_table=11
atgaataatgttgaaaaaaaaataaaaaaaataatttcaaaaatactgaatattaaagtagaaaaaatacttaataatgcgtcttttttagatgatcttagtgctgattcattagatatagtagaattaattatggctatagaagaagaatttgatattgaaatatcagatgaagatgcagaaaaacttaatacagtacaaaaatctattgattatattaataataaaaataaaaaataa

SEQ ID NO: 150462 - protein, 79 aa, Buchnera aphidicola subsp
MNNVEKKIKKIISKILNIKVEKILNNASFLDDLSADSLDIVELIMAIEEEFDIEISDEDAEKLNTVQKSIDYINNKNKK

SEQ ID NO: 150463 - DNA, 237 bp, Buchnera aphidicola subsp
  CDS (1)..(237): transl_table=11
atgcaaaacatagaaaaaaaaataaaaaaaattatcgcacaacaattgggtttaatagagcaaaaaattactaatgaatcattgttagttgaagatcttaatgcagattcattagacatcgtagaattaattatggcttttgaagaagaatttaatatagaaattacagacgaagaagctgaaaatttaacttcagtgcaatctatatttgatataataaaaaaatacgttttttaa

SEQ ID NO: 150464 - protein, 78 aa, Buchnera aphidicola subsp
MQNIEKKIKKIIAQQLGLIEQKITNESLLVEDLNADSLDIVELIMAFEEEFNIEITDEEAENLTSVQSIFDIIKKYVF

SEQ ID NO: 150465 - DNA, 240 bp, Burkholderia mallei
  CDS (1)..(240): transl_table=11
atggacaacatcgaacaacgcgtgaagaagatcgtcgccgaacaactgggcgtcgccgaagccgaaatcaagaacgaagcgtcgttcgtgaacgacctcggcgcggactcgctcgacacggtcgagctggtgatggcgctcgaagacgagttcggcatggaaatcccggatgaagaggccgagaagatcacgaccgttcagcaagcgatcgactacgctcgcgcgaacgtcaaggcgtaa

SEQ ID NO: 150466 - protein, 79 aa, Burkholderia mallei
MDNIEQRVKKIVAEQLGVAEAEIKNEASFVNDLGADSLDTVELVMALEDEFGMEIPDEEAEKITTVQQAIDYARANVKA

SEQ ID NO: 150467 - DNA, 234 bp, Campylobacter jejuni
  CDS (1)..(234): transl_table=11
atggcaacatttgatgatgtaaaagcagtagtagtagagcaattaagtattgatgcagatgcagttaaaatggaatcaaaaattattgaagatttaggtgctgattctttagatgttgtagagcttattatggctttagaagaaaaatttgaagtagaaattccagatagtgatgctgaaaaattaattaaaattgaagatgttgtaaattatattgacaatctaaaaaaataa

SEQ ID NO: 150468 - protein, 77 aa, Campylobacter jejuni
MATFDDVKAVVVEQLSIDADAVKMESKIIEDLGADSLDVVELIMALEEKFEVEIPDSDAEKLIKIEDVVNYIDNLKK

SEQ ID NO: 150469 - DNA, 237 bp, Caulobacter crescentus
  CDS (1)..(237): transl_table=11
atgtccgacattctcgagcgcgtgcgtaagatcgtcatcgagcacctggatgccgatcccgagaaggtcaccgagaaggcttccttcatcgacgacctgggcgccgacagcctcgacaacgttgagctggtgatggcgttcgaagaagagttcgacatcgaaatcccggacgacgccgccgagcacatccaaacggtcggcgacgccgtgaagttcatcacggaaaagaccgcctaa

SEQ ID NO: 150470 - protein, 78 aa, Caulobacter crescentus
MSDILERVRKIVIEHLDADPEKVTEKASFIDDLGADSLDNVELVMAFEEEFDIEIPDDAAEHIQTVGDAVKFITEKTA

SEQ ID NO: 150471 - DNA, 246 bp, Chlorobium tepidum
  CDS (1)..(246): transl_table=11
atgagcgcagccgaaatcaaagataaagtgtacgatatcatcgtcagcaagatgggtgtcaacaaggatcagatcaagccggaatcgaagtttgccgatgacctcggtgccgattcgctcgatacggtcgaactgatcatggagctcgaaaacgagttcggcgtccagattcctgatgaagatgccgagaagatcggtaccgtgcagcaggccattgactacatcgtcaacaagaaagtaagctaa

SEQ ID NO: 150472 - protein, 81 aa, Chlorobium tepidum
MSAAEIKDKVYDIIVSKMGVNKDQIKPESKFADDLGADSLDTVELIMELENEFGVQIPDEDAEKIGTVQQAIDYIVNKKVS

SEQ ID NO: 150473 - DNA, 234 bp, Clostridium acetobutylicum
  CDS (1)..(234): transl_table=11
atggtatttgaaaaagttaaggacataatagcagatcaacttggtattgatgcaactgaaataaaaatggaatcctcttttattgatgatttaggagctgattctcttgatatagttgaactgataatggctttagaagaagaatttgatatagaaatgcctgatgaagaggctgaaaaagtttcaagtgtaggcgatgtagttaattacataaaagctcatacagaagagtaa

SEQ ID NO: 150474 - protein, 77 aa, Clostridium acetobutylicum
MVFEKVKDIIADQLGIDATEIKMESSFIDDLGADSLDIVELIMALEEEFDIEMPDEEAEKVSSVGDVVNYIKAHTEE

SEQ ID NO: 150475 - DNA, 231 bp, Clostridium perfringens
  CDS (1)..(231): transl_table=11
atgtttgataaattaaaagaaattattgctgataaattaagcgtaaacgaagatgaaataactatggaatcaacatttatagatgacttaggtgcggattctcttgatatagttgaattaataatggctcttgaagaagagttagagatggaaatcccagatgaagatgctgagggcttcaaaacagtaggagatgtagtagaatacatcacagaacatacagagaagtaa

SEQ ID NO: 150476 - protein, 76 aa, Clostridium perfringens
MFDKLKEIIADKLSVNEDEITMESTFIDDLGADSLDIVELIMALEEELEMEIPDEDAEGFKTVGDVVEYITEHTEK

SEQ ID NO: 150477 - DNA, 237 bp, Erwinia carotovora subsp
  CDS (1)..(237): transl_table=11
atgagcactatcgaagaacgcgttaagaaaatcatcgttgaacagcttggtgttaagcaggaagaagtcgtaaacaatgcttctttcgttgatgacctcggcgctgattctcttgacactgttgagctggtaatggctctggaagaagagtttgatactgagattccagacgaagaagctgaaaaaatcacgactgttcaggcagccattgatttcattcaggctaaccagcagtaa

SEQ ID NO: 150478 - protein, 78 aa, Erwinia carotovora subsp
MSTIEERVKKIIVEQLGVKQEEVVNNASFVDDLGADSLDTVELVMALEEEFDTEIPDEEAEKITTVQAAIDFIQANQQ

SEQ ID NO: 150479 - DNA, 228 bp, Fusobacterium nucleatum subsp
  CDS (1)..(228): transl_table=11
atgttagataaagtaaaagaaattatagttgaacaattaggagtggatgctgatcaaataaaacctgaatcaaattttgtagatgatttaggagcagattctttagatactgttgaattaataatgtcttttgaagaagaatttggagtagaaattccagatactgaagcagaaaaaattaaaactgtacaagatgttataaactacatagaagcgaataagaaataa

SEQ ID NO: 150480 - protein, 75 aa, Fusobacterium nucleatum subsp
MLDKVKEIIVEQLGVDADQIKPESNFVDDLGADSLDTVELIMSFEEEFGVEIPDTEAEKIKTVQDVINYIEANKK

SEQ ID NO: 150481 - DNA, 234 bp, Geobacter sulfurreducens
  CDS (1)..(234): transl_table=11
atgtcgtcaatagaaaaaagagtcaaagagatcgtagccgaacaactcggcgtcgatgaggcgcaggttacgaacgatgcctcctttatggatgatctgggggccgactctcttgacactgtcgagctggtgatggctctcgaggaagagtttgatatcgagatttccgacgaggacgccgagaaaatccaaaacgttcaggatgccatcgattacatcaccgagcacacctag

SEQ ID NO: 150482 - protein, 77 aa, Geobacter sulfurreducens
MSSIEKRVKEIVAEQLGVDEAQVTNDASFMDDLGADSLDTVELVMALEEEFDIEISDEDAEKIQNVQDAIDYITEHT

SEQ ID NO: 150483 - DNA, 234 bp, Haemophilus ducreyi
  CDS (1)..(234): transl_table=11
atgagcattgaagaacgcgtaaaaaaaatcatcgttgatcaattaggtgttaaagctgaagatgtaaaaccagaagcttcattcattgaagacttaggtgcagactctttagacacggttgaattagtgatggctttagaagaagaattcgatatcgaaattccagacgaagaagctgaaaaaatcactacagttcaatctgcaattgattacgtggcaaaagctaacgcataa

SEQ ID NO: 150484 - protein, 77 aa, Haemophilus ducreyi
MSIEERVKKIIVDQLGVKAEDVKPEASFIEDLGADSLDTVELVMALEEEFDIEIPDEEAEKITTVQSAIDYVAKANA

SEQ ID NO: 150485 - DNA, 231 bp, Haemophilus influenzae
  CDS (1)..(231): transl_table=11
atgagtattgaagaacgcgtgaaaaaaatcatcgttgaacaattaggtgttaaagaagaagatgttaaacctgaagcttcttttgttgaagatttaggtgcagattcattagacacagttgaattagtaatggctttagaagaagaatttgatattgaaattcctgatgaagaagctgaaaaaattaccactgttcaatctgcgattgattacgtgcaaaacaatcaataa

SEQ ID NO: 150486 - protein, 76 aa, Haemophilus influenzae
MSIEERVKKIIVEQLGVKEEDVKPEASFVEDLGADSLDTVELVMALEEEFDIEIPDEEAEKITTVQSAIDYVQNNQ

SEQ ID NO: 150487 - DNA, 231 bp, Helicobacter hepaticus
  CDS (1)..(231): transl_table=11
atggatacatttgaaagtgtaaaggctgtagttgttgaacaattaagtgttgatgcaaatgaagtaaaacccgaatctcgttttattgaggatttgaatgcagattctcttgatgttgtagagcttgttatggctcttgaagagaaattctctattgagattccagatgaagaagcagaaaaaatcaaaacagtcaaagatgttgttgcttatattgaagctaacaaataa

SEQ ID NO: 150488 - protein, 76 aa, Helicobacter hepaticus
MDTFESVKAVVVEQLSVDANEVKPESRFIEDLNADSLDVVELVMALEEKFSIEIPDEEAEKIKTVKDVVAYIEANK

SEQ ID NO: 150489 - DNA, 237 bp, Helicobacter pylori J99
  CDS (1)..(237): transl_table=11
atggctttatttgaagatattcaggcagttattgctgagcagttgaatgtggatgcggcgcaagttactccagaggcggaatttgtgaaggatttgggtgcggactctttagatgtcgtggaattgatcatggcgttagaagaaaagtttaacattgaaattcctgatgagcaagcggaaaaaatcgtcaatgtgggcgatgtggtgaagtatattgaggataataaactagcttaa

SEQ ID NO: 150490 - protein, 78 aa, Helicobacter pylori J99
MALFEDIQAVIAEQLNVDAAQVTPEAEFVKDLGADSLDVVELIMALEEKFNIEIPDEQAEKIVNVGDVVKYIEDNKLA

SEQ ID NO: 150491 - DNA, 237 bp, Helicobacter pylori
  CDS (1)..(237): transl_table=11
atggctttatttgaagatattcaggcagttattgctgagcagttgaatgtggatgcggtgcaagttacgccagaggcggaatttgtgaaggatttgggtgcagactctttagatgtcgtggaattaatcatggcgttagaagaaaagtttggcgttgagattcctgatgagcaagcggaaaaaatcatcaatgtgggcgatgtggtgaagtatattgaggataataaactggcttaa

SEQ ID NO: 150492 - protein, 78 aa, Helicobacter pylori
MALFEDIQAVIAEQLNVDAVQVTPEAEFVKDLGADSLDVVELIMALEEKFGVEIPDEQAEKIINVGDVVKYIEDNKLA

SEQ ID NO: 150493 - DNA, 234 bp, Leptospira interrogans serogroup Icterohaemorrhagiae serovar
  CDS (1)..(234): transl_table=11
atggcagactttgaaaaggttaaatctattatcgtagaacaacttggcgtggatgaatctgaagttacacctgaggctcacttcatcgatgacctcggtgcagactctttggatacggttgaattagtaatggctctcgaagaagaattcggaatcgaaatctccgacgaagatgctgaaaaaattcaaactgtcggggatgtaactaagttcatcgacaacctcaagtcctaa

SEQ ID NO: 150494 - protein, 77 aa, Leptospira interrogans serogroup Icterohaemorrhagiae serovar
MADFEKVKSIIVEQLGVDESEVTPEAHFIDDLGADSLDTVELVMALEEEFGIEISDEDAEKIQTVGDVTKFIDNLKS

SEQ ID NO: 150495 - DNA, 231 bp, Mannheimia succiniciproducens
  CDS (1)..(231): transl_table=11
atgagcattgaagaacgcgtaaaaaaaatcattgttgatcaattaggtgttaaagaagaagaagttaaatccgaagcgtctttcatcgaagacttaggtgccgactctttagacacagttgaattagtaatggctttagaagaagaattcgatatcgaaattcctgatgaagaagctgaaaaaattacaacggttcaatcagcaattgattacgttcaaaacaatcaataa

SEQ ID NO: 150496 - protein, 76 aa, Mannheimia succiniciproducens
MSIEERVKKIIVDQLGVKEEEVKSEASFIEDLGADSLDTVELVMALEEEFDIEIPDEEAEKITTVQSAIDYVQNNQ

SEQ ID NO: 150497 - DNA, 231 bp, Methylococcus capsulatus
  CDS (1)..(231): transl_table=11
atgagtgatatagcagaacgtgtaaagaagatcgtcgccgaacagttgggcgtgaaggacgagatctcgaacgaggcatccttcgtggacgatctgggcgccgattctctggacacggtcgagctggtgatggcactcgaggaagagttcgagtgcgaaattcccgacgaggacgccgaaaagatcactacggttcagcaggcgatcgattacatccagagccatacctga

SEQ ID NO: 150498 - protein, 76 aa, Methylococcus capsulatus
MSDIAERVKKIVAEQLGVKDEISNEASFVDDLGADSLDTVELVMALEEEFECEIPDEDAEKITTVQQAIDYIQSHT

SEQ ID NO: 150499 - DNA, 237 bp, Neisseria meningitidis serogroup A
  CDS (1)..(237): transl_table=11
atgtcaaacatcgaacaacaagttaaaaaaattgttgctgaacaactgggcgtaaacgaagccgacgtgaaaaacgaatcttctttccaagacgacttgggcgcggattctttggacaccgtggagctggttatggctttggaagaagcattcggctgcgaaatccccgacgaagatgccgaaaaaatcaccaccgtccaactggctatcgactacatcaatgcccacaacggctaa

SEQ ID NO: 150500 - protein, 78 aa, Neisseria meningitidis serogroup A
MSNIEQQVKKIVAEQLGVNEADVKNESSFQDDLGADSLDTVELVMALEEAFGCEIPDEDAEKITTVQLAIDYINAHNG

SEQ ID NO: 150501 - DNA, 234 bp, Oceanobacillus iheyensis
  CDS (1)..(234): transl_table=11
gtggcagaagtatttgaccgtgtgaaagaaattataattgatcgccttgatgtggaagagtctaaagtaactatggaagcatcttttaaagatgatctagacgcagattctctagatgtggtggaacttgttatggaattagaagatgaattcgatatggaaatcgcagatgaggatgctgaaaaaataaatacagtaggtgatgctgtagattacataaacagcaaagcttaa

SEQ ID NO: 150502 - protein, 77 aa, Oceanobacillus iheyensis
MAEVFDRVKEIIIDRLDVEESKVTMEASFKDDLDADSLDVVELVMELEDEFDMEIADEDAEKINTVGDAVDYINSKA

SEQ ID NO: 150503 - DNA, 231 bp, Onion yellows phytoplasma
  CDS (1)..(231): transl_table=11
atggtttttgaaaaaattaaagctttaattgccacccaattatctttagacgcttctacaattactttagacactcgttttaaagaagatttaggacttgattcgctagacgctttagaactagttatggaagtagaaaaaacatttcaaatcaacattagtgatgcaactttacaaaattttaaaaccgttcaagatatcgttttttacatcaccaaaaacaccccttaa

SEQ ID NO: 150504 - protein, 76 aa, Onion yellows phytoplasma
MVFEKIKALIATQLSLDASTITLDTRFKEDLGLDSLDALELVMEVEKTFQINISDATLQNFKTVQDIVFYITKNTP

SEQ ID NO: 150505 - DNA, 231 bp, Pasteurella multocida
  CDS (1)..(231): transl_table=11
atgagcattgaagaacgcgtaaaaaaaatcatcgttgaacaattaggcgttaaagaagacgaagttaaacctgaagcgtctttcgttgaagatttaggtgcggattctttagatactgttgaattagtcatggctttagaagaagagttcgatatcgaaattccagacgaagaagctgagaaaattacgacagttcaatctgcgatcgattacgttcaaaacaatcaataa

SEQ ID NO: 150506 - protein, 76 aa, Pasteurella multocida
MSIEERVKKIIVEQLGVKEDEVKPEASFVEDLGADSLDTVELVMALEEEFDIEIPDEEAEKITTVQSAIDYVQNNQ

SEQ ID NO: 150507 - DNA, 237 bp, Photobacterium profundum
  CDS (1)..(237): transl_table=11
atgagcaacatcgaagatcgcgtaagaaaaatcatcattgagcaactaggtgtggacgaagcagaagttaagaacgaagcttctttcgttgacgatctaggtgctgattcactagatacagttgaactagtaatggctcttgaagaagaattcgataccgaaattcctgacgaagcagctgaaaaaattactacagttcaagctgcaatcgactacgtaaacagcgcttctgagtaa

SEQ ID NO: 150508 - protein, 78 aa, Photobacterium profundum
MSNIEDRVRKIIIEQLGVDEAEVKNEASFVDDLGADSLDTVELVMALEEEFDTEIPDEAAEKITTVQAAIDYVNSASE

SEQ ID NO: 150509 - DNA, 237 bp, Porphyromonas gingivalis
  CDS (1)..(237): transl_table=11
atgtctgaagtagaaaaaaaagtgatcgacctcgtagttgacaaattgaatgtagaagcttctgaagtaacgcgtgaagccagtttctcaaatgacctcggagcagactctcttgatacagttgagttgatgatgaatttcgaaaaggaattcaacatgtctatccctgacgaccaagcacaggagatcaagactgtcggcgacgctatcgactatatcgaaaaaaacctgaagtaa

SEQ ID NO: 150510 - protein, 78 aa, Porphyromonas gingivalis
MSEVEKKVIDLVVDKLNVEASEVTREASFSNDLGADSLDTVELMMNFEKEFNMSIPDDQAQEIKTVGDAIDYIEKNLK

SEQ ID NO: 150511 - DNA, 243 bp, Prochlorococcus marinus
  CDS (1)..(243): transl_table=11
atgtctcaggaagcaattctcgaaaaagttcgttcaatcgttgctgaacaactcagtgttgaagcaagcgaaatcaaacctgattcgaacttccaaaatgacctcggagcagactcactcgacactgttgagcttgttatggcattagaagaagccttcgatatcgaaattcctgacgaggctgcggaaggcataaccactgttggagatgccgttaagtacatagaagacaagcagtcttga

SEQ ID NO: 150512 - protein, 80 aa, Prochlorococcus marinus
MSQEAILEKVRSIVAEQLSVEASEIKPDSNFQNDLGADSLDTVELVMALEEAFDIEIPDEAAEGITTVGDAVKYIEDKQS

SEQ ID NO: 150513 - DNA, 243 bp, Prochlorococcus marinus
  CDS (1)..(243): transl_table=11
atgtcccaggaagcgatccttgagaaagtccgttcaatcgttacggagcaactgagtgttgaggccggcgaagtgaagccagaatcgagttttcagaacgaccttggtgccgactccctcgacaccgtggaactcgtgatggccctcgaagaggcctttgatatcgagatcccagacgaggcggctgagggcatcacgaccgtcggtgatgccgtcaagtacatcgaagacaagcaagcctga

SEQ ID NO: 150514 - protein, 80 aa, Prochlorococcus marinus
MSQEAILEKVRSIVTEQLSVEAGEVKPESSFQNDLGADSLDTVELVMALEEAFDIEIPDEAAEGITTVGDAVKYIEDKQA

SEQ ID NO: 150515 - DNA, 237 bp, Pseudomonas syringae pv
  CDS (1)..(237): transl_table=11
atgagcaccatcgaagagcgcgtcaagaaaatcgttgccgagcaacttggcgtcaaatcagaagaggttgtcaacactgcttctttcgttgaagacctgggcgctgactccctggacaccgttgagctggtaatggctctggaagaggaattcgagaccgaaatccctgacgaagaagcggaaaagatcacgaccgttcaagcagcaatcgactacgtcaacagccatcaggcttaa

SEQ ID NO: 150516 - protein, 78 aa, Pseudomonas syringae pv
MSTIEERVKKIVAEQLGVKSEEVVNTASFVEDLGADSLDTVELVMALEEEFETEIPDEEAEKITTVQAAIDYVNSHQA

SEQ ID NO: 150517 - DNA, 237 bp, Rhizobium leguminosarum
  CDS (1)..(237): transl_table=11
atgagcgatatcgcagaacgcgtaaagaaaattgttattgatcatcttggcgttgatgccgacaaggtcgtcgagagcgccagctttatcgacgatctgggcgctgactcgctcgacacggtcgaactggtcatggctttcgaagaagaattcggcgttgaaattcctgacgacgctgccgactcgatcctcacggtcggcgatgcagtgaagtttattgagaaggcccaggcctga

SEQ ID NO: 150518 - protein, 78 aa, Rhizobium leguminosarum
MSDIAERVKKIVIDHLGVDADKVVESASFIDDLGADSLDTVELVMAFEEEFGVEIPDDAADSILTVGDAVKFIEKAQA

SEQ ID NO: 150519 - DNA, 237 bp, Rhizobium loti
  CDS (1)..(237): transl_table=11
atgagtgacaccgcagagcgcgtcaaaaagatcgtcatcgagcaccttggcgtcgatgccgacaaagtgacggagcaggcgagcttcatcgatgatctgggcgctgacagcctcgacacggtcgaactcgtcatggcgttcgaagaagagttcggcgtggaaattcccgacgacgcggccgagaccatcctgaccgtcggcgacgcggtgaagtacatcgacaaggcttcggcctga

SEQ ID NO: 150520 - protein, 78 aa, Rhizobium loti
MSDTAERVKKIVIEHLGVDADKVTEQASFIDDLGADSLDTVELVMAFEEEFGVEIPDDAAETILTVGDAVKYIDKASA

SEQ ID NO: 150521 - DNA, 237 bp, Rhizobium meliloti
  CDS (1)..(237): transl_table=11
atgagcgatatcgcagaacgcgtgaagaaaattgttattgatcatcttggcgtcgacgccgaaaaggtcagcgaaggcgcaagcttcatcgatgacctcggcgcggactcgctcgacaccgtcgaactggtcatggcattcgaagaggaattcggtgtcgaaatcccggacgacgcagcagattcgatcctcaccgttggcgacgccgtcaagttcatcgagaaagcccaggcctga

SEQ ID NO: 150522 - protein, 78 aa, Rhizobium meliloti
MSDIAERVKKIVIDHLGVDAEKVSEGASFIDDLGADSLDTVELVMAFEEEFGVEIPDDAADSILTVGDAVKFIEKAQA

SEQ ID NO: 150523 - DNA, 246 bp, Rhodopirellula baltica
  CDS (1)..(246): transl_table=11
atggcgtctatcgaagaacgcgtggtcgacattgtttctgaacagctcggcgttgataaagacaaaatcacccgcgaaacatcgttcgtcaacgacctcggtgccgactcgctcgacactgttgaattggtgatggagctcgaagaagagttcgacatcagcattccagatgactccgccgaaaagatccaaaaggtcggcgaagcaatcgatttcatcgaaaaggaaaaaggcgaagacgcctag

SEQ ID NO: 150524 - protein, 81 aa, Rhodopirellula baltica
MASIEERVVDIVSEQLGVDKDKITRETSFVNDLGADSLDTVELVMELEEEFDISIPDDSAEKIQKVGEAIDFIEKEKGEDA

SEQ ID NO: 150525 - DNA, 261 bp, Rickettsia conorii
  CDS (1)..(261): transl_table=11
atggagttcaaaattatgagtacaacggataagatcgaacagaaagttattgaaatggttgctgaaaagctaaataaagataaatcgataataactacggattcaagatttatagaagatttgaaagctgatagccttgataccgtagagttaatgatggcaatagaagttgaatacggtattgatatccctgatgatgaagccactaaaattaaaaccgtatccgatgttataaaatatatcaaagaacgccaatcttaa

SEQ ID NO: 150526 - protein, 86 aa, Rickettsia conorii
MEFKIMSTTDKIEQKVIEMVAEKLNKDKSIITTDSRFIEDLKADSLDTVELMMAIEVEYGIDIPDDEATKIKTVSDVIKYIKERQS

SEQ ID NO: 150527 - DNA, 261 bp, Rickettsia prowazekii
  CDS (1)..(261): transl_table=11
atggagttcaaaattatgagtacaacggacaagatcgaacagaaagttattgaaatggttgctgagaagctaaataaagataaagcgataataactacagattcaagatttatagaagatttgaaagctgatagccttgataccgtagagttaatgatggcaatagaagttgaatacggtattgatatccctgatgatgaagccactaaaattaaaaccgtatccgatgtcataaaatatatcaaagaacgccaatcttaa

SEQ ID NO: 150528 - protein, 86 aa, Rickettsia prowazekii
MEFKIMSTTDKIEQKVIEMVAEKLNKDKAIITTDSRFIEDLKADSLDTVELMMAIEVEYGIDIPDDEATKIKTVSDVIKYIKERQS

SEQ ID NO: 150529 - DNA, 234 bp, Shewanella oneidensis
  CDS (1)..(234): transl_table=11
atgagcaacatcgaagaacgtgtaaagaaaatcattgtagagcaactgggcgttaaagaagaagacgttaaaccagcggcatctttcgttgacgatctgggtgcagattctctggacactgttgagttggttatggctctggaagaagagtttgataccgagatccctgatgaagaagctgaaaagatcactactgttcaagcagcgatcgattacgtttctaagaatcagtaa

SEQ ID NO: 150530 - protein, 77 aa, Shewanella oneidensis
MSNIEERVKKIIVEQLGVKEEDVKPAASFVDDLGADSLDTVELVMALEEEFDTEIPDEEAEKITTVQAAIDYVSKNQ

SEQ ID NO: 150531 - DNA, 246 bp, Synechococcus elongatus
  CDS (1)..(246): transl_table=11
atgaatcaatctgaaattctcgaaaaagtaaaagccattgttgccgatcaactcagtgttgatccagaaaaagttgtacccgaagccagttttgccgaagacctcaacgctgactcccttgactccgtggagttgatcatggcccttgaggaagagtttggcgtggaaattcccgatgaagaggcagaaaaactcaaaaccgtccaagatgtccttgactttatcaacaataaggtagctgcatag

SEQ ID NO: 150532 - protein, 81 aa, Synechococcus elongatus
MNQSEILEKVKAIVADQLSVDPEKVVPEASFAEDLNADSLDSVELIMALEEEFGVEIPDEEAEKLKTVQDVLDFINNKVAA

SEQ ID NO: 150533 - DNA, 243 bp, Synechococcus sp
  CDS (1)..(243): transl_table=11
atgtcccaggaagcgatcctcgagaaagtccgttccatcgtcgcggagcaactcagcgttgatgccggtgaggtgaaacccgagtccaacttccagaacgacctgggcgcggattccctcgacacggtggaactggtgatggccctggaagaggccttcgacatcgaaattcctgacgaagccgctgagggcattaccaccgtgggtgacgccgtcaaatacatcgaagacaagcaggcctga

SEQ ID NO: 150534 - protein, 80 aa, Synechococcus sp
MSQEAILEKVRSIVAEQLSVDAGEVKPESNFQNDLGADSLDTVELVMALEEAFDIEIPDEAAEGITTVGDAVKYIEDKQA

SEQ ID NO: 150535 - DNA, 234 bp, Synechocystis sp
  CDS (1)..(234): transl_table=11
atgaatcaggaaatttttgaaaaagtaaaaaaaatcgtcgtggaacagttggaagtggatcctgacaaagtgacccccgatgccacctttgccgaagatttaggggctgattccctcgatacagtggaattggtcatggccctggaagaagagtttgatattgaaattcccgatgaagtggcggaaaccattgataccgtgggcaaagccgttgagcatatcgaaagtaaataa

SEQ ID NO: 150536 - protein, 77 aa, Synechocystis sp
MNQEIFEKVKKIVVEQLEVDPDKVTPDATFAEDLGADSLDTVELVMALEEEFDIEIPDEVAETIDTVGKAVEHIESK

SEQ ID NO: 150537 - DNA, 300 bp, Thermoanaerobacter tengcongensis; identical to SEQ ID NO: 150085
  CDS (70)..(300): transl_table=11

SEQ ID NO: 150538 - protein, 76 aa, Thermoanaerobacter tengcongensis
MIFEKVRNIIAEQLGIDPEEITMESSFIDDLGADSLDIVELIMALEEEFDIEIPDEDAEKIKTVGDVVEYLSNIVE

SEQ ID NO: 150539 - DNA, 237 bp, Treponema hyodysenteriae
  CDS (1)..(237): transl_table=11
atggcattaatcgatgaaattaaagatgttgttgctaatcaattaaacatctcagacaaaagtaaaatcactgatacagcttctttcgtagatgatttaaacgctgattcacttgatttagtagaattaatcatggaattagaaaaacgttatgaaatcaaaattcctcaagaagatcaagaaaaaatcaaaaatgtagctgatgctgctaaatacattgaagaacataaaaaataa

SEQ ID NO: 150540 - protein, 78 aa, Treponema hyodysenteriae
MALIDEIKDVVANQLNISDKSKITDTASFVDDLNADSLDLVELIMELEKRYEIKIPQEDQEKIKNVADAAKYIEEHKK

SEQ ID NO: 150541 - DNA, 237 bp, Treponema pallidum
  CDS (1)..(237): transl_table=11
gtggatgagttgttcttaagaatgagggcattagtggcagagaaattagaggtggaggaggcgtccatcacgcttgattcctccttccgaggagatctcggtgctgatagcctagatacctacgagttggtctatgcgatcgaagaggagatggggattactatccccgacgaaaaagcaaacgagttcgaaacagtcagagatgcgtacgagttcatcaagtccaaagtgacatga

SEQ ID NO: 150542 - protein, 78 aa, Treponema pallidum
MDELFLRMRALVAEKLEVEEASITLDSSFRGDLGADSLDTYELVYAIEEEMGITIPDEKANEFETVRDAYEFIKSKVT

SEQ ID NO: 150543 - DNA, 249 bp, Tropheryma whipplei
  CDS (1)..(249): transl_table=11
gtgtctttatcaagggagaaagttctcgaaagtattgcccagattgttcatgatgaaactgggatagataaaggtagtgtccagctcgacaaggcattcgttgatgatttagatatagattcaatttccatgatgacgatagttgtcaatgctgaggagaagtacggtatagaaattcccgacgataaggtcagggaattgcgtacggtgggtgatgccgttgactttattattgctgccaaggcataa

SEQ ID NO: 150544 - protein, 82 aa, Tropheryma whipplei
MSLSREKVLESIAQIVHDETGIDKGSVQLDKAFVDDLDIDSISMMTIVVNAEEKYGIEIPDDKVRELRTVGDAVDFIIAAKA

SEQ ID NO: 150545 - DNA, 333 bp, Vibrio cholerae; identical to SEQ ID NO: 150075
  CDS (97)..(333): transl_table=11

SEQ ID NO: 150546 - protein, 78 aa, Vibrio cholerae
MSNIEERVKKIIVEQLGVDEAEVKNESSFVEDLGADSLDTVELVMALEEEFDTEIPDEEAEKITTVQAAIDYVTSNAQ

SEQ ID NO: 150547 - DNA, 234 bp, Vibrio harveyi
  CDS (1)..(234): transl_table=11
atgagcaacatcgaagaacgcgtaaagaaaatcattgttgaacagctaggtgtagacgaagcagaagttaaaaacgaagcttctttcgttgacgatctaggtgctgattctctagacactgtagagctagtaatggctctagaagaggaattcgacactgagattcctgatgaagaagcagagaaaatcactactgttcaagctgcaatcgactacgtaaacagcgctcagtaa

SEQ ID NO: 150548 - protein, 77 aa, Vibrio harveyi
MSNIEERVKKIIVEQLGVDEAEVKNEASFVDDLGADSLDTVELVMALEEEFDTEIPDEEAEKITTVQAAIDYVNSAQ

SEQ ID NO: 150549 - DNA, 237 bp, Vibrio marinus
  CDS (1)..(237): transl_table=11
atgagtaacttcgaagaacgcgtaaaaaaaatcattatcgaacaacttggtgttaaagaagaagaagttaaaaacgaagcttcttttgttgatgacctaggtgcagattctctagatacagttgaacttgttatggctctagaagaagaattcgatactgatatccctgatgatgaagcagagaaaatcactactgttcaagctgcgatcgactacgttgtttctagtgctgaataa

SEQ ID NO: 150550 - protein, 78 aa, Vibrio marinus
MSNFEERVKKIIIEQLGVKEEEVKNEASFVDDLGADSLDTVELVMALEEEFDTDIPDDEAEKITTVQAAIDYVVSSAE

SEQ ID NO: 150551 - DNA, 237 bp, Vibrio vulnificus
  CDS (1)..(237): transl_table=11
atgagcaacctcgaagaacgcgtaaagaaaatcattgttgaacaactaggtgttgatgagtctgaagttaaaaacgaagcttctttcgtagacgacctaggtgctgattctctagacaccgttgaactagtaatggcactagaagaagaattcgacactgagatccctgacgaagaagctgaaaagattacaactgttcaagctgcgatcgattacgtaactgcgaacgctcagtaa

SEQ ID NO: 150552 - protein, 78 aa, Vibrio vulnificus
MSNLEERVKKIIVEQLGVDESEVKNEASFVDDLGADSLDTVELVMALEEEFDTEIPDEEAEKITTVQAAIDYVTANAQ

SEQ ID NO: 150553 - DNA, 237 bp, Wigglesworthia glossinidia brevipalpis
  CDS (1)..(237): transl_table=11
atgagcactatcgaagaaagcgttaaatctattattgcagagcagttaggagttaaaaaagaagaagtaacaaataatgcatctttcgtggatgatcttggagctgactctttagacacagtggaattagttatggcgttagaagaagagtttgacacagagataccagacgaagaagcagaaaaaattactacagttcaagcagctattgattttattaaagaaagtaaaaaataa

SEQ ID NO: 150554 - protein, 78 aa, Wigglesworthia glossinidia brevipalpis
MSTIEESVKSIIAEQLGVKKEEVTNNASFVDDLGADSLDTVELVMALEEEFDTEIPDEEAEKITTVQAAIDFIKESKK

SEQ ID NO: 150555 - DNA, 231 bp, Wolinella succinogenes
  CDS (1)..(231): transl_table=11
atggctatttttgatgatattaaagaagtcgtggtcgaacagctcaatgtcaaccccgaagaggtgaaggaagaatccaagtttgttgaagatttgggggctgactctttggatgtggttgagcttgtcatggctctcgaagagaagtttaatatcgagattcctgatgaggaagccgaaaaaatcgctaccgtgggcgatgtggttcgatacatcgaaaccaacaagtaa

SEQ ID NO: 150556 - protein, 76 aa, Wolinella succinogenes
MAIFDDIKEVVVEQLNVNPEEVKEESKFVEDLGADSLDVVELVMALEEKFNIEIPDEEAEKIATVGDVVRYIETNK

SEQ ID NO: 150557 - DNA, 240 bp, Xanthomonas axonopodis pv
  CDS (1)..(240): transl_table=11
atgagcaccatcgaagaacgcgtcaagaaaatcgtcgtcgaacaactcggcgtcaaggaagaggaagtcaccaccagcgcatcgttcgtcgatgatctgggtgccgactcgctggacaccgtcgagctggtgatggcgctggaagaagagttcgagtgcgagatcccggacgaagaggccgagaagatcacctcggtgcagcaggcgatcgactacgtcaaggctcacgtcaagagctga

SEQ ID NO: 150558 - protein, 79 aa, Xanthomonas axonopodis pv
MSTIEERVKKIVVEQLGVKEEEVTTSASFVDDLGADSLDTVELVMALEEEFECEIPDEEAEKITSVQQAIDYVKAHVKS

SEQ ID NO: 150559 - DNA, 240 bp, Xanthomonas albilineans
  CDS (1)..(240): transl_table=11
atgagcaccatcgaagaacgcgtcaagaaaatcgtcgtcgaacaactcggcgtcaaggaagaagaagtcaccaacagcgcatcgttcgtcgatgacctcggtgcggactcgctggacaccgtcgagttggtgatggccctggaagaagagttcgagtgcgagattccggacgaagaggccgagaagattacctcggtgcagcaggctatcgactacgtcaaggtgcacgtcaagagctga

SEQ ID NO: 150560 - protein, 79 aa, Xanthomonas albilineans
MSTIEERVKKIVVEQLGVKEEEVTNSASFVDDLGADSLDTVELVMALEEEFECEIPDEEAEKITSVQQAIDYVKVHVKS

SEQ ID NO: 150561 - DNA, 240 bp, Xylella fastidiosa
  CDS (1)..(240): transl_table=11
atgagtgacatcgaagcgcgcgtcagaaaaattgtcgccgagaaactcaatgtcgatgaagaaaaagtaactaatacctcgacgttcgtcgatgaactgggtgcggattcgttggataccgtcgagttggtgatggccttggaagacgagttccaatgtgagatcggtgacgaggctgctgagaagatgacttcggtgcaacatgctatcgactacattaagagtaatgctaagtgctaa

SEQ ID NO: 150562 - protein, 79 aa, Xylella fastidiosa
MSDIEARVRKIVAEKLNVDEEKVTNTSTFVDELGADSLDTVELVMALEDEFQCEIGDEAAEKMTSVQHAIDYIKSNAKC

SEQ ID NO: 150563 - DNA, 237 bp, Yersinia pestis
  CDS (1)..(237): transl_table=11
atgagcactatcgaagaacgcgttaagaaaatcatcgttgaacaactgggtgttaaagaagacgaagtgaagaacagtgcttctttcgttgaagatcttggcgcggattctctggacaccgtcgagctggtaatggctctggaagaagaatttgataccgagattccagacgaagaagcagagaaaatcactactgttcaggcagctattgattttatcaacgctaaccagcagtaa

SEQ ID NO: 150564 - protein, 78 aa, Yersinia pestis
MSTIEERVKKIIVEQLGVKEDEVKNSASFVEDLGADSLDTVELVMALEEEFDTEIPDEEAEKITTVQAAIDFINANQQ

SEQ ID NO: 150565 - DNA, 408 bp, Oryza sativa
  CDS (1)..(408)
atggccggggcgaggagcctgctcctgaggcacctccgcgtggcggtggccccttcctcctcctcaccggcggcgtccctcaggcccgtggtggcgctgcgcgaggccctgtgtgcccggcggtggatgtcgtcggaggaggccaaggggtcgttcctggacaaggccgaggtcaccgagcgcatcgtcaaggtcgtcaggaacttccagaagatcgacgaccccgccaaggtcacaccagatgcacatttcaagaatgatcttggtctagacagtttggacgcagtggaggttgtcatggctttggaagaggaatttggttttgagatacctgacaatgaagctgacaagatcgactccattaaagttgcagttgatttcattgcttcacacccccaagcaaaatga

SEQ ID NO: 150566 - protein, 135 aa, Oryza sativa
MAGARSLLLRHLRVAVAPSSSSPAASLRPVVALREALCARRWMSSEEAKGSFLDKAEVTERIVKVVRNFQKIDDPAKVTPDAHFKNDLGLDSLDAVEVVMALEEEFGFEIPDNEADKIDSIKVAVDFIASHPQAK

SEQ ID NO: 150567 - DNA, 423 bp, Oryza sativa
  CDS (1)..(423)
atggctgctcccatcaccgccgccacatcgcctctctcccctgcgtctcgggttcaggtgatgtgctcaatgctcaatccaacctcagcttctttctccaggcaaacagcaagcttcccgtccattcggttgcgcccggtcccaagtcgcttccaggccttgtcttgttcggccaaacaagacactattgataaggtttgcgaaatagttaagaatcagttagcagtagatgaaggcactgccgtttctggagaaacaaaattcgtggaccttggtgctgattcacttgacacggttgaaattgtgatgggccttgaggaggcatttcagattaccgtggacgaatcgagtgcgcaagtgattcagacagtggaggatgctgctgtgcttatcgacaagcttgtggcagagaaggacgcctaa

SEQ ID NO: 150568 - protein, 140 aa, Oryza sativa
MAAPITAATSPLSPASRVQVMCSMLNPTSASFSRQTASFPSIRLRPVPSRFQALSCSAKQDTIDKVCEIVKNQLAVDEGTAVSGETKFVDLGADSLDTVEIVMGLEEAFQITVDESSAQVIQTVEDAAVLIDKLVAEKDA

SEQ ID NO: 150569 - DNA, 384 bp, Oryza sativa
  CDS (1)..(384)
atggcggcggcgaggagggccctcctgagccacctgcgcgtgccggtgctggctcgtcccgccgcggcggcgggaagcgtccccgccgcgcggctcctgtcgtcggcgacggaggaggggtccaagggctcgttcctcgacaagggcgaggtcgccgaccgcatcgtctccgtcgtcaagaacttccagaaggtcgagccctccaaggtgacaccaaatgctcatttccagaaggacctcggacttgatagcttggatacagttgagattgtcatggcctttgaggaagaatttggcttcgagatcccagataacgaggcagagaagattgactccatcaaaacggcagttgacttcgttgcctctcatcctcaagcaaaataa

SEQ ID NO: 150570 - protein, 127 aa, Oryza sativa
MAAARRALLSHLRVPVLARPAAAAGSVPAARLLSSATEEGSKGSFLDKGEVADRIVSVVKNFQKVEPSKVTPNAHFQKDLGLDSLDTVEIVMAFEEEFGFEIPDNEAEKIDSIKTAVDFVASHPQAK

SEQ ID NO: 150571 - DNA, 396 bp, Oryza sativa
  CDS (1)..(396)
atggcggcggcggcgctccgaccggcgatcctccgccgcatccgcctctccccctcccctgcggcggctgcgggggccgcggcggcgtcccagccccacgccctggcgcggtggctcgcgcggcccatgtcctcccacgacgcccacctcacccgcgacgaggtcgtcgaccgcctcctcgacgtcctcaagtgccaccccaaggttgacccctccaaggtgagtcccgaggcgcacttcgagaaggatctggggctggacagcctggacacggtggaggtggtgatggcgatcgaggaggagttcaagctcgagatccccgaccaggaggccgacaagatcgactccctcccgctcgccatcgagtacgtcgccaaccaccccatggccgcctga

SEQ ID NO: 150572 - protein, 131 aa, Oryza sativa
MAAAALRPAILRRIRLSPSPAAAAGAAAASQPHALARWLARPMSSHDAHLTRDEVVDRLLDVLKCHPKVDPSKVSPEAHFEKDLGLDSLDTVEVVMAIEEEFKLEIPDQEADKIDSLPLAIEYVANHPMAA

SEQ ID NO: 150573 - DNA, 417 bp, Oryza sativa
  CDS (1)..(417)
atggcttcctccctcgccggatccgccctctccttcgccacccccgtcaaggcagtcaagactaattcgatatctttcaccagcgcaaggaagggaaatgcatttctccgcctgcagccagtgcctatgagatttgctgtttgctgtgccgcaaaaaaggagacagtggagaaggtttgtgacattgttaagaagcaactcgctgttcctgagggcactgaagtttctggtgcatccaagttctcagatcttggtgctgattcactggacacggttgagattgtgatgggtctcgaggaggagttccacatcagcgtcgaagagtcaagtgcgcagtcaattgcaacggttgaagatgccgctgcactcatcgacaagcttgttgagcagaaatctgctgaagcgaaatcatcttga

SEQ ID NO: 150574 - protein, 138 aa, Oryza sativa
MASSLAGSALSFATPVKAVKTNSISFTSARKGNAFLRLQPVPMRFAVCCAAKKETVEKVCDIVKKQLAVPEGTEVSGASKFSDLGADSLDTVEIVMGLEEEFHISVEESSAQSIATVEDAAALIDKLVEQKSAEAKSS

SEQ ID NO: 150575 - DNA, 408 bp, Oryza sativa
  CDS (1)..(408)
atggccgccttcaccaccaccgccgccggatccgccgtcgccttcgcgcggccagccaaggcaatcaatgtcagttcagtctctttcgctggtttaaggaagaacaatgtggctttcactctgcagccagtgacacaaagatttgcagttctccgtgctgccaaaaaggaaacagtggagaaggtttgtgatattgtaaagaagcagcttgtacttcctgaaggcactgacgttactggtgcctctaagttcaccgatcttggtgctgattccctggatacggttgagattgttatgggtcttgaagaggctttcaagatcagtgtcgatgaatcaagcgcgcagtcaattgcgacagtggaggatgctgctgagctcatcgacaagattgtttctaatgcaaagtaa

SEQ ID NO: 150576 - protein, 135 aa, Oryza sativa
MAAFTTTAAGSAVAFARPAKAINVSSVSFAGLRKNNVAFTLQPVTQRFAVLRAAKKETVEKVCDIVKKQLVLPEGTDVTGASKFTDLGADSLDTVEIVMGLEEAFKISVDESSAQSIATVEDAAELIDKIVSNAK

SEQ ID NO: 150577 - DNA, 447 bp, Oryza sativa
  CDS (1)..(447)
atggccgccgcgctgtccgccgtcgtctccgccaagctcggctgcccgccggcggcggcgctcggtagctggaagggaagcagaatttcaagcagaaacctggtctccatgaagacgatgacagcaaggagaggcctcgtctccctcagatcccctcgcttccgcgtcttctgcgcggcgaaggcggagacggtggggaaggtgatgcagatagtgaagcagcagctggcgctgggggaggaggcgaagctggcgccggagtcgcagttcacggagctgggagcggactcgctggacacggtggagatcgtgatggcgctggaggaggagttcgggatcaccgtggaggaggacaacgcccagagcatcaccaccatccaggacgccgccgacctcatcgacaagctcgtcgccggcggcggcggcaagccccccgccgccgcctga

SEQ ID NO: 150578 - protein, 148 aa, Oryza sativa
MAAALSAVVSAKLGCPPAAALGSWKGSRISSRNLVSMKTMTARRGLVSLRSPRFRVFCAAKAETVGKVMQIVKQQLALGEEAKLAPESQFTELGADSLDTVEIVMALEEEFGITVEEDNAQSITTIQDAADLIDKLVAGGGGKPPAAA

SEQ ID NO: 150579 - DNA, 396 bp, Brassica napus
  CDS (1)..(396)
atggcggcgagaaatgctcttcttcgatacctccgagtcaacgtcaatccatcacttgcaagccctacaacaatctgcgctcgagaatcagcactccctttcaccgtacttcttcggcgtttctcggaggaagtgagaggatcgtttctcgacaaatctgacgtcacagatcgcgtaatcactgtcgtcaaaaacttccaaagagtcgatccctcaaaggtaacaccaaaagcccatttccttaacgatctcgggttagacagtttggacagtgtggaagttgtgatggcattggaggaagaatttaaatttgagatccctgataatgaagctgacaagatcctgtccgtcgatcaagcggttgattttatcgcctctcatcctcaggctacttaa

SEQ ID NO: 150580 - protein, 131 aa, Brassica napus
MAARNALLRYLRVNVNPSLASPTTICARESALPFTVLLRRFSEEVRGSFLDKSDVTDRVITVVKNFQRVDPSKVTPKAHFLNDLGLDSLDSVEVVMALEEEFKFEIPDNEADKILSVDQAVDFIASHPQAT

SEQ ID NO: 150581 - DNA, 363 bp, Brassica napus
  CDS (1)..(363)
atggcactgagaactgcagtccttcgtcaccttagggttccggtgacgggatcgaaccagtctcaaattgggttccttggttcgatccgtgctttctcgtcgcacgatgatcatctcagcaagcaggaagtcgtcgacagagtcctcgacgttgtcaaatgcttccctaaagtcgatccagctaaggtgactcctgatgttcatttccagaaggatctggggttagatagtttggacactgtggagatagtgatggctattgaagaggagttcaagcttgagatcccagacaaagaagctgacaagatcgactcttgccctcttgccattgaatacgttttcaaccatccaatgtctagctaa

SEQ ID NO: 150582 - protein, 120 aa, Brassica napus
MALRTAVLRHLRVPVTGSNQSQIGFLGSIRAFSSHDDHLSKQEVVDRVLDVVKCFPKVDPAKVTPDVHFQKDLGLDSLDTVEIVMAIEEEFKLEIPDKEADKIDSCPLAIEYVFNHPMSS

SEQ ID NO: 150583 - DNA, 396 bp, Brassica napus
  CDS (1)..(396)
atggcggcgagaaatgctcttcttcgatacctccgagtcaacgtcaatccatcacttgcaagccctacaacaatcggcgcccgagaatcggcactccctttcaccgtccttcttcggcgtttctcggaggaagtgagaggatcgtttctcgacaaatctgatgtcacagatcgcgtaatcactgtcgtcaaaaacttccaaagagtcgatccctcaaaggtaacaccaaaagcccatttccttaacgatctcgggttagacagtttggacagtgtggaagttgtgatggcattggaggaagaatttaaatttgagatccctgataatgaagctgacaagatcctgtccgtcgatcaagcggttgattttatcgcctctcatcctcaggctacttaa

SEQ ID NO: 150584 - protein, 131 aa, Brassica napus
MAARNALLRYLRVNVNPSLASPTTIGARESALPFTVLLRRFSEEVRGSFLDKSDVTDRVITVVKNFQRVDPSKVTPKAHFLNDLGLDSLDSVEVVMALEEEFKFEIPDNEADKILSVDQAVDFIASHPQAT

SEQ ID NO: 150585 - DNA, 384 bp, Glycine max
  CDS (1)..(384)
atgcaaagcataaggaaatctatcttgactcgtgtgaatttgaggagatcaaccgaaagatggtttttgaccagggatgaggttgtgcatatgcaattgagatgttggtgctcttcaacagctgtcagctctgatcaaatactggaccgagtgattgcactggccaagaaatatgataaaattgatggctcaaaggtcactgaaacagctgattttcaaaaagacttgaacctggacagtttggaccgagtggaactcattatggcccttgaagaagaattttctattgaaatccctgatgagaaggctgataagcttgcttgctgtgctgatattgcaaaatacatagcagaggttgatcagaaaaacctggaaaagccctga

SEQ ID NO: 150586 - protein, 127 aa, Glycine max
MQSIRKSILTRVNLRRSTERWFLTRDEVVHMQLRCWCSSTAVSSDQILDRVIALAKKYDKIDGSKVTETADFQKDLNLDSLDRVELIMALEEEFSIEIPDEKADKLACCADIAKYIAEVDQKNLEKP

SEQ ID NO: 150587 - DNA, 396 bp, Zea mays
  CDS (1)..(396)
atggcggcggcgaggagcctgcttctgaggcacctccgcttggcggcggccccgtcagcggcgtccgtgaggccgacggcgtcgttgcatgaggccctgtgggggcagcggtggatgtcttcggaggatgccaagggctctttcctggataagagcgaggtcactgaacgcatcatcaaggtcgtcaagagcttcccgaagatcgatgacccctccaaggtgacaccagatgcccatttcaagaatgatcttggcctagacagtttggatgcagtggaggttgtcatggccctggaagaggaattcagattcgagatacctgacaatgaagctgacaagattgactccgtcaaagttgcagttgacttcattgcctcacacccgcaagcgaaatga

SEQ ID NO: 150588 - protein, 131 aa, Zea mays
MAAARSLLLRHLRLAAAPSAASVRPTASLHEALWGQRWMSSEDAKGSFLDKSEVTERIIKVVKSFPKIDDPSKVTPDAHFKNDLGLDSLDAVEVVMALEEEFRFEIPDNEADKIDSVKVAVDFIASHPQAK

SEQ ID NO: 150589 - DNA, 384 bp, Zea mays
  CDS (1)..(384)
atggcgatggcggcggcgaggagagcgctcctggcccacctccgcgtgccggtggtccaccctgcagcggcggcagcgaccatccccgcggcagggcggctcctgtcgtcgacgacggagacaaaggggtcgttcctcgacaagggcgaggtcgctgaccgtgtcgtctccgtcgtcaagaacttccagaaggtcgaaccctcaaaggtgacacctagtgctcattttcagaaggaccttggacttgatagcttggacactgtggagatcgtgatggcgtttgaggaagaattttcctttgagattcctgacaacgaagcagagaagattgactccatcaagacagcggttgatttcattgcttcgcatcctcaagcaaaataa

SEQ ID NO: 150590 - protein, 127 aa, Zea mays
MAMAAARRALLAHLRVPVVHPAAAAATIPAAGRLLSSTTETKGSFLDKGEVADRVVSVVKNFQKVEPSKVTPSAHFQKDLGLDSLDTVEIVMAFEEEFSFEIPDNEAEKIDSIKTAVDFIASHPQAK

SEQ ID NO: 150591 - DNA, 402 bp, Zea mays
  CDS (1)..(402)
atggcggcggcagcgctccgtccggcgatcctccgccgcatccgcctctccccctccccttcgctcgccctcgccgccgctgggacaggtgcatcccacccgcacgcgctggcgcggtggctcgcgcggcccatgtcctcccacgacgcgcacctcacccgcgacgaagtcatcgaccggatcctcgacgtcatcaagagccaccccaagatcgacccctccaaggtgaccccggaggcgcacttcgagaaggatctggggctcgacagcctggacaccgtcgaggtggtcatggccatcgaggaggagttcaagctcgagatcccagacatggaggctgacaagatcgactcactccctctggccatcgagtacgtcgccaaccaccccatggctggctga

SEQ ID NO: 150592 - protein, 133 aa, Zea mays
MAAAALRPAILRRIRLSPSPSLALAAAGTGASHPHALARWLARPMSSHDAHLTRDEVIDRILDVIKSHPKIDPSKVTPEAHFEKDLGLDSLDTVEVVMAIEEEFKLEIPDMEADKIDSLPLAIEYVANHPMAG

SEQ ID NO: 150593 - DNA, 402 bp, Zea mays
  CDS (1)..(402)
atggcggcggcagcgctccgtccggcgatcctccgccgcatccgcctctccccctccccttcgctcgccctcgccgccgctgggacaggtgcatcccacccgcacgcgctggggcggtggctcgcgcggcccatgtcctcccacgacgcgcacctcacccgcgacgaagtcatcgaccggatcctcgacgtcatcaagagccaccccaagatcgacccctccaaggtgaccccggaggcgcacttcgagaaggatctggggctcgacagcctggacaccgtcgaggtggtcatggccatcgaggaggagttcaagctcgagatcccagacatggaggctgacaagatcgactcactccctctggccatcgagtacgtcgccaaccaccccatggctggctga

SEQ ID NO: 150594 - protein, 133 aa, Zea mays
MAAAALRPAILRRIRLSPSPSLALAAAGTGASHPHALGRWLARPMSSHDAHLTRDEVIDRILDVIKSHPKIDPSKVTPEAHFEKDLGLDSLDTVEVVMAIEEEFKLEIPDMEADKIDSLPLAIEYVANHPMAG

SEQ ID NO: 150595 - DNA, 384 bp, Zea mays
  CDS (1)..(384)
atggcgatggcggcggcgaggagagcgctcctggcccacctccgcgtgccggtggtccaccctgcagcggcggcagcgaccatccccgcggcagggcggctcctgtcgtcgacgacggagacaaaggggtcgttcctcgacaagggcgaggtcgctgaccgtgtcgtctccgtcgtcaagaacttccagaaggttgaaccctcaaaggtgacacctagtgctcattttcagaaggaccttggacttgatagcttggacactgtggagatcgtgatggcgtttgaggaagaattttcctttgagattcctgacaacgatgcagagaagattgactccatcaagacagcggttgatttcattgcttcgcatcctcaagcaaaataa

SEQ ID NO: 150596 - protein, 127 aa, Zea mays
MAMAAARRALLAHLRVPVVHPAAAAATIPAAGRLLSSTTETKGSFLDKGEVADRVVSVVKNFQKVEPSKVTPSAHFQKDLGLDSLDTVEIVMAFEEEFSFEIPDNDAEKIDSIKTAVDFIASHPQAK

SEQ ID NO: 150597 - DNA, 411 bp, Zea mays
  CDS (1)..(411)
atgcaaacagtacggagtgcggtgctgcagcacctccggctccgcgcggcggctcctattgctgcacgtggaggcggcggcgggttcgctcggaggatgagcgcgccggcgggccaggagggcagtagcggcagcagctccgaactggagagggacatcaggacgcgcgtcgttaacctggtcaagaagttcgacaagatcgacgccgacaaggtgaccgagactgcagacttccaaaaggacctgagcttggacagcttagaccgggtggaacttgttatggcctttgaacaagagttctccgttgagatccctgatgacaaggctgacaagctgacctgttgtgcggatgttgccaagtacatcatatccgaatctgaagcgagtgatacaaatgccggtggatcctga

SEQ ID NO: 150598 - protein, 136 aa, Zea mays
MQTVRSAVLQHLRLRAAAPIAARGGGGGFARRMSAPAGQEGSSGSSSELERDIRTRVVNLVKKFDKIDADKVTETADFQKDLSLDSLDRVELVMAFEQEFSVEIPDDKADKLTCCADVAKYIISESEASDTNAGGS

SEQ ID NO: 150599 - DNA, 25 bp, Artificial sequence
  primer
atgtttagatccgtttgccgcattt

SEQ ID NO: 150600 - DNA, 23 bp, Artificial sequence
  primer
ttagtttgcgtcgggattggaag

SEQ ID NO: 150601 - protein, 74 aa, Artificial sequence
  consensus sequence
  Variant (2)..(12): Xaa in position 2 to 12 is any amino acid
  Variant (13)..(33): Xaa in position 13 to 33 is any or no amino acid
  Variant (35)..(35): Xaa in position 35 is any amino acid
  Variant (36)..(36): Xaa in position 36 is any or no amino acid
  Variant (38)..(38): Xaa in position 38 is any amino acid
  Variant (41)..(41): Xaa in position 41 is any amino acid
  Variant (46)..(46): Xaa in position 46 is any amino acid
  Variant (49)..(50): Xaa in position 49 to 50 is any amino acid
  Variant (52)..(53): Xaa in position 52 to 53 is any amino acid
  Variant (55)..(56): Xaa in position 55 to 56 is any amino acid
  Variant (58)..(60): Xaa in position 58 to 60 is any amino acid
  Variant (64)..(64): Xaa in position 64 is any amino acid
  Variant (65)..(65): Xaa in position 65 is any or no amino acid
  Variant (67)..(71): Xaa in position 67 to 71 is any amino acid
  Variant (72)..(73): Xaa in position 72 to 73 is any or no amino acid
LXXXXXXXXXXXXXXXXXXXXXXXXXXXXXXXXFXXDXLGXDSLDXVEXXMXXEXXFXXXIPDXXAXXXXXXXV

SEQ ID NO: 150602 - protein, 25 aa, Artificial sequence
  protein pattern
  Variant (3)..(3): Xaa in position 3 is any amino acid
  Variant (4)..(4): Xaa in position 4 is Ala or Leu
  Variant (9)..(9): Xaa in position 9 is any amino acid
  Variant (12)..(12): Xaa in position 12 is Ala, Ile, Leu or Val
  Variant (13)..(13): Xaa in position 13 is Ile, Leu, Met or Val
  Variant (14)..(14): Xaa in position 14 is Leu, Met or Val
  Variant (15)..(15): Xaa in position 15 is Ala, Glu, Gly, Asn, Ser or Thr
  Variant (16)..(16): Xaa in position 16 is Phe, Ile, Leu, Met or Val
  Variant (18)..(18): Xaa in position 18 is any or no amino acid
  Variant (20)..(22): Xaa in position 20 to 22 is any amino acid
  Variant (23)..(24): Xaa in position 23 to 24 is any or no amino acid
DLXXDSLDXVEXXXXXEXEXXXXXI

SEQ ID NO: 150603 - DNA, 723 bp, Saccharomyces cerevisiae
  CDS (1)..(723)
atgtggtcatcactttttggttggacatcaagtaatgccaagaataaagagtcaccaacaaaggccatagtgcggttgagggagcatatcaaccttctatccaaaaagcaatcgcatttacgtactcaaattacaaatcaagagaatgaagctagaatctttttgacgaagggcaataaagtaatggcgaagaatgcacttaaaaagaagaagacaatcgaacaacttttaagtaaggtagaaggcacaatggagtctatggaacagcagctattctctatagaaagtgcaaacttaaatctagagacaatgagggctatgcaggaaggtgctaaggcaatgaaaactattcacagtggccttgacatagataaagtggatgaaactatggacgagataagggagcaagtcgaattaggagatgaaataagcgacgctatatccaggcctttaattactggggcaaacgaggtggatgaagatgagctggacgaggaattggacatgctggctcaagaaaatgctaaccaagaaacgtccaagatcgttaataataatgttaatgcggcgcctatctcagagaacaaagtctcactacctagtgttccaagtaataaaattaaacaaagtgagaactctgtgaaggacggggaagaggaagaggatgaagaagatgaagatgaaaaagcattaagagaactacaagcagaaatggggctttga

SEQ ID NO: 150604 - protein, 240 aa, Saccharomyces cerevisiae
MWSSLFGWTSSNAKNKESPTKAIVRLREHINLLSKKQSHLRTQITNQENEARIFLTKGNKVMAKNALKKKKTIEQLLSKVEGTMESMEQQLFSIESANLNLETMRAMQEGAKAMKTIHSGLDIDKVDETMDEIREQVELGDEISDAISRPLITGANEVDEDELDEELDMLAQENANQETSKIVNNNVNAAPISENKVSLPSVPSNKIKQSENSVKDGEEEEDEEDEDEKALRELQAEMGL

SEQ ID NO: 150605 - DNA, 663 bp, Oryza sativa (japonica cultivar-group)
  CDS (1)..(663)
atgtcgggggtgttcggcaaggtgttcgggaagtccaaggcgcagagccaggccaccgcgctggcctccatcgacaagctcagcgagactcttgaaatgctggaaaagaaagaaaatttgctagtgaagaaagcgaatcttgaggttgagaaggccaagaccttcactaaagcgaagaataaaagagctgcaatacaatgcttaaagaggaagagattatatgagcaacagattgagcagcttggtaatttccaattaaggatacatgatcagatgataatgctggaaggtgcaaaggctacaacagagactgttgatgcattgagaactggagcatcggcgatgaaagcaatgcacaaagcgacaaatattgacgacgttgacaagacaatggatgaaattaatgacaatatggagaatatgaggcagatccaggatctactatctgctcctattggagctgcagctgattttgatgaagatgagctggaagctgaattagcagatctggagggggaggaattggaggcagagcttctagcacctacaacgactgcccctactgctccagtgcgtgtacagcaaccaactcggccttctgcccagagcagcaaaactgaagatgacgagttggcagctttgcaggcagagatggctatgtaa

SEQ ID NO: 150606 - protein, 220 aa, Oryza sativa (japonica cultivar-group)
MSGVFGKVFGKSKAQSQATALASIDKLSETLEMLEKKENLLVKKANLEVEKAKTFTKAKNKRAAIQCLKRKRLYEQQIEQLGNFQLRIHDQMIMLEGAKATTETVDALRTGASAMKAMHKATNIDDVDKTMDEINDNMENMRQIQDLLSAPIGAAADFDEDELEAELADLEGEELEAELLAPTTTAPTAPVRVQQPTRPSAQSSKTEDDELAALQAEMAM

SEQ ID NO: 150607 - DNA, 663 bp, Oryza sativa (japonica cultivar-group)
  CDS (1)..(663)
atgttcaacaggctctttggtaagcccaaggagcaggccaatgctagtgcgttggccacgcttgataagttaaatgagacccttgacatgctggagaagaaggagaaagtcttagagaaaaaggcagccgcagaactggagagggctaaggagttctcaaaagcaaagaataaaagagcggctatccaatccttgaagagaaaaaagctttatgaacaacaaattgagcagctagggaacttccagttgagaattcatgatcagatgatcatgttagaagctgcaaaagctacgacagaaaccgttgatgctttgaggactggagctgcagctatgaaagcaatgcaaaaggcgacaaatattgatgacgttgataagactatggatgaaattaatgaacagactgaaaacatgaaacaaatacaagatgctttgtcagcccctcttggagcatctgctgattttgatgaggacgaactagaggcagaactggaagaactggagggagcagaattggaatctcagcttctcgagcctgttgcagctccacctgtgcatccagtgcaggtcccaggcaccaggataccaactcgccctgctccacagaaagcatcagctgaggaggatgagcttgcagccttgcaagctgaaatggcattgtga

SEQ ID NO: 150608 - protein, 220 aa, Oryza sativa (japonica cultivar-group)
MFNRLFGKPKEQANASALATLDKLNETLDMLEKKEKVLEKKAAAELERAKEFSKAKNKRAAIQSLKRKKLYEQQIEQLGNFQLRIHDQMIMLEAAKATTETVDALRTGAAAMKAMQKATNIDDVDKTMDEINEQTENMKQIQDALSAPLGASADFDEDELEAELEELEGAELESQLLEPVAAPPVHPVQVPGTRIPTRPAPQKASAEEDELAALQAEMAL

SEQ ID NO: 150609 - DNA, 651 bp, Oryza sativa (japonica cultivar-group)
  CDS (1)..(651)
atgctgaagaaactgctatcaaagcctaagagcaagaagaaggaggctgcctcctctgcgctccccactttggatcgtctccatgagactctagaaatgctggagaagaaagagtgctttcttcagaagaaggcttctgcagaagttgaaaaggctaaggattatacaaaagctaagaacaaaagcgctgcaattcagtgtctaaagaaaaagaagctgtatgaaacacaaattgagcagctagcaaatttccaattgcgagttcatgatcagataataatgcttgagagcgcaaaggcaaccacagataccgttgatgctttgcgctctggatcatctgctgtcaaagctattcatcagtcagtgagtattgatgacattgaaaatgccattgaagaggcaaatgaacacacagaaaatatgaggcagatacaggaggcacttgcaacaccaattggcgcttctgctgatttcgacgaggatgaactagaagcagagctggaagatctggaggaggaagagctcgaccatgagctgcctgaaccacctcagagtacacgcatggaaccatcagcgagagttacaacttcatctcaaccagccaatgatttggctgaactgaccaaacttcaagcagagatggcgctttaa

SEQ ID NO: 150610 - protein, 216 aa, Oryza sativa (japonica cultivar-group)
MLKKLLSKPKSKKKEAASSALPTLDRLHETLEMLEKKECFLQKKASAEVEKAKDYTKAKNKSAAIQCLKKKKLYETQIEQLANFQLRVHDQIIMLESAKATTDTVDALRSGSSAVKAIHQSVSIDDIENAIEEANEHTENMRQIQEALATPIGASADFDEDELEAELEDLEEEELDHELPEPPQSTRMEPSARVTTSSQPANDLAELTKLQAEMAL

SEQ ID NO: 150611 - DNA, 642 bp, Arabidopsis thaliana
  CDS (1)..(642)
atgtttatgaatcggctattcgggaaacccaaacaggagactagtactctccaaacgttagacaagctcaatgagactcttgagatgttagagaagaaggagaatgttcttctcaagaaagctactggagaggttgagaaagctaaggaattctcccgggcgaagaacaaacgcgcggctatacaatgtttgaaaaggaaaaggttatatgagcaacaagttgaacagctcgggaatttccagctccgtattcatgatcaaatgattatgttagaaggtgctaaagcaacaacagagactgtagatgctttgaggactggagcttctgcaatgaaagctatgcagaaagcaacaaacattgatgatgttgacaagacaatggatgagatcaatgaacaaactgagaacatgaaacagatccaagaagcattgtcggctccatttggggctaatgattttgatgaggatgaattggaagcagaacttgacgaactagaaggcgctgagctagaagagcaacttcttcagcctgttccaatccatgtgcctcaaggaaacaagcctgctcgtgctccagctcagaagcaacctactgctgaggaagatgaactcgctgccttacaagctgagatggctctctaa

SEQ ID NO: 150612 - protein, 213 aa, Arabidopsis thaliana
MFMNRLFGKPKQETSTLQTLDKLNETLEMLEKKENVLLKKATGEVEKAKEFSRAKNKRAAIQCLKRKRLYEQQVEQLGNFQLRIHDQMIMLEGAKATTETVDALRTGASAMKAMQKATNIDDVDKTMDEINEQTENMKQIQEALSAPFGANDFDEDELEAELDELEGAELEEQLLQPVPIHVPQGNKPARAPAQKQPTAEEDELAALQAEMAL

SEQ ID NO: 150613 - DNA, 660 bp, Arabidopsis thaliana
  CDS (1)..(660)
atgatgaatcggctattcgggaaacccaagcaggaggctaatgctctccaaactttagacaagcttaacgagacgcttgagatgctagagaaaaaggagaaagtactcttgaagaaagctggtgcagaggttgagaaggcaaaagaatactcccgggctaagaacaaacgagcggctatacagtgtttgaaaaggaagaggttatatgagggacaagtcgaacagcttgggaatttccagctccgtattcatgatcaaatgattatgttagaaggtgcaaaagcaacaaccgaaactgttgatgcattgaggagtggagcttctgcaatgaaggcaatgcagaaagcaacaaatattgatgatgtggataagaccatggacgagatcaatgagcaaaccgagaacatgaaacagatccaagaagcattggcgactccaatgggggcagcggctgacttcgacgaggatgagcttgcagcagagcttgatgaactagaaagtgaagagcttgaatcgcaacttctacagccggcaacaacagctcctccattgccttcagttccagtgcctgcagggcgtcaaccggctcgtcctgttccccagaagcggactgctgaggaagaagaactcgctgcattacaggctgagatggccctctaa

SEQ ID NO: 150614 - protein, 219 aa, Arabidopsis thaliana
MMNRLFGKPKQEANALQTLDKLNETLEMLEKKEKVLLKKAGAEVEKAKEYSRAKNKRAAIQCLKRKRLYEGQVEQLGNFQLRIHDQMIMLEGAKATTETVDALRSGASAMKAMQKATNIDDVDKTMDEINEQTENMKQIQEALATPMGAAADFDEDELAAELDELESEELESQLLQPATTAPPLPSVPVPAGRQPARPVPQKRTAEEEELAALQAEMAL

SEQ ID NO: 150615 - DNA, 681 bp, Drosophila melanogaster
  CDS (1)..(681)
atgagtttcttcgggaagatgttcggcggcaagaaggaagtggcccccaccaccggcgaggcgatacagaagctgcgcgagacggagaacatgcttatcaaaaagcaggagttcctggaggccaagatcgaggacgaactgaatatagcccgcaagaatgcgtctaaaaacaaaagagtggccctgcaagcactcaagaaaaagaagcggctggagaagcaactccagcagatcgatggcaccctgtccacaatcgaaatgcagcgcgaggctctggagagcgccaacacaaacactgccgtcttgaccacgatgaagaatgccgcggatgccctcaagagagcccatcagaatatggacgtggacaaggtgcacgacatgatggatgacattgccgagcagcaggacgtggcccgcgagatttccgatgccatttcgaacccagtggcattcggcgccgatctggatgatgaggatctcgagcgggaactcgacgagctggagcaggagaactttgataaggaaatcattggcatacccgagccgacgcccacattgccagaagcacccacagaagatttgcccgagaaggccaaagaaaagaaaaaggcgacaaccacgactgccgtggaggatgatgatgatccagacatgaagcagcttttatcctggtccaactaa

SEQ ID NO: 150616 - protein, 226 aa, Drosophila melanogaster
MSFFGKMFGGKKEVAPTTGEAIQKLRETENMLIKKQEFLEAKIEDELNIARKNASKNKRVALQALKKKKRLEKQLQQIDGTLSTIEMQREALESANTNTAVLTTMKNAADALKRAHQNMDVDKVHDMMDDIAEQQDVAREISDAISNPVAFGADLDDEDLERELDELEQENFDKEIIGIPEPTPTLPEAPTEDLPEKAKEKKKATTTTAVEDDDDPDMKQLLSWSN

SEQ ID NO: 150617 - DNA, 639 bp, Drosophila melanogaster
  CDS (1)..(639)
atgggagctttgtttggaaaaaccagcaaaaagacggctcctagtcggatcaccgaccaggacaaggcggttctgcaattgaagcaacagagggatcgtctgaagcagtaccaaaaacgcatcgagacgcagttggagaatgatcgcctcctggcaaggaagtgcctacagcaaggtcgcaaggaccgggccaagctgctgctgcgcaagaagaagtaccaggagagtctgctgaccaatgccgacaaacagctggaaaacctggagaagctggctgcggacattgagttcgcccaggtggagatgaaggtgctggacggcctcaaagcgggcaatgctgctctgaagaaggtgcacgaaatgcttgacatcgacgaagttgagcgaatcatggacgagacacgcgagggcatcgaaaagcagcaggaaatagacgccatactgacggatgtgctgaccacgcaggacgaggaggacgttttggccgagctggatgccctggaggcggaggaagagcagcagaagggtgcacagctgccggatgtgcccaccgaagatctgcccattcccgctgagatcgagtccgtcgaggagccggcaaagaccaaagcaaccaagaaagtcctggtggaggcatag

SEQ ID NO: 150618 - protein, 212 aa, Drosophila melanogaster
MGALFGKTSKKTAPSRITDQDKAVLQLKQQRDRLKQYQKRIETQLENDRLLARKCLQQGRKDRAKLLLRKKKYQESLLTNADKQLENLEKLAADIEFAQVEMKVLDGLKAGNAALKKVHEMLDIDEVERIMDETREGIEKQQEIDAILTDVLTTQDEEDVLAELDALEAEEEQQKGAQLPDVPTEDLPIPAEIESVEEPAKTKATKKVLVEA

SEQ ID NO: 150619 - DNA, 636 bp, Nasonia vitripennis
  CDS (1)..(636)
atgagcaaactattcgcgaagatcttcggaaagaagaaaaagataacgatgcagaaaaccgccgacgaagccatccaggaattgcgcaaaatcgaggagctgctcggcaagaggcaggacttcctggagagcaaaatgaagcaggaggaaacgatcgccaggcagaacagtaacaaaaacaagagagctgccatccaagcactgaagagaagaagacgatttgcgaagcaacttcagcaaatcgacgcgcgtttatccacgctcgagatgcagagagaggcactggaaagtgccaacacacataccgctgttcttacaacgatgaagaacgctgctgatgccctgagagcagcttaccaaaacatggacgttgaccaagttcacgacatgatgggcgacattgccgagcagcaggatttggcagaggaacttgcaaacgctatatccaacccagcctttggtcaagaagtggacgaggctgagctggagaaggagttggatgaattggaacaagaggaagttcaaaggaaattgttgactcttcgaatagatacgggtgaattaccggatgttcctgcaacagctctgccaactgtaccagaaaacaagcaaaagaagacggtgacggcgatttga

SEQ ID NO: 150620 - protein, 211 aa, Nasonia vitripennis
MSKLFAKIFGKKKKITMQKTADEAIQELRKIEELLGKRQDFLESKMKQEETIARQNSNKNKRAAIQALKRRRRFAKQLQQIDARLSTLEMQREALESANTHTAVLTTMKNAADALRAAYQNMDVDQVHDMMGDIAEQQDLAEELANAISNPAFGQEVDEAELEKELDELEQEEVQRKLLTLRIDTGELPDVPATALPTVPENKQKKTVTAI

SEQ ID NO: 150621 - DNA, 660 bp, Nasonia vitripennis
  CDS (1)..(660)
atgagtttcttcacgaaggtcttcggcgggaagaaggagacggcggccccgacgaccgccgaggctatccagaaattgcgcgtaaccgaggacctgctcgtcaagaagcaggcctacctggaggacaaaatcgagaatgagctaatgaccgccaggaagaacggcaccaagaacagaagagctgccattcaagcattaaagaggaagaagcgatatgagaagcaacttcagcaaatcgatggaactctatccacgattgagatgcagagagaagcactggaaagtgcaaatacaaatactgctgttcttaccacgatgaaaaatgctgctgatgcccttaaagcagctcatcaacacatggatgttgaccaagttcacgatatgatggatgatattgctgagcaacaagatgtggcaaaggagatttcggatgcaatctccaacccagttgcatttggtcaagatgtggatgaggatgagctcgaaaaggagttagaagaattagaacaagaagaacttgacaaagaattattaggcattcaaactacggatgaattacctgctgttcctgcaacatctctaccaaatgtcccagcaaagaagacaacaaaacaagaagatgacgacgatttgaaagagttagaacagtgggcgtcgtaa

SEQ ID NO: 150622 - protein, 219 aa, Nasonia vitripennis
MSFFTKVFGGKKETAAPTTAEAIQKLRVTEDLLVKKQAYLEDKIENELMTARKNGTKNRRAAIQALKRKKRYEKQLQQIDGTLSTIEMQREALESANTNTAVLTTMKNAADALKAAHQHMDVDQVHDMMDDIAEQQDVAKEISDAISNPVAFGQDVDEDELEKELEELEQEELDKELLGIQTTDELPAVPATSLPNVPAKKTTKQEDDDDLKELEQWAS

SEQ ID NO: 150623 - DNA, 687 bp, Anopheles gambiae str. PEST
  CDS (1)..(687)
atgagtttcttcgggaagctgttttcggggaaaaagggcgaaccagccccgacaccgagcgaagcgatacaaaagctgcgagacatagaaaatatgctcaccaaaaagcaggagttcctagagaagaaaatcgaggtcgagatagatacggccaggaaaaatggtaccaaaaacaaacgagcggccatccaggcgctgaagcggaagaagcggtacgagaaacagctacagcaaatcgatggcacactttcgacgattgaaatgcagcgagaggcgctggagaatgcgaacacaaacgccgaagtgctgaagacgatgaagaaggcttccgatgcgcttaaagttacccataaggatatgaacattgatgatgtgcacgatctgatggatgacattgccgaacagaacgacattgcgaacgaaatttccaatgccgtgtccagtgccgtcggcttcggccaggacatcgacgaggacgagctggaaaaggagctcgaggagctggagcaggaagagctggacaaagagctgctgggcgtgcagccagaaacggacgagctacccgaagttccctccacggacttgccggccaaggcaaaggagaaggagaaaaagaaaggtacgcaagctgccgtcgccgaagaagacgatccggacatgaaggagttaatgtcatgggcaaactaa

SEQ ID NO: 150624 - protein, 228 aa, Anopheles gambiae str. PEST
MSFFGKLFSGKKGEPAPTPSEAIQKLRDIENMLTKKQEFLEKKIEVEIDTARKNGTKNKRAAIQALKRKKRYEKQLQQIDGTLSTIEMQREALENANTNAEVLKTMKKASDALKVTHKDMNIDDVHDLMDDIAEQNDIANEISNAVSSAVGFGQDIDEDELEKELEELEQEELDKELLGVQPETDELPEVPSTDLPAKAKEKEKKKGTQAAVAEEDDPDMKELMSWAN

SEQ ID NO: 150625 - DNA, 672 bp, Gibberella zeae PH-1
  CDS (1)..(672)
atgtggggttggttcggtggcgccgcggcccagaagcgcaaggatacccccaagaatgcgatcctcggtctgcgagcgcagctcgacatgctgcagaagcgcgagagacatctacagaaccagatcgatgagcaagatggcatcgcacgcaagaacgtgagcacaaacaagaacgcggccaaggcggccttgaggcgcaagaagacacacgagcactcgctcgaccaaaccgtttcgcaaattggtactttggagcagcagatcaacgctatcgagtcagccaacatcaacaaggagaccctggcagccatgagcgacgccaacgcggcaatgaagcatatccacaagggtctcacagcggataaggtggacgcgattatggacgagctgcgagaacaaaacgccatgagcgacgagattgtcaacgccattacccaaaccccaatgggcgacgctatcgatgatgacgagttggagaacgagttggacgagctacaacaggagcagcttgatgagcagatgctcaagacaggcactgtccctgtgtcggatgccgtacacaagctgcctacgccggcttctgcggagcctgtatcgagcaagaagcaggccgtggaggaggacgacgaggaagccgagcttcggaaactacaggccgagatggctatgtga

SEQ ID NO: 150626 - protein, 223 aa, Gibberella zeae PH-1
MWGWFGGAAAQKRKDTPKNAILGLRAQLDMLQKRERHLQNQIDEQDGIARKNVSTNKNAAKAALRRKKTHEHSLDQTVSQIGTLEQQINAIESANINKETLAAMSDANAAMKHIHKGLTADKVDAIMDELREQNAMSDEIVNAITQTPMGDAIDDDELENELDELQQEQLDEQMLKTGTVPVSDAVHKLPTPASAEPVSSKKQAVEEDDEEAELRKLQAEMAM

SEQ ID NO: 150627 - DNA, 666 bp, Apis mellifera
  CDS (1)..(666)
atgagtttctttagtaaagtattcggtggtaaaaaagaagcggcacctttgtcaacagccgatgcaatacaaaaattacgagaaacggaggatatgttgataaaaaaacaagatttccttgaaaataaaatagaaattgaaattcaaactgctaagaaacatggaacaaaaaataaaagagctgcaattcaagcccttaaaagaaagaaacgttatgaaaaacaattgcaacaaattgatggtacactcactacaattgaaagtcaaagggaagcacttgaatgtgcgaatactaatactgctgtacttactacaatgaaaaatgcagcagatgcattaaaatctgttcatcaacatatggatgttgatcaagtacatgatatgatggatgatatagctgaacaacaagatgtagcaagagaaatttctgatgcaatttctaatcctgtagcatttggacaagatgtagatgaagaagaattagaaaaagaattggaagaacttgaacaagaacaattagataaagaattacttggtattgaacctactgatgaattaccaaatgttccagctactgctattccaactgccccaactaggactcgcacaaaagctaaacctgaagaagatgaagatttaaaagaattagaagcatgggcatcataa

SEQ ID NO: 150628 - protein, 221 aa, Apis mellifera
MSFFSKVFGGKKEAAPLSTADAIQKLRETEDMLIKKQDFLENKIEIEIQTAKKHGTKNKRAAIQALKRKKRYEKQLQQIDGTLTTIESQREALECANTNTAVLTTMKNAADALKSVHQHMDVDQVHDMMDDIAEQQDVAREISDAISNPVAFGQDVDEEELEKELEELEQEQLDKELLGIEPTDELPNVPATAIPTAPTRTRTKAKPEEDEDLKELEAWAS

SEQ ID NO: 150629 - DNA, 678 bp, Ustilago maydis 521
  CDS (1)..(678)
atgtcgagctggagcagttggttcggcaagaaagacaacaagaactcggcgagggatgcgatagtcgggttgcggcagcagctgcttatgctcgagaagaaggaggagcatcttaacaaaaagattgaagatgagctgaagaaggccaaggccaacgttaccacaaataagagagcggcgcaagcggcgctccggcagaagaaagcgtacgaaaacgagctggaccgcatcgcaggtacaaggatgacgcttgagacacaagtcaacgccatagagagcgccaacatgaacctcgagaccatgacagccatgcgcaaaggtgctgacgctctcaagacgatccacggcagtctcaatattgataaagtcgactcgaccatggactcgattcgcgaacagatggatctcaccaacgagatctcggacgccatctcgaaccctgtcggcatgggccacgacatcgacgaagatgagctcaaaaacgaactcgaggaacttgagcaagatgagctcaacgagcgattggtgggtgccgactcggtgcctcttcacactcctgccgtggccacatcggcgggtatatcacgtatttcgaacggtccagagcgcaaacaagccgtggttgaggacgacgacgatgctgagctgcgcgcactgcaggccgagcttgccatgtag

SEQ ID NO: 150630 - protein, 225 aa, Ustilago maydis 521
MSSWSSWFGKKDNKNSARDAIVGLRQQLLMLEKKEEHLNKKIEDELKKAKANVTTNKRAAQAALRQKKAYENELDRIAGTRMTLETQVNAIESANMNLETMTAMRKGADALKTIHGSLNIDKVDSTMDSIREQMDLTNEISDAISNPVGMGHDIDEDELKNELEELEQDELNERLVGADSVPLHTPAVATSAGISRISNGPERKQAVVEDDDDAELRALQAELAM

SEQ ID NO: 150631 - DNA, 567 bp, Strongylocentrotus purpuratus
  CDS (1)..(567)
atgagtgggttcctatttggaaagaagaagaaggaggtaactgtttcgccagcagaagctatccagaaacttagatcaaccgaagaaatgctcgtgaaaaaacaagagtttttagaaggaaaggtgtcaaaggaacttgtcatagcaaagcagaatggaacgaaaaataagagagaagcacagagggaggcgctggagaatgctaataccaatgcagaggtcctcaaaaatatgaaatttgcaagcacagccttaaaaacagcacataaagaaatgggtgttgaagatgtggatgatttgatggcagatgtgcatgaacaaatggaactagccacagaaatttctgatgccatctcaaatccaataggctttggagcagatgatattgatgaggatgagttgaatgcagaacttgaagaattagaacaggaagagtttgatgagaagatgctcgatgttgatattgaattaccacaagtaccaagtgcatcattaccagccacaaaaaagaaagttgcgcaggatgaggatgatgacatgagagaacttgaacagtgggccatgtag

SEQ ID NO: 150632 - protein, 188 aa, Strongylocentrotus purpuratus
MSGFLFGKKKKEVTVSPAEAIQKLRSTEEMLVKKQEFLEGKVSKELVIAKQNGTKNKREAQREALENANTNAEVLKNMKFASTALKTAHKEMGVEDVDDLMADVHEQMELATEISDAISNPIGFGADDIDEDELNAELEELEQEEFDEKMLDVDIELPQVPSASLPATKKKVAQDEDDDMRELEQWAM

SEQ ID NO: 150633 - DNA, 615 bp, Tribolium castaneum
  CDS (1)..(615)
atgagtttctttaaaaaaatcagggggcaaaagcccgacaaaaaacccaccctacctgaagcaatacgacgactcaaagtaaccgaagacggcctcctcaggaagcaaaacagtttggaagaaaaactaaaaagcgaaatttccaatgccaaaaagcacgcctcgaccaacaaaaaagctgccctccaggcccttcagaaaaagaaacgcctcgagcgccagctccagcacgttgatggcgccttgaccactctggaggcgcaactagagctcctggaaaaggccaatacgaacaaactggccgtcgagtcgatggacaaggcggcgaaagccttgaaagggacgcagaaaaattgggatgtggacaaagtggggcaaattttggacgaactagcggaacagcgagaccttaatgacgaaatttccgatgccattgcccacccggtgggtttcgaggacgatggtatcgacgaagaagagctcgagaaggaactggagaatttggacaaagaactgggggatttgtccgtcgatgatttaccagaggtgccacaaaacgatattaagcacaaggctaaagaaaaaagggacaaaagcccaattcccgcgtcttaa

SEQ ID NO: 150634 - protein, 204 aa, Tribolium castaneum
MSFFKKIRGQKPDKKPTLPEAIRRLKVTEDGLLRKQNSLEEKLKSEISNAKKHASTNKKAALQALQKKKRLERQLQHVDGALTTLEAQLELLEKANTNKLAVESMDKAAKALKGTQKNWDVDKVGQILDELAEQRDLNDEISDAIAHPVGFEDDGIDEEELEKELENLDKELGDLSVDDLPEVPQNDIKHKAKEKRDKSPIPAS

SEQ ID NO: 150635 - DNA, 645 bp, Tribolium castaneum
  CDS (1)..(645)
atgagttttttcgggaaaatgttcggcaagaaggaggagaaggcccccacgacaggggaggccatccagaagctgcgcgagaccgaagacatgctcatcaaaaaacaggaatacctcgaatcgaagatcgaccaagagatcctcacagcgaagaaaaacgcgtcgaaaaacaaacgagcggccatccaggccctcaagaggaagaaacgctacgaaaagcagctccagcagatcgatggcaccctcagcaccatcgagatgcagcgggaggccctcgagggggccaacaccaacacagccgtactcaaaacgatgaaaaacgcagcggacgccctcaaaaatgcccacctcaacatggatgttgatgaggtccacaatatgatggacgacattgccgaccagcaagatttagccaatgagatttcaaacgcaatcagtaatccagttggcttcggtgaagatatggacgaagatgagcttgagaaggaattggaggctttggaggaggaagcattggaggagaaattggtggaggtgcccacgcccctgcccccagtccccaccggcgagattgccaaacccaaaccagcaaaaaaagtcgaggaagatgatgatatgaaagaattggaaaactgggcctcgtaa

SEQ ID NO: 150636 - protein, 214 aa, Tribolium castaneum
MSFFGKMFGKKEEKAPTTGEAIQKLRETEDMLIKKQEYLESKIDQEILTAKKNASKNKRAAIQALKRKKRYEKQLQQIDGTLSTIEMQREALEGANTNTAVLKTMKNAADALKNAHLNMDVDEVHNMMDDIADQQDLANEISNAISNPVGFGEDMDEDELEKELEALEEEALEEKLVEVPTPLPPVPTGEIAKPKPAKKVEEDDDMKELENWAS

SEQ ID NO: 150637 - DNA, 669 bp, Aspergillus niger
  CDS (1)..(669)
atgtggtcttggttcggcggatccgccgctcagaagcggaaagatgcgcccaagaatgcgatcctcatgcttcgcgagcagctggatatgctccaaaagcgcgagaagcatttggagaatctgatggaggagcaggatgcaattgctcggaagaacgtaacgtcaaacaaggccgcggctaagaacgcccttcgacggaagaaggttcatgagaagaacctcgaacagacgacggcgcagatcgttcagctagaacagcagatctactcgattgaggcggcgaatatcaaccaggagactttgaaggctatggaggcggctggtgcggcgatggcgaagatccatggctccatgacgcttgatacggtggatcagacaatggatacacttcgcgaacagcaccaactcagcaccgaaatcgcacaagccattacaagcaccaatctggtcgaccaaccagacgaggccgatttggaagaggaactcgagggcttggagcaggaggccatggacgagcggatgctcaacacaggtacggtgccggttgcagaccaactcaaccgtttacctcctgcggcaaatggagaaatcaaatccaaacctcagaccgaagaggaagacgaggaagcagaactggagaagctacgtgcggaaatggccatgggataa

SEQ ID NO: 150638 - protein, 222 aa, Aspergillus niger
MWSWFGGSAAQKRKDAPKNAILMLREQLDMLQKREKHLENLMEEQDAIARKNVTSNKAAAKNALRRKKVHEKNLEQTTAQIVQLEQQIYSIEAANINQETLKAMEAAGAAMAKIHGSMTLDTVDQTMDTLREQHQLSTEIAQAITSTNLVDQPDEADLEEELEGLEQEAMDERMLNTGTVPVADQLNRLPPAANGEIKSKPQTEEEDEEAELEKLRAEMAMG

SEQ ID NO: 150639 - DNA, 672 bp, Aspergillus oryzae
  CDS (1)..(672)
atgtggtcatggtttggcggctcggcagcccagaagcggaaggatgcgcctaaggatgcgatcctcaagctgcgggagcagcttgatatgctgcagaagcgcgagaagcacctggagaatctgatggaggagcaggatgccgtggcgaggaagaacgtgacgacgaataagaatgcggccaagtctgccctgcgacgtaagaaggtgcacgagaagaacctcgaacagacgacggcgcaaatcatccagctagaacaacagatatattcgatcgaggcggcgaatatcaaccaggagactttgaacgcgatgaagcaggctggcgcagccatgacgcagatccacggtaacttgactattgataaggttgatgagacaatggaccaactccgcgagcaacaccaactcagcgaggaaatcgcacaggctatcacaaacacccagattggcgaccaggcagacgagaccgagctggacgccgagctcgaaggtctggaacaggaggcgatggacgagcggatgcttcacacagggacagtaccggttgcagaccaactcaatcggttaccggccgcggcgaacggagaacccaaaggcaaatcaaaggtacaagaggaagaagacgaggaagcagaactggagaagctgcgcgcggagatggccatgggataa

SEQ ID NO: 150640 - protein, 223 aa, Aspergillus oryzae
MWSWFGGSAAQKRKDAPKDAILKLREQLDMLQKREKHLENLMEEQDAVARKNVTTNKNAAKSALRRKKVHEKNLEQTTAQIIQLEQQIYSIEAANINQETLNAMKQAGAAMTQIHGNLTIDKVDETMDQLREQHQLSEEIAQAITNTQIGDQADETELDAELEGLEQEAMDERMLHTGTVPVADQLNRLPAAANGEPKGKSKVQEEEDEEAELEKLRAEMAMG

SEQ ID NO: 150641 - DNA, 672 bp, Ornithodoros moubata
  CDS (1)..(672)
atgagtctcttgtccagactgtttggaggcggaaaaaatgtcgagaaagctccagctccaggagaggcaattcagaggttacgtgagatcgaagaaatgctgaataagaaacaggagtttctcgaaaagaaggttaacgttgaattggatgctgcaaaaaagtacggcacaaagaacaagagagctgccctggcggcattgaaacgcaaacgtcggtatgagaagcagcttgcacaaattgatggtacattgacaaccattgagtatcaacgagaagccctagaaaatgcaaacacaaatacggaagttcttaaaattatgtcactggctgccaaggccctgaagaatgcacatgaaaacatggacgtggacaaagtgcacgatcttatggatgaggtgcaggaacagcaggagattgcaaatgagatatctgaagctatttctaacccagttggatttgggactgacgttgatgaggatgagttgatggaagagcttgagtcattggagcagcaggacctggatgaagcactgctcactgttgctggacctgcagcagagaacttaccggtgccacccacagcagagccatcaaaaattgcaacaacatcaaagtctaaggcagtgatggaggatcccgacatgatagagctggcccaatgggcatcataa

SEQ ID NO: 150642 - protein, 223 aa, Ornithodoros moubata
MSLLSRLFGGGKNVEKAPAPGEAIQRLREIEEMLNKKQEFLEKKVNVELDAAKKYGTKNKRAALAALKRKRRYEKQLAQIDGTLTTIEYQREALENANTNTEVLKIMSLAAKALKNAHENMDVDKVHDLMDEVQEQQEIANEISEAISNPVGFGTDVDEDELMEELESLEQQDLDEALLTVAGPAAENLPVPPTAEPSKIATTSKSKAVMEDPDMIELAQWAS

SEQ ID NO: 150643 - DNA, 648 bp, Neurospora crassa
  CDS (1)..(648)
atgggtaactcgccaagccgcgtcacggcgcaagacaaagcaatcctcgacctaaaaacccagcgtgacaagctccaccaataccagcgtaaaatcaccgtcctcaccgaccgagaaactgccatcgcgcgccagatgttggccaagggcgacaagcagcgggcgctcctcgctctccgacgcaaaaagtaccaggaaactttgctccaaaaaaccgatgcgcaactggagcaactggaaaaactaacctcaagcgtggagtttgcgctaatacaaaaggacgtattttttggtctgcagcaggggacaaaagtgctgaaagagatacacgccgagatgggagggttagatcacgtcgagaagatgatgggagagacggcagaggagattgcttatcaacaggaagtaagcgaaatgttaggaggtcgcatctccaaccaggacgaagacgaagtcgaagaagagttggcggctttggaggccgaggtggctgcgaagaaccaacgggtgcccgtacagccagtaccacaagtgccgctaccaaatgttcccgataccgagttatcgtcaccgttgagagcggaagaagaggagagacagcagcggcaacggcaacgacaagaggagagacaggccatgctggcctga

SEQ ID NO: 150644 - protein, 215 aa, Neurospora crassa
MGNSPSRVTAQDKAILDLKTQRDKLHQYQRKITVLTDRETAIARQMLAKGDKQRALLALRRKKYQETLLQKTDAQLEQLEKLTSSVEFALIQKDVFFGLQQGTKVLKEIHAEMGGLDHVEKMMGETAEEIAYQQEVSEMLGGRISNQDEDEVEEELAALEAEVAAKNQRVPVQPVPQVPLPNVPDTELSSPLRAEEEERQQRQRQRQEERQAMLA

SEQ ID NO: 150645 - DNA, 782 bp, Arabidopsis thaliana
  CDS (4)..(660)
atgatgaatcggctattcgggaaacccaagcaggaggctaatgctctccaaactttagacaagcttaacgagacgcttgagatgctagagaaaaaggagaaagtactcttgaagaaagctggtgcagaggttgagaaggcaaaagaatactcccgggctaagaacaaacgagcggctatacagtgtttgaaaaggaagaggttatatgagggacaagtcgaacagcttgggaatttccagctccgtattcatgatcaaatgattatgttagaaggtgcaaaagcaacaaccgaaactgttgatgcattgaggagtggagcttctgcaatgaaggcaatgcagaaagcaacaaatattgatgatgtggataagaccatggacgagatcaatgagcaaaccgagaacatgaaacagatccaagaagcattggcgactccaatgggggcagcggctgacttcgacgaggatgagcttgcagcagagcttgatgaactagaaagtgaagagcttgaatcgcaacttctacagccggcaacaacagctcctccattgccttcagttccagtgcctgcagggcgtcaaccggctcgtcctgttccccagaagcggactgctgaggaagaagaactcgctgcattacaggctgagatggccctctaaggttattcacctctccgagcagagacatgtatgcattgatagacacgaacagacgatgtatataaggatctgaatcagattaattcggagcgaaaaacttttataatccccgtcgttaatgt

SEQ ID NO: 150646 - protein, 218 aa, Arabidopsis thaliana
MNRLFGKPKQEANALQTLDKLNETLEMLEKKEKVLLKKAGAEVEKAKEYSRAKNKRAAIQCLKRKRLYEGQVEQLGNFQLRIHDQMIMLEGAKATTETVDALRSGASAMKAMQKATNIDDVDKTMDEINEQTENMKQIQEALATPMGAAADFDEDELAAELDELESEELESQLLQPATTAPPLPSVPVPAGRQPARPVPQKRTAEEEELAALQAEMAL

SEQ ID NO: 150647 - DNA, 714 bp, Ashbya gossypii
  CDS (1)..(714)
atgtggtcgtacttgtttgggtcagggaatgcaaagcagaagaaggagctgcccaagaaggccattcttgagctgcgggagcatatccagttgctttccaagaagcaggcccacttgcagacgcagatgacgagtcaggaggagagcgcgcggcactttctctcgaaggggaacaagaacatggccaaagctgcgctgaagcgcaagaaagtattcgagagccaactcttgaagatagacaaacaggtggactcgcttgagcagcagctctactccattgagaatgcgaacttgaacttggagaccatgaaggcaatgaaacagggcgcgtcggcaatgaagcacatccacgagggactggacgttgagcgcgtcgatgagaccatggacgagattcgcgagcaagtggaactgggcgaggagatcagcgaggccatttctcggccgctatacacaggtgtgaacgagatagatgaagatgagcttgacgaagaactagatatgcttgcgcaagaggaagttgcccggaaggtgatggagcctggtgctgctgttccggccgcggcgccggcaacaaaggtctctttgccatccgtgcccagctcagatatgccgcagcaggaccgtgggcagccggtaacgttgggtatggaccaagaggaagatgaagacgaacgtgcattgcgggaactacaggcagagatggggctgtga

SEQ ID NO: 150648 - protein, 237 aa, Ashbya gossypii
MWSYLFGSGNAKQKKELPKKAILELREHIQLLSKKQAHLQTQMTSQEESARHFLSKGNKNMAKAALKRKKVFESQLLKIDKQVDSLEQQLYSIENANLNLETMKAMKQGASAMKHIHEGLDVERVDETMDEIREQVELGEEISEAISRPLYTGVNEIDEDELDEELDMLAQEEVARKVMEPGAAVPAAAPATKVSLPSVPSSDMPQQDRGQPVTLGMDQEEDEDERALRELQAEMGL

SEQ ID NO: 150649 - DNA, 681 bp, Candida albicans
  CDS (1)..(681): transl_table=12
atgtggggatatttttttggaggaaatagccaacaaaagaaagatttaccaaagaaggcaatagtggaattgcgagaacacatacaaacactaaacaagaagaagaaccatttgcaacagcaaatggatgaccaagatcagttggccagaaaatatgttagttcaaaacaaacaactttagctaaaagtgctttaaaaagaaaaaaggggtatgaatctaatctattaaaagtggaaaaccagattgaaactttggaaacacaattaattagtatcgaaggagcaaacttgaacttggaaactatgaaagctatgaaacaaggagcaaaggccatgaaacaaatacatggggaatacgatgtagacaaagttgaagatactatggatgaaataagagaacaagtagagttagccgatgaaatcagtgaagctatatcgaggcccgttggtaatgaatttgttgatgaagatgaattggacgaagaattgaaagagttggaggcagaagctaaagaacaagaacaagaacatagagtgccagctcaaaaggcaaaaccacaacctgtatcaagagaagaagagttaccacaattcccatctgttaacaagaaagctccagtagtagaagaagatgaagatgaagaagcattgaaagcattgcaagctgaaatgggattatga

SEQ ID NO: 150650 - protein, 226 aa, Candida albicans
MWGYFFGGNSQQKKDLPKKAIVELREHIQTLNKKKNHLQQQMDDQDQLARKYVSSKQTTLAKSALKRKKGYESNLLKVENQIETLETQLISIEGANLNLETMKAMKQGAKAMKQIHGEYDVDKVEDTMDEIREQVELADEISEAISRPVGNEFVDEDELDEELKELEAEAKEQEQEHRVPAQKAKPQPVSREEELPQFPSVNKKAPVVEEDEDEEALKALQAEMGL

SEQ ID NO: 150651 - DNA, 687 bp, Candida glabrata
  CDS (1)..(687)
atgtgggcgtctatatttggaggtaaggggaacacgaacaaggagttgccgaagaaggcgatcattgagctgcgggagcacatcaacctgctgtcgaagaagcaggcgcatctgcaagggcagatcactgcgcaggagaacgaggcacgcaagttcctgacgaggggcaacaagactatggcgaagaatgcgctgaagaagaagaaagtgtacgagggccagctggtgaagctggagtcgcagatggactcgctggagcagcagctgttctcgatagagagtgcgaacttgaacctggagaccatgcgggccatgaaacaaggtgcgaaggctatgaagtcgatacactcgggactggacatcgacagggtcgacgagaccatggacgagatacgcgagcaagtcgagctcggagaagagatcagcgacgccatatcaagaccactgtacaccggcgccaacgagatagacgaggacgagctggacgaagaactggacatgctagcacaggaaacagaaccacaggtagctacaaaggaacaggcactgcccgagagcaaacaggccctctccatgccaaatatacccaacactaagatagacgaatcgaagaccaaaatcgaagaagaagaagaggacgaggatgaaagagcactacgggaactacaagctgagatgggcctatga

SEQ ID NO: 150652 - protein, 228 aa, Candida glabrata
MWASIFGGKGNTNKELPKKAIIELREHINLLSKKQAHLQGQITAQENEARKFLTRGNKTMAKNALKKKKVYEGQLVKLESQMDSLEQQLFSIESANLNLETMRAMKQGAKAMKSIHSGLDIDRVDETMDEIREQVELGEEISDAISRPLYTGANEIDEDELDEELDMLAQETEPQVATKEQALPESKQALSMPNIPNTKIDESKTKIEEEEEDEDERALRELQAEMGL

SEQ ID NO: 150653 - DNA, 881 bp, Cryptococcus neoformans
  CDS (47)..(709)
acacactctacaattcccgaatcatatacatattgtttcaatcacaatgtcagggtggatgtcctacttcacaggtcgcaaagacactcgagaatcagctcgagatgccattgtcggcctgcgccaacaattattgatgctcgaaaagaaggaagagtttttgcagaagaagattgaagaggagatgaagaaagcgaaggctaatgctaccggcaacaagagattggctatggcggctcttagacagaagaaggcacacgagaacgaacttgataggatcgccggcacaagattgacacttgagactcaggtgaacgctatagaatcagcgaacttgaatgcggagacaatggtggcaatgaagaagggtgcggatgctctcaagggtatccacagcaatcttacggccgagggtgtcgatgctacaatggacaaaatcagggagcaaatggaccttaccaacgacatttccgatgccatttccaaccccgtgggcatgggtattgttcttgacgaggatgatcttaaagaagaattggaggctctcgaacaagaacagcttgatgaccggcttgcaggggcagaccgtgtcccaagtcaccttcctgcgtcacccgtcgggcaaacgacaggacgagccgcagtggaagaagatgaggatgacgaagaagcccagcttcgtaaactccaggctgagcttgccatgtaacatctcgtcttctatacggaccatagtcactccctccacatcagacctcacggcgcttcttgcacccatgccgcagtatccgtctttccatcttttacgatgttgtttccttcctggtttgagtgatcttctggctcttccatatagagcatgtaataatatatcacgattt

SEQ ID NO: 150654 - protein, 220 aa, Cryptococcus neoformans
MSGWMSYFTGRKDTRESARDAIVGLRQQLLMLEKKEEFLQKKIEEEMKKAKANATGNKRLAMAALRQKKAHENELDRIAGTRLTLETQVNAIESANLNAETMVAMKKGADALKGIHSNLTAEGVDATMDKIREQMDLTNDISDAISNPVGMGIVLDEDDLKEELEALEQEQLDDRLAGADRVPSHLPASPVGQTTGRAAVEEDEDDEEAQLRKLQAELAM

SEQ ID NO: 150655 - DNA, 681 bp, Debaryomyces hansenii
  CDS (1)..(681)
atgtggaattacctatttggcggaaacaagcaacagaagaaggagtatccgaagaaggccattgttgagttacgtgagcacatccagatgttgaataagaagcgttcacatttggagctgcagattgcggaccaggatgctttagcacggaaatatatcactaccaacaaggcattggccaagaatgcgttgaagagaaagaagggctacgaggcaaacttgatgaagatagagaaccagatcgactcgttggagacgcaactcacttcgattgagggcgcaaacttgaacttggaaactatgaaggccatgaagcaaggtgcacaagccatgaagcaaatccacggagaatacgacgtggacaaggtcgagaatacgatggacgacatcagagaacaggtcgagttggcggacgagatatccgaagccatatcaagaccggtgggcacagaatttgtcgacgaggacgaattggacgaggagctcgccatgttacaagaagaagaaaaagaacacaaacagcaaactcctgcccaaaaggcccctgtcgccaaggtgtcggccccagaagaagaaatgccagacttccctaccgtcaacaagaacaagcctgcggcttccaccgaagacgacgaggacgaggaagctttgaaggcattacaagcagaaatgggtctttaa

SEQ ID NO: 150656 - protein, 226 aa, Debaryomyces hansenii
MWNYLFGGNKQQKKEYPKKAIVELREHIQMLNKKRSHLELQIADQDALARKYITTNKALAKNALKRKKGYEANLMKIENQIDSLETQLTSIEGANLNLETMKAMKQGAQAMKQIHGEYDVDKVENTMDDIREQVELADEISEAISRPVGTEFVDEDELDEELAMLQEEEKEHKQQTPAQKAPVAKVSAPEEEMPDFPTVNKNKPAASTEDDEDEEALKALQAEMGL

SEQ ID NO: 150657 - DNA, 729 bp, Emericella nidulans
  CDS (1)..(729)
atgtggtcatggttcggtggtgcggccgcgcagaagcgcaaggaagcgccgaagaacgcaatcctccagcttcgaagccaccttgacatgctacagaagcgagaaaagcacctagaaaaccaaatgaacgaacaagaggccatcgctaaaaagaacgtgaccacgaataagaacgccgccaaagccgcgctccgacggaaaaaggtgcacgagaagaacttagaacagacgcaggctcagattgtacagcttgagcagcagatatactctattgaagccgccaatattaaccacgagaccctggccgccatgaaggccgccggtgcagctatggagaagattcacaacggcatgaccgtcgaacaggtcgacgagacaatactcagggacaaactgcgggaacaacaagccatcaacgacgaaatcgcgattgcaatcacaaacccggggttcggcgagcaggtggacgaagaagatctggaggcggaactcgagggcatggagcaggaggctatggacgagcgcatgctccacacaggcacagtaccagttgcagatcagctcaatcggctacctgcgccagcgaatgcagaacgtaaggctctccctttcccacctcaaaagcgaactccgactgacagccttccagccgccaaagcgaaacagaaagcagaagaagaagacgaggaagccgagttggagaagttacgcgcggaaatggccatgtga

SEQ ID NO: 150658 - protein, 242 aa, Emericella nidulans
MWSWFGGAAAQKRKEAPKNAILQLRSHLDMLQKREKHLENQMNEQEAIAKKNVTTNKNAAKAALRRKKVHEKNLEQTQAQIVQLEQQIYSIEAANINHETLAAMKAAGAAMEKIHNGMTVEQVDETILRDKLREQQAINDEIAIAITNPGFGEQVDEEDLEAELEGMEQEAMDERMLHTGTVPVADQLNRLPAPANAERKALPFPPQKRTPTDSLPAAKAKQKAEEEDEEAELEKLRAEMAM

SEQ ID NO: 150659 - DNA, 699 bp, Kluyveromyces lactis
  CDS (1)..(699)
atgtggggctatttcttcggaacttccaaacaacagaaagaactgcctaagaaggcgattgtcgaccttagagaacatatccaactattgaataagaaacaggcgcatttgcaaacacagatagatcagcagcaacaacttgcaaagaaaagtcttcaatctggtaataagaataatgcgaagacttatttgaagaagaagaagctttatgaatcacagcttgacaaactacaatcacagatagattctttggatcaacaactttactcgatagaaaatgctaatttgaatttggaaactttgaaggcaatgaaacaaggtgcatctgcaatgaaaaatatccataaggggctagatctagataaagtggatgatactatggatgaaatcagagaacaagttgaactaaaccaagaaatcagcgaggctatttctaaaccgttgatattacaagatgagttggacgaggacgaattagaccaggagttggaactgctagaatcggaaaacttgcaaaaggaacacattgcccctgtacctcagcaacaaatacaacaaccttcaatagacttaccgtctgtacccgacgtcaaattatctactccagaacttaatagtgcccaagcagatgaggaagacgaagaagaggatgaagatgaacgtgcattaagagaactacaagctgaaatgggattgtag

SEQ ID NO: 150660 - protein, 232 aa, Kluyveromyces lactis
MWGYFFGTSKQQKELPKKAIVDLREHIQLLNKKQAHLQTQIDQQQQLAKKSLQSGNKNNAKTYLKKKKLYESQLDKLQSQIDSLDQQLYSIENANLNLETLKAMKQGASAMKNIHKGLDLDKVDDTMDEIREQVELNQEISEAISKPLILQDELDEDELDQELELLESENLQKEHIAPVPQQQIQQPSIDLPSVPDVKLSTPELNSAQADEEDEEEDEDERALRELQAEMGL

SEQ ID NO: 150661 - DNA, 1077 bp, Magnaporthe grisea
  CDS (397)..(1077)
atgccgccgggcgtacgttgtcagaactctttcggagggtccgggccggcagccaacgacattgacccattcaccaggctgcgtctgctcttggttaagggcctggagaataagattcacgtcgaccagcgcctgaacccgcgattggcggggatcggaatcacggtctcccagctgggatgtgttttcgagagtcagggttgcattactggtcgcataggaagtgacgctgacaatgtgcaggtaaatcggtaccttgcgaggtccgaaacgaaccagacgatagacgactttgacctacggaacggggctcatacaccacgtacaccaggcgggcggccgagttggactctatacaaccacgttggcctttacttacacaacaagcaattaatcatgtcgggcgtatggggatggtttggcggaaacgccgcgcaacggcgaaaggacacgcccaagaatgccatcttggggctgcgatcacaactcgacatgcttcagaagcgtgaaaagcacctgcaaaatcagatttccgaacaggatgcgatcgcgaggaagaacatttcaacaaacaagaatgccgccaaggccgcgttgaagaggaagaagacacatgagcacagtcttgaccaaacgctctcgcagatcggcacccttgagcagcagataaacgctatcgagtctgcaaacatcaacatggaaaccctcgaggccatgaagaaggcaggcaaggccatggaggacatacacggaaagcttacggtagagaaggtcgatgagaccatggacaagttacgggagcagaatgctctcagcgaggagattgtcaacgccatcacaaacaatcagctcggaaacgaggcaatcgacgatgccgacctggaggatgagctggaagcgatggaacaagagcaactggacgagaaaattctcaagacgggcacagggccggtatcggacgcaatccagcgcttaccagcagctgcgaatggagaactcaagggaaaggcaaccaccgtggaagaagacgacgaggaggcagagctcaggaaattgcaggcagagatggccatgtga

SEQ ID NO: 150662 - protein, 226 aa, Magnaporthe grisea
MSGVWGWFGGNAAQRRKDTPKNAILGLRSQLDMLQKREKHLQNQISEQDAIARKNISTNKNAAKAALKRKKTHEHSLDQTLSQIGTLEQQINAIESANINMETLEAMKKAGKAMEDIHGKLTVEKVDETMDKLREQNALSEEIVNAITNNQLGNEAIDDADLEDELEAMEQEQLDEKILKTGTGPVSDAIQRLPAAANGELKGKATTVEEDDEEAELRKLQAEMAM

SEQ ID NO: 150663 - DNA, 687 bp, Neurospora crassa
  CDS (1)..(687)
atgtctggaatttggggctggtttggcgggggctcagccgcgcaaaaacgcaaagatagccccaagaatgccattctcggcttgcgaacgcaactggacatgctccagaagcgtgagcgccatctacagaaccagatcgatgaacaggatgccatagcacgaaagaacgtcagcacgaacaagacggctgcgaagcaagccttgcgacgcaaaaaggtcgccgaaagcaccctcgagaccacgctgggtcagatcaccaccctcgagcagcaaataaatgcgattgagtctgccaacatcaaccgggagaccctggccgccatgcaggcagcacgtgaggctatgggcaagattcacggcaaactcacccccgagaaggtcgacgaggaaatggcgaaactccaagaagcgaacgatctcagcaatgaaatcgccacagccattaccagcgccaacattggacaaccgattgacgagggggagctcgaggacgagcttgaaaagctccagcaggaggaggtggactcgaagctacacgaaacaggtggatcgatccctgtccatgataagatctctcttccggcagccggaaccggcgcactcaagggcaaggagaaggcgaaggcggttgtcgaggatgacgaggaggaggagctcagaaagttgcaggccgagatggctatgtga

SEQ ID NO: 150664 - protein, 228 aa, Neurospora crassa
MSGIWGWFGGGSAAQKRKDSPKNAILGLRTQLDMLQKRERHLQNQIDEQDAIARKNVSTNKTAAKQALRRKKVAESTLETTLGQITTLEQQINAIESANINRETLAAMQAAREAMGKIHGKLTPEKVDEEMAKLQEANDLSNEIATAITSANIGQPIDEGELEDELEKLQQEEVDSKLHETGGSIPVHDKISLPAAGTGALKGKEKAKAVVEDDEEEELRKLQAEMAM

SEQ ID NO: 150665 - DNA, 669 bp, Schizosaccharomyces pombe
  CDS (1)..(669)
atgtctggatttttaagatggtttgggggcaatcgctctaaggatactacaaaagatacgattgtaagatttcaagagatgctcgcattatatgataagaaggaagaggttttagagcgtcaaattgcagagcaaacagaaattgctagaaaaaatgctacgacaaacaaacgattggccctcactgctttaaagcgaaagaaaatgcacgaaaatgaactggttaaaatagagggtagtagaaacaatattgagcagcaacttttctcaatacagaatgccaacctcaactttgagacattacaagctatgagacaaggagctgaagctatgaagagcattcaacgtggtatggatgctgataaagtggatcagatcatggataagattcgtgaccaacagacaatctctgaggaaatttctactatgattagcactcctgtcggtttgaatgctgagattgatgaagatgaattggccaacgagttagatgaactccagcaaatggaacttgatagcaagatgttgggagctgagaaacctcctgtacacactcctgctgttcctgctgtcccgtctcaagtcaaagacctcccttctatttcaaagcctcaagaattggatgaagaagaagaacttcgaaaactacaggctgaattctctctttaa

SEQ ID NO: 150666 - protein, 222 aa, Schizosaccharomyces pombe
MSGFLRWFGGNRSKDTTKDTIVRFQEMLALYDKKEEVLERQIAEQTEIARKNATTNKRLALTALKRKKMHENELVKIEGSRNNIEQQLFSIQNANLNFETLQAMRQGAEAMKSIQRGMDADKVDQIMDKIRDQQTISEEISTMISTPVGLNAEIDEDELANELDELQQMELDSKMLGAEKPPVHTPAVPAVPSQVKDLPSISKPQELDEEEELRKLQAEFSL

SEQ ID NO: 150667 - DNA, 648 bp, Yarrowia lipolytica
  CDS (1)..(648)
atgtggggattctttggaggcgcgaagaaacaggatcccaaggacaccatcatctccttgcggcagcagatcattgtgttgaacaagaaaaacgacaacctcattgtgcagatccaggagcaggagaacttggcccgcaaacatgtcaccaccaacaagctgatggccaaaaatgcgctcaagaagaagaagaacctggagaagcagcaggagacggtgcagggctccatagactcgctgcagacgtctatcaacactctggagaccgccaacctcaacttggagactatgaaggccatgcaggagggagccaaggccatgaagcagattcacggcaacatgaacattgacaaggtggacaagatcatggacgagactcgtgaccaggtggcgttgtccgaggaggtttccgaagccatttccagaccttatgccaatgcctacgacgacgaggagctggaggacgagctggaggccctggaacaggagactttggagggcgagcttactaacgctggtcatgttaagcaggatggcgtccaggtgacccctcatgacctgcctgcggctcctaaccaggtgcctgctgaggaggaggatgatgaggaggaggagctgagacggttgcagagagagatggctttgtaa

SEQ ID NO: 150668 - protein, 215 aa, Yarrowia lipolytica
MWGFFGGAKKQDPKDTIISLRQQIIVLNKKNDNLIVQIQEQENLARKHVTTNKLMAKNALKKKKNLEKQQETVQGSIDSLQTSINTLETANLNLETMKAMQEGAKAMKQIHGNMNIDKVDKIMDETRDQVALSEEVSEAISRPYANAYDDEELEDELEALEQETLEGELTNAGHVKQDGVQVTPHDLPAAPNQVPAEEEDDEEEELRRLQREMAL

SEQ ID NO: 150669 - DNA, 669 bp, Hordeum vulgare
  CDS (1)..(669)
atgtcgggggtgtttggcagggtgttcggtaagtccaaggagcagagccaggcgtccgcgctggcctccatcgacaagctcagcgagactcttgaaatgttagaaaagaaggaaaatttactaatgaagaaagcaaatcttgaagttgagaaggccaaggcgttcaccaaagccaagaacaaaaaagctgcaatacagtgtttgaagaggaaaagattatatgagcaacaggtggagcagcttggcaatttccaattaaggattcatgatcagatgataatgctggaaggtgcaaaagctacaacagagaccgtggatgcattgagaaccggagcatcagcgatgaaagctatgcacaaatcaacaaatatcgatgatgttgacaaaaccatggatgaaattaatgacaacatggagaacatgaggcagatccaggatctactatctgcgcctatgggagcagcaagtgatttcgatgaagatgagctggaagctgaacttgcggatttggagggcgaggagttggaggcacagctactggcacctaccacaagtgctcctatgactgctccagcgcgggtacctcagcagtcgagtcggcccactgctcagagtagtaaaaccgaagacgatgagctggcagctttacaagcagaaatggctatgtaa

SEQ ID NO: 150670 - protein, 222 aa, Hordeum vulgare
MSGVFGRVFGKSKEQSQASALASIDKLSETLEMLEKKENLLMKKANLEVEKAKAFTKAKNKKAAIQCLKRKRLYEQQVEQLGNFQLRIHDQMIMLEGAKATTETVDALRTGASAMKAMHKSTNIDDVDKTMDEINDNMENMRQIQDLLSAPMGAASDFDEDELEAELADLEGEELEAQLLAPTTSAPMTAPARVPQQSSRPTAQSSKTEDDELAALQAEMAM

SEQ ID NO: 150671 - DNA, 639 bp, Brassica napus
  CDS (1)..(639)
atgtttaatcggctattcggtaaacccaaggtggagaccaatactctccacacattggacaagcttaatgagacacttgagatgctggagaagaaggagggtgttcttctcaagaaagctgctggagaggttgagagagccaaggaattctccaaggccaagaacaaacgcgcggcgatacagtgtttgaaaaggaagaggttgtatgagcaacaagttgaacagcttggcaacttccagctccgtattcatgatcaaatgattatgttggaaggtgctaaagcaacaactgagactgtagatgctttgaggactggtgctgctactatgaaagctatgcagaaagctacaaacattgacgatgttgacaagacgatggatgagatcaatgagcaaaccgataacatgaaacagatccagaacgcattgtccgctccatttggctctgctgctgatttcgatgaggatgaattggaagcaaaacttgaaaaacttgaaggcttaaagctaaaggaccaacttcttcagccagcaaaacccgttcctgaaggaaagcaaactgctcgtcctctacctcaaaagcaacagtccgctcatgaaaatgaactcgctgcactacaggctgaaatggcactctaa

SEQ ID NO: 150672 - protein, 212 aa, Brassica napus
MFNRLFGKPKVETNTLHTLDKLNETLEMLEKKEGVLLKKAAGEVERAKEFSKAKNKRAAIQCLKRKRLYEQQVEQLGNFQLRIHDQMIMLEGAKATTETVDALRTGAATMKAMQKATNIDDVDKTMDEINEQTDNMKQIQNALSAPFGSAADFDEDELEAKLEKLEGLKLKDQLLQPAKPVPEGKQTARPLPQKQQSAHENELAALQAEMAL

SEQ ID NO: 150673 - DNA, 639 bp, Brassica napus
  CDS (1)..(639)
atgtttaatcggctattcggtaaacccaaggtggagaccaatactctccacacattggacaagcttaatgagacacttgagatgctggagaagaaggagggtgttcttctcaagaaagctgctggagaggttgagagagccaaggaattctccaaggccaagaacaaacgcgcggcgatacagtgtttgaaaaggaagaggttgtatgagcaacaagttgaacagcttggcaacttccagctccgtattcatgatcaaatgattatgttggaaggtgctaaagcaacaactgagactgtagatgctttgaggactggtgctgctactatgaaagctatgcagaaagctacaaacattgacgatgttgacaagacgatggatgagatcaatgagcaaaccgataacatgaaacagatccaggacgcattgtccgctccctttggctctgctgctgatttcgatgaggatgaattggaagcagaacttgaagaacttgaaggcttagagctagaggaccaacttcttcagccagcaagacccgttcctgaaggaaagcaacctgctcgtcctctacctcagaagcaacagtccgctcatgaagatgaactcgctgcactacaggctgagatggcactctaa

SEQ ID NO: 150674 - protein, 212 aa, Brassica napus
MFNRLFGKPKVETNTLHTLDKLNETLEMLEKKEGVLLKKAAGEVERAKEFSKAKNKRAAIQCLKRKRLYEQQVEQLGNFQLRIHDQMIMLEGAKATTETVDALRTGAATMKAMQKATNIDDVDKTMDEINEQTDNMKQIQDALSAPFGSAADFDEDELEAELEELEGLELEDQLLQPARPVPEGKQPARPLPQKQQSAHEDELAALQAEMAL

SEQ ID NO: 150675 - DNA, 681 bp, Zea mays
  CDS (1)..(681)
atgtcgggcgtgttcggcagggtgttcgggaagtccaaggagcagagccaggcgaccgcgctggcctcgctcgacaagctcaacgagacacttgaaatgttggaaaagaaggaaaacttgctagtgaaaaaggccaatcttgaggtcgagaaggctaagaattttaccaaagccaagaataaaagagctgcaatacagtgcttgaagaggaaaagactatacgagcaacagattgagcagcttggaaatttccagcttaggatacatgatcagatgattatgctggaagcagcaaaagctacaacagagaccgtggatgcattgagaactggagcatcagcaatgaaagctatgcataagtcaacaaatattgatgatgttgataaaaccatggatgaaattaatgacaatatggagaacatgagacaaattcaggatctgttgtcagcgcctatgggagcagcagctgattttgatgaggatgaactagaagctgaacttgcggatcttgagggggaggagttggaggcagagctgcttgcacctaccacaacagctccgtccacagctccagtgcgtgtgcgtgtacctactgctcagcagtccactaggccatctggtcagagtagcaaagctgaagacgacgagctggcagcactacaggcagaaatggctatgtaa

SEQ ID NO: 150676 - protein, 226 aa, Zea mays
MSGVFGRVFGKSKEQSQATALASLDKLNETLEMLEKKENLLVKKANLEVEKAKNFTKAKNKRAAIQCLKRKRLYEQQIEQLGNFQLRIHDQMIMLEAAKATTETVDALRTGASAMKAMHKSTNIDDVDKTMDEINDNMENMRQIQDLLSAPMGAAADFDEDELEAELADLEGEELEAELLAPTTTAPSTAPVRVRVPTAQQSTRPSGQSSKAEDDELAALQAEMAM

SEQ ID NO: 150677 - DNA, 25 bp, Artificial sequence
  primer
atgtggtcatcactttttggttgga

SEQ ID NO: 150678 - DNA, 24 bp, Artificial sequence
  primer
tcaaagccccatttctgcttgtag

SEQ ID NO: 150679 - protein, 235 aa, Artificial sequence
  consensus sequence
  Variant (2)..(13): Xaa in position 2 to 13 is any amino acid
  Variant (14)..(21): Xaa in position 14 to 21 is any or no amino acid
  Variant (23)..(28): Xaa in position 23 to 28 is any amino acid
  Variant (30)..(30): Xaa in position 30 is any amino acid
  Variant (32)..(35): Xaa in position 32 to 35 is any amino acid
  Variant (37)..(46): Xaa in position 37 to 46 is any amino acid
  Variant (48)..(54): Xaa in position 48 to 54 is any amino acid
  Variant (55)..(55): Xaa in position 55 is any or no amino acid
  Variant (57)..(57): Xaa in position 57 is any amino acid
  Variant (58)..(58): Xaa in position 58 is any or no amino acid
  Variant (60)..(62): Xaa in position 60 to 62 is any amino acid
  Variant (64)..(65): Xaa in position 64 to 65 is any amino acid
  Variant (67)..(69): Xaa in position 67 to 69 is any amino acid
  Variant (71)..(72): Xaa in position 71 to 72 is any amino acid
  Variant (73)..(85): Xaa in position 73 to 85 is any or no amino acid
  Variant (87)..(90): Xaa in position 87 to 90 is any amino acid
  Variant (92)..(92): Xaa in position 92 is any amino acid
  Variant (94)..(108): Xaa in position 94 to 108 is any amino acid
  Variant (110)..(110): Xaa in position 110 is any amino acid
  Variant (112)..(119): Xaa in position 112 to 119 is any amino acid
  Variant (120)..(120): Xaa in position 120 is any or no amino acid
  Variant (122)..(122): Xaa in position 122 is any amino acid
  Variant (124)..(126): Xaa in position 124 to 126 is any amino acid
  Variant (128)..(129): Xaa in position 128 to 129 is any amino acid
  Variant (131)..(133): Xaa in position 131 to 133 is any amino acid
  Variant (136)..(141): Xaa in position 136 to 141 is any amino acid
  Variant (143)..(144): Xaa in position 143 to 144 is any amino acid
  Variant (146)..(153): Xaa in position 146 to 153 is any amino acid
  Variant (154)..(157): Xaa in position 154 to 157 is any or no amino acid
  Variant (160)..(160): Xaa in position 160 is any amino acid
  Variant (163)..(164): Xaa in position 163 to 164 is any amino acid
  Variant (167)..(168): Xaa in position 167 to 168 is any amino acid
  Variant (170)..(171): Xaa in position 170 to 171 is any amino acid
  Variant (173)..(204): Xaa in position 173 to 204 is any amino acid
  Variant (205)..(234): Xaa in position 205 to 234 is any or no amino acid
GXXXXXXXXXXXXXXXXXXXXLXXXXXXLXKXXXXLXXXXXXXXXXAXXXXXXXXKXXAXXXLXXKXXXEXXXXXXXXXXXXXXXQXXXXEXAXXXXXXXXXXXXXXXAXKXXXXXXXXXDXVXXXMXXDXXXEQXXXXXXIXXAXXXXXXXXXXXXDEXELXXELXXLXXEXXXXXXXXXXXXXXXXXXXXXXXXXXXXXXXXXXXXXXXXXXXXXXXXXXXXXXXXXXXXXXL

SEQ ID NO: 150680 - protein, 22 aa, Artificial sequence
  protein pattern
  Variant (2)..(2): Xaa in position 2 is any amino acid
  Variant (4)..(5): Xaa in position 4 to 5 is any amino acid
  Variant (6)..(6): Xaa in position 6 is Glu, Asn or Thr
  Variant (7)..(8): Xaa in position 7 to 8 is any amino acid
  Variant (9)..(9): Xaa in position 9 is Ala, Thr or Val
  Variant (10)..(10): Xaa in position 10 is Leu, Met or Val
  Variant (11)..(12): Xaa in position 11 to 12 is any amino acid
  Variant (13)..(13): Xaa in position 13 is Leu or Met
  Variant (14)..(15): Xaa in position 14 to 15 is any amino acid
  Variant (16)..(16): Xaa in position 16 is Ala or Gly
  Variant (17)..(18): Xaa in position 17 to 18 is any amino acid
  Variant (20)..(20): Xaa in position 20 is any amino acid
  Variant (21)..(21): Xaa in position 21 is any or no amino acid
EXAXXXXXXXXXXXXXXXAXXK

SEQ ID NO: 150681 - protein, 15 aa, Artificial sequence
  protein pattern
  Variant (2)..(2): Xaa in position 2 is Asp or Glu
  Variant (3)..(3): Xaa in position 3 is Ala, Asp or Glu
  Variant (4)..(4): Xaa in position 4 is Asp or Glu
  Variant (5)..(5): Xaa in position 5 is Leu or Val
  Variant (6)..(7): Xaa in position 6 to 7 is any amino acid
  Variant (10)..(11): Xaa in position 10 to 11 is any amino acid
  Variant (13)..(14): Xaa in position 13 to 14 is any or no amino acid
DXXXXXXELXXLXXE

SEQ ID NO: 150682 - DNA, 1725 bp, Saccharomyces cerevisiae; identical to SEQ ID NO: 97114
  CDS (1)..(1725)

SEQ ID NO: 150683 - protein, 574 aa, Saccharomyces cerevisiae; identical to SEQ ID NO: 97115

SEQ ID NO: 150684 - DNA, 1536 bp, Oryza sativa (japonica cultivar-group); identical to SEQ ID NO: 97304
  CDS (1)..(1536)

SEQ ID NO: 150685 - protein, 511 aa, Oryza sativa (japonica cultivar-group); identical to SEQ ID NO: 97305

SEQ ID NO: 150686 - DNA, 1683 bp, Saccharomyces cerevisiae; identical to SEQ ID NO: 96992
  CDS (1)..(1683)

SEQ ID NO: 150687 - protein, 560 aa, Saccharomyces cerevisiae; identical to SEQ ID NO: 96993

SEQ ID NO: 150688 - DNA, 1758 bp, Magnaporthe grisea 70-15
  CDS (1)..(1758)
atgcttggcggcaagtccatcagggtcaatggcgccgagtgcggcgtcgagtctctcttcctcggcgctgtcaccagcctgggtggctttcttttcggttacgacacgggtcagatctcgggcatgctcatcttcgaggactttcagcgccgcttcgccacgggccccgttggggagaatggcatccgggaatgggttcccatcattcagtccaccatggtgtccctgatgagcatcggaacgctcatcggtgctctttctggtgcctacactgccgactggtggggacgtcggaggagtttggcgttcggtgtcatcttgttcatcatcggcaacatcatccagattactgccatggagtcttggattcacatgatgatgggtcgcctgattgctggttttggtattggtaacctgtctgtcggtgtgcccatgttccagtcggagtgtgctccccgtgagattaggggtgccgttgtggccagctaccaactgctcatcactttcggaatcctcatctcaaacatcatcaactacggtgtcaggaacatccagggctccgacgcctcgtggagaatcgtgattggcctgggcatcttcttcagcgtgcctctcggtatcggcatcctgctcgtccccgagtctccccgttggctcgccggacgtcaggactgggatggtgctcgcatgtccatcgctcgtctccgcggcatgaagcacgaccccaacaacgtcctcgtcgagaccgacatcagcgagatgtacaagatcatcaaggaggagtccagcgtcggagtcggcagctgggccgaatgcttcaccggcaagggcggttccgaaggcattcccaaggttgtgtaccgcaccatcttgggcatgttcatgcactttacgcagcagtggaccggtgtaaactacttcttctactacggtgccacgattttccagtctgctggtgtcgacgaccctatcgtcacgcaattgatcctgggcgccgtcaacgtcgccatgaccttcttgggtctgtacattgtcgagaagtttggacgtcgtggtcccctctttattggtggcgcgtggcaggcggtctggctggctgtttttgctgccattggaaccgctctgccgcccacagagaaccgcgtctctggcatcgtcatgattgtgtccgcctgcatgtttattgcttcgttcgccagcacctggggtcccatctgctgggtcgtcatcggcgagaccttcccgctccgcacgcgtgccaagcaggcctcgctgtccacagccggcaactggctgggcaactttatgatttcgttcctcacgcccatcgccaccgacggcatctcgttctcctacggcttcgtgtttgccgccgtcaacttgtgcggtgccctgggcgtgtacttcttcctctacgagtcccgcatgctgtcgctcgagaacgtcgaccgcatgtacggcgacccgtccatcaagccctggaactcgcgcaagtggactccccccggatacatcaaccgccgcaccaaggacgagaagtacgtgcccgagggcgagcacgtccagggcggagtcaggggctcggtcggcagcgacaacaccgccgtccccggcgaggccgacgtcaaccacgaccacgccaagcaaaggcctggtagcgacggcgttcccacgacggagcagcacgagcaggctgtgctccggaacgcaaaactgactggtttagctgccagtgagagcatatatatacaaacataa

SEQ ID NO: 150689 - protein, 585 aa, Magnaporthe grisea 70-15
MLGGKSIRVNGAECGVESLFLGAVTSLGGFLFGYDTGQISGMLIFEDFQRRFATGPVGENGIREWVPIIQSTMVSLMSIGTLIGALSGAYTADWWGRRRSLAFGVILFIIGNIIQITAMESWIHMMMGRLIAGFGIGNLSVGVPMFQSECAPREIRGAVVASYQLLITFGILISNIINYGVRNIQGSDASWRIVIGLGIFFSVPLGIGILLVPESPRWLAGRQDWDGARMSIARLRGMKHDPNNVLVETDISEMYKIIKEESSVGVGSWAECFTGKGGSEGIPKVVYRTILGMFMHFTQQWTGVNYFFYYGATIFQSAGVDDPIVTQLILGAVNVAMTFLGLYIVEKFGRRGPLFIGGAWQAVWLAVFAAIGTALPPTENRVSGIVMIVSACMFIASFASTWGPICWVVIGETFPLRTRAKQASLSTAGNWLGNFMISFLTPIATDGISFSYGFVFAAVNLCGALGVYFFLYESRMLSLENVDRMYGDPSIKPWNSRKWTPPGYINRRTKDEKYVPEGEHVQGGVRGSVGSDNTAVPGEADVNHDHAKQRPGSDGVPTTEQHEQAVLRNAKLTGLAASESIYIQT

SEQ ID NO: 150690 - DNA, 1743 bp, Gibberella zeae PH-1; identical to SEQ ID NO: 97667
  CDS (1)..(1743)

SEQ ID NO: 150691 - protein, 580 aa, Gibberella zeae PH-1; identical to SEQ ID NO: 97668

SEQ ID NO: 150692 - DNA, 1650 bp, Candida glabrata CBS 138; identical to SEQ ID NO: 97006
  CDS (1)..(1650)

SEQ ID NO: 150693 - protein, 549 aa, Candida glabrata CBS 138; identical to SEQ ID NO: 97007

SEQ ID NO: 150694 - DNA, 1707 bp, Candida glabrata CBS 138; identical to SEQ ID NO: 97008
  CDS (1)..(1707)

SEQ ID NO: 150695 - protein, 568 aa, Candida glabrata CBS 138; identical to SEQ ID NO: 97009

SEQ ID NO: 150696 - DNA, 1692 bp, Candida glabrata CBS 138; identical to SEQ ID NO: 97010
  CDS (1)..(1692)

SEQ ID NO: 150697 - protein, 563 aa, Candida glabrata CBS 138; identical to SEQ ID NO: 97011

SEQ ID NO: 150698 - DNA, 1602 bp, Candida glabrata CBS 138; identical to SEQ ID NO: 97012
  CDS (1)..(1602)

SEQ ID NO: 150699 - protein, 533 aa, Candida glabrata CBS 138; identical to SEQ ID NO: 97013

SEQ ID NO: 150700 - DNA, 1659 bp, Candida glabrata CBS 138; identical to SEQ ID NO: 97014
  CDS (1)..(1659)

SEQ ID NO: 150701 - protein, 552 aa, Candida glabrata CBS 138; identical to SEQ ID NO: 97015

SEQ ID NO: 150702 - DNA, 1650 bp, Candida glabrata CBS 138; identical to SEQ ID NO: 97016
  CDS (1)..(1650)

SEQ ID NO: 150703 - protein, 549 aa, Candida glabrata CBS 138; identical to SEQ ID NO: 97017

SEQ ID NO: 150704 - DNA, 1671 bp, Candida glabrata CBS 138; identical to SEQ ID NO: 97018
  CDS (1)..(1671)

SEQ ID NO: 150705 - protein, 556 aa, Candida glabrata CBS 138; identical to SEQ ID NO: 97019

SEQ ID NO: 150706 - DNA, 1695 bp, Candida glabrata CBS 138; identical to SEQ ID NO: 97020
  CDS (1)..(1695)

SEQ ID NO: 150707 - protein, 564 aa, Candida glabrata CBS 138; identical to SEQ ID NO: 97021

SEQ ID NO: 150708 - DNA, 1668 bp, Candida glabrata CBS 138; identical to SEQ ID NO: 97022
  CDS (1)..(1668)

SEQ ID NO: 150709 - protein, 555 aa, Candida glabrata CBS 138; identical to SEQ ID NO: 97023

SEQ ID NO: 150710 - DNA, 1587 bp, Kluyveromyces lactis NRRL Y-1140; identical to SEQ ID NO: 97693
  CDS (1)..(1587)

SEQ ID NO: 150711 - protein, 528 aa, Kluyveromyces lactis NRRL Y-1140; identical to SEQ ID NO: 97694

SEQ ID NO: 150712 - DNA, 1731 bp, Debaryomyces hansenii CBS767; identical to SEQ ID NO: 97697
  CDS (1)..(1731)

SEQ ID NO: 150713 - protein, 576 aa, Debaryomyces hansenii CBS767; identical to SEQ ID NO: 97698

SEQ ID NO: 150714 - DNA, 1665 bp, Debaryomyces hansenii CBS767; identical to SEQ ID NO: 97024
  CDS (1)..(1665)

SEQ ID NO: 150715 - protein, 554 aa, Debaryomyces hansenii CBS767; identical to SEQ ID NO: 97025

SEQ ID NO: 150716 - DNA, 1737 bp, Debaryomyces hansenii CBS767; identical to SEQ ID NO: 97026
  CDS (1)..(1737)

SEQ ID NO: 150717 - protein, 578 aa, Debaryomyces hansenii CBS767; identical to SEQ ID NO: 97027

SEQ ID NO: 150718 - DNA, 1602 bp, Yarrowia lipolytica CLIB122; identical to SEQ ID NO: 97028
  CDS (1)..(1602)

SEQ ID NO: 150719 - protein, 533 aa, Yarrowia lipolytica CLIB122; identical to SEQ ID NO: 97029

SEQ ID NO: 150720 - DNA, 1653 bp, Candida albicans SC5314; identical to SEQ ID NO: 97034
  CDS (1)..(1653): transl_table=12

SEQ ID NO: 150721 - protein, 550 aa, Candida albicans SC5314; identical to SEQ ID NO: 97035

SEQ ID NO: 150722 - DNA, 1641 bp, Candida albicans SC5314; identical to SEQ ID NO: 97036
  CDS (1)..(1641): transl_table=12

SEQ ID NO: 150723 - protein, 546 aa, Candida albicans SC5314; identical to SEQ ID NO: 97037

SEQ ID NO: 150724 - DNA, 1623 bp, Candida albicans SC5314; identical to SEQ ID NO: 97038
  CDS (1)..(1623): transl_table=12

SEQ ID NO: 150725 - protein, 540 aa, Candida albicans SC5314; identical to SEQ ID NO: 97039

SEQ ID NO: 150726 - DNA, 1494 bp, Candida albicans SC5314
  CDS (1)..(1494): transl_table=12
atgtctcaagacaacgtctcatcaacatctacagctgaggctgtaaataatgaaatcaaagtcaaagatgaatttccacaagaagaacaagctcatactagtttagaagataaaccagtgagtgcatacattggtatcatcattatgtgtttccttattgcctttggtggttttgttttcggtttcgatactggtaccatttctggttttattaatatgtctgactttttagaaagattcggtggtactaaagctgacggtactctttacttttccaatgtcagaactggtttaatgattggtttgttcaacgctggttgtgccattggtgcattattcttgtccaaagtcggtgatatgtatggtagaagagttggtatcatgactgctatgattgtctatattgttggtattattgttcaaattgcttctcaacatgcttggtatcaagtcatgattggtagaattattactggtcttgccgtcggtatgttatcagttttatgtcctttgttcatttccgaagtttctccaaaacatttgagaggtactttggtgtgctgtttccaattgatgattaccttgggtatcttcttgggttattgtactacctatggtactaagagttactcagactctagacaatggagaattccattgggtttatgtttcgcctgggctttatgtttggttgctggtatggttagaatgccagaatctccacgttaccttgtcggtaaagacagaattgaagatgctaaaatgtcacttgccaaaactaacaaggtttctccagaggacccagcattataccgtgaacttcaattaatccaagctggtgttgaaagagaaagattggccggtaaagcatcttggggtactttattcaatggtaaaccaagaatctttgaaagagttattgttggtgtcatgttacaagccttacaacaattaactggtgataactatttcttctactacagtaccaccattttcaagtccgttggtatgaatgattccttcgaaacttctatcattattggtgttattaactttgcatccacttttgttggtatctacgctattgaaagaatgggtagaagactctgtttgttaactggttccgttgccatgtcaatctgtttcttaatctattccttggttggtactcaacatctttatattgacaaaccaggtggtgctagtagaaaaccagatggtgatgccatgatctttatgacttcactttatgtgttcttctttgcttctacatgggctggtggtgtttactccattatttctgaactttatccattgaaagttagaagtaaggctatgggtttagctaatgcttccaattggacctggggtttcttaatttctttctttacttcatttattactgatgccatccacttctactacggtttcgtctttatgggatgtttagttttctccaattttctttgtctactttatggtttacgaaactaa

SEQ ID NO: 150727 - protein, 497 aa, Candida albicans SC5314
MSQDNVSSTSTAEAVNNEIKVKDEFPQEEQAHTSLEDKPVSAYIGIIIMCFLIAFGGFVFGFDTGTISGFINMSDFLERFGGTKADGTLYFSNVRTGLMIGLFNAGCAIGALFLSKVGDMYGRRVGIMTAMIVYIVGIIVQIASQHAWYQVMIGRIITGLAVGMLSVLCPLFISEVSPKHLRGTLVCCFQLMITLGIFLGYCTTYGTKSYSDSRQWRIPLGLCFAWALCLVAGMVRMPESPRYLVGKDRIEDAKMSLAKTNKVSPEDPALYRELQLIQAGVERERLAGKASWGTLFNGKPRIFERVIVGVMLQALQQLTGDNYFFYYSTTIFKSVGMNDSFETSIIIGVINFASTFVGIYAIERMGRRLCLLTGSVAMSICFLIYSLVGTQHLYIDKPGGASRKPDGDAMIFMTSLYVFFFASTWAGGVYSIISELYPLKVRSKAMGLANASNWTWGFLISFFTSFITDAIHFYYGFVFMGCLVFSNFLCLLYGLRN

SEQ ID NO: 150728 - DNA, 1662 bp, Strongylocentrotus purpuratus; identical to SEQ ID NO: 97352
  CDS (1)..(1662)

SEQ ID NO: 150729 - protein, 553 aa, Strongylocentrotus purpuratus; identical to SEQ ID NO: 97353

SEQ ID NO: 150730 - DNA, 1674 bp, Strongylocentrotus purpuratus; identical to SEQ ID NO: 97046
  CDS (1)..(1674)

SEQ ID NO: 150731 - protein, 557 aa, Strongylocentrotus purpuratus; identical to SEQ ID NO: 97047

SEQ ID NO: 150732 - DNA, 1383 bp, Pediococcus pentosaceus ATCC 25745; identical to SEQ ID NO: 97781
  CDS (1)..(1383): transl_table=11

SEQ ID NO: 150733 - protein, 460 aa, Pediococcus pentosaceus ATCC 25745; identical to SEQ ID NO: 97782

SEQ ID NO: 150734 - DNA, 1629 bp, Aspergillus niger
  CDS (1)..(1629)
atgggtgtcgaaacctccgctgaccacggggagaacatctccccggcggtcgctccccagcagcactccagccaggagtctttccagaagcctcttggcggtgttgacacccctgtcccccgcgttactctgcgggccttcatcatggccgtcttcgtctccatgggtggtctcctttttggttatgacactggtcagatctccggttttgagcaggaatccgactatcttcgccgctatggtatgcagaatgccaagggcgaatggtacctgagtgacgtccgctccggtctgttgaccagtcttctgtccattggtaccttggttggtgctctcgtcgctgcccccatcgccaacaaggtgggccgtaagtggtccatcaccatctggtgtgtcatcctcatggtcggcttgattgtccagatctccgccccctcgggcaactgggtccagatggtcatgggtcgttggaccactggtctgggtgttggtgcttgctccctgctggtccccatgtaccagggtgagagtgccccccgtcacgtgcgtggtgcgatggtcagttgctaccagctgttcgtcaccttcggtatcttcctggcctacctgatcaacctgggtaccaacaccctggagggcactgcccaatggcggatcaccctcggtctaaccttcctgttcgccattgtcctcggtggtggtatggctttcttccccgagtcgcctcgtttcgacttccgccacggccgcgtcgaccgggctcgcgctaccatggccaagctgtacggtgtgcctgagaaccaccaagtcatccttcaggagctcgacgagatccagaaccagctcgaggccgaaaccggcagcgagaagtggtacgagtttctcactgcgcctcgcatgttctaccgtatctgcctgggtatgggcctgcagaccctccagcagctgactggttccaactacttcttctactatggtaccaccatcttcaagggtgccggtctgtccaacagcttcgttacccagtgcattctgggtgccgtcaacttcgcttgcaccttcggtggtctgtacaccgttgagaacttcggtcgtcgcaagtctctgatcttcggagccctgtggatgttcgtctgcttcatgatcttcgcttcgatcggtcacttcatgctcgacgtcgctgagcccgagaacacccctggcgtcggtaagggtatgattgtgctcgcttgcttcttcattgccggatacgccatgacctgggctcccatggtctggaccatcactgccgagctgtacccctccaagtaccgtgcccagggtatggctctggccgttgctgccaactgggcctggaacttcctgatcggtttcttcactcccttcatcaccagcgccatcgacttcgcctacggatacgtcttcgctggctgcatgttcgtcggtgcctttgtcgtctacttcttcgtcatggagggtaagggccgtactctcgaggagctgtactggctgtacgtcaacaagatcaagccctggaagagcagcaatttcgagatccctgccctgcactccttccagtacgaggaggagcgcaagcagtctcgttcttaccacgctgagaatgcgtaa

SEQ ID NO: 150735 - protein, 542 aa, Aspergillus niger
MGVETSADHGENISPAVAPQQHSSQESFQKPLGGVDTPVPRVTLRAFIMAVFVSMGGLLFGYDTGQISGFEQESDYLRRYGMQNAKGEWYLSDVRSGLLTSLLSIGTLVGALVAAPIANKVGRKWSITIWCVILMVGLIVQISAPSGNWVQMVMGRWTTGLGVGACSLLVPMYQGESAPRHVRGAMVSCYQLFVTFGIFLAYLINLGTNTLEGTAQWRITLGLTFLFAIVLGGGMAFFPESPRFDFRHGRVDRARATMAKLYGVPENHQVILQELDEIQNQLEAETGSEKWYEFLTAPRMFYRICLGMGLQTLQQLTGSNYFFYYGTTIFKGAGLSNSFVTQCILGAVNFACTFGGLYTVENFGRRKSLIFGALWMFVCFMIFASIGHFMLDVAEPENTPGVGKGMIVLACFFIAGYAMTWAPMVWTITAELYPSKYRAQGMALAVAANWAWNFLIGFFTPFITSAIDFAYGYVFAGCMFVGAFVVYFFVMEGKGRTLEELYWLYVNKIKPWKSSNFEIPALHSFQYEEERKQSRSYHAENA

SEQ ID NO: 150736 - DNA, 1461 bp, Nilaparvata lugens
  CDS (1)..(1461)
atgagcaccaaggcaacgactgtcagtgctcagaccctggtgtcgactgccgtcccggcggccaaactaccgcagtatgtggctgctctcattgccacgatcggaggcttctgccttggcacagtgctgggatggacgtctccggtgctgacgtcactgtccgactactacggcttcgaagtgaacgtggactcgcaggcgtggatcggatccatcatggcgattggcgccatggtcggcggtctgcctatgagttggatgctggatacgttcggccgcaagtccaccatcatcatcctcaccgtgcccaccgtcgccgcttggatgatgatcatttttgcacccagtgtgacagtaatttgcatagccaggttcatacttggtttcaccaccggagcatatgcagttgccgtgccattatacaccagcgaaataagtgagaacgagatccgaggaacgttaggaacatattttcaactacaacttacaattggaataacatcagcttacattctgggaagtctgctacccatcttctggatgacaatggtgtgtggatgcataccggttgtgttggccctggctatgttgatcatccccgagactccgacctactacttaaaaaaattcagggttgatgaggcaaggaaagctttgcagtggttccgtggcagccattatgatgttgaacccgagcttatgcttttgaaagcaaatttggatcagatggaagcagagcgtgtacctttcacccaagcgtttgtgacaacaccagctaaacgcggtctagtggttggactcggtgtcatgttcttccaacaagttcaagtggagtcaatgctgtcatattctacgcccgaaagtatttttaaggctgctggcagttcgatgagtccaagtctgcaaacaattatagttggtctgattatggttgtgatgacatgggttgctacgctggcgatcgaccgtgccggcagaagaccactgcttctaatctccgcatcaatcatggctatttgcactgcgattctcggtgtttactttttattacttgagaaaactccagatttcgcaaaaacgatcgggtcggttccgattgtcagtttgtcaattttcattattgtattctcgttgggatttggaccaattccgtggatgttcatgtcagagatattccctccacagatcaagggaccagcatgctcgatagcctgctttttcaactggttctctgtattcatggttacaaaattcttcggtgatttgcaatcgaagtttggatcgtatggaactttctggattttctctggaatttccatagctggaacattctttgttctgaatctggtacctgagaccaagggaaagtctatggaggaaatccaaaaggagctaggagcaacccctcaaatgacacctgaggatagaatggagaatggacagaaacctgcaaaattttga

SEQ ID NO: 150737 - protein, 486 aa, Nilaparvata lugens
MSTKATTVSAQTLVSTAVPAAKLPQYVAALIATIGGFCLGTVLGWTSPVLTSLSDYYGFEVNVDSQAWIGSIMAIGAMVGGLPMSWMLDTFGRKSTIIILTVPTVAAWMMIIFAPSVTVICIARFILGFTTGAYAVAVPLYTSEISENEIRGTLGTYFQLQLTIGITSAYILGSLLPIFWMTMVCGCIPVVLALAMLIIPETPTYYLKKFRVDEARKALQWFRGSHYDVEPELMLLKANLDQMEAERVPFTQAFVTTPAKRGLVVGLGVMFFQQVQVESMLSYSTPESIFKAAGSSMSPSLQTIIVGLIMVVMTWVATLAIDRAGRRPLLLISASIMAICTAILGVYFLLLEKTPDFAKTIGSVPIVSLSIFIIVFSLGFGPIPWMFMSEIFPPQIKGPACSIACFFNWFSVFMVTKFFGDLQSKFGSYGTFWIFSGISIAGTFFVLNLVPETKGKSMEEIQKELGATPQMTPEDRMENGQKPAKF

SEQ ID NO: 150738 - DNA, 1596 bp, Aspergillus parasiticus; identical to SEQ ID NO: 97362
  CDS (1)..(1596)

SEQ ID NO: 150739 - protein, 531 aa, Aspergillus parasiticus; identical to SEQ ID NO: 97363

SEQ ID NO: 150740 - DNA, 1711 bp, Amanita muscaria; identical to SEQ ID NO: 97364
  CDS (38)..(1600)

SEQ ID NO: 150741 - protein, 520 aa, Amanita muscaria; identical to SEQ ID NO: 97365

SEQ ID NO: 150742 - DNA, 1533 bp, Petunia hybrida; identical to SEQ ID NO: 97795
  CDS (1)..(1533)

SEQ ID NO: 150743 - protein, 510 aa, Petunia hybrida; identical to SEQ ID NO: 97796

SEQ ID NO: 150744 - DNA, 2118 bp, Solanum lycopersicum; identical to SEQ ID NO: 97366
  CDS (93)..(1664)

SEQ ID NO: 150745 - protein, 523 aa, Solanum lycopersicum; identical to SEQ ID NO: 97367

SEQ ID NO: 150746 - DNA, 1644 bp, Candida intermedia; identical to SEQ ID NO: 97064
  CDS (1)..(1644)

SEQ ID NO: 150747 - protein, 547 aa, Candida intermedia; identical to SEQ ID NO: 97065

SEQ ID NO: 150748 - DNA, 1641 bp, Aspergillus oryzae; identical to SEQ ID NO: 97068
  CDS (1)..(1641)

SEQ ID NO: 150749 - protein, 546 aa, Aspergillus oryzae; identical to SEQ ID NO: 97069

SEQ ID NO: 150750 - DNA, 1788 bp, Aspergillus oryzae; identical to SEQ ID NO: 97070
  CDS (1)..(1788)

SEQ ID NO: 150751 - protein, 595 aa, Aspergillus oryzae; identical to SEQ ID NO: 97071

SEQ ID NO: 150752 - DNA, 1629 bp, Emericella nidulans; identical to SEQ ID NO: 97082
  CDS (1)..(1629)

SEQ ID NO: 150753 - protein, 542 aa, Emericella nidulans; identical to SEQ ID NO: 97083

SEQ ID NO: 150754 - DNA, 1563 bp, Tuber borchii; identical to SEQ ID NO: 97084
  CDS (1)..(1563)

SEQ ID NO: 150755 - protein, 520 aa, Tuber borchii; identical to SEQ ID NO: 97085

SEQ ID NO: 150756 - DNA, 1611 bp, Vitis vinifera
  CDS (1)..(1611)
atgcctgctggaggattcgcggccccgtcggccggtggcgactttgaagccaagatcactcctatcgttatcatttcttgcatcatggccgccaccggcggcctcatgttcggctacgacgttggcgtttctgggggtgtgacgtcgatggacccattcttgaagaaattttttccggtagtatataggaagcagcatgaggagctggagagcaattactgcaagtacgacaaccaagggctacagctgttcacgtcgtctctatatcttgcgggcttgacctccactttcttcgcatcatacacaaccagaagttttggtcgtaaggcaaccatgcttattgctgggattttcttcattgtgggagtggtgcttaataccgctgcccaagatctagctatgctcatcattgggaggatccttttgggctgtggcgtcggtttcgctaatcaggctgttccactgttcttatcggagatagcacctacaagaatacgtggaggactaaacatactgttccaacttaacgtcactattggcatactttttgctaacctcgtcaattacggcactgccaaaatcaaagggggatggggatggagggtatcattggggttggctgggattcctgcggtcctcctaactgtggggtctctcttggtggtggacacccctaacagccttatcgagcgtggtcgcttggaagaaggaaaggcagttctcagaaagataaggggcactgacaagattgaaccagaatatcaggagcttcttgaggcaagtcgtgtggctaaattagtgaagcacccctttaggaatctaatgcagcgcagaaaccgaccccagctgatcattgctgtggccttgcagatcttccagcaattcacaggcatcaatgcaatcatgttttatgctccagtcctgttcgacactttgggatttggtagtgatgcgtccctctactcagctgtcataacgggggctgttaatgttctctcaaccctcgtgtccgtctactctgtcgacaaagtaggccgtcgattgctcttgctggaagctggcgtccagatgttcttctctcaagtggtaattgcaatcatactaggcatcaaagtcaaagatcactccaacaatctccacactggctatgcagtcctagtagtggtcttggtgtgcacttttgtggccggctttgcatggtcttgggggccactcggttggctcattccaagtgagaccttcccactggagacccgatcagcagggcagagtgtgactgtttgtgtgaacctgctcttcacttttgtcatagcacagtccttcctttccatgctttgccatttaaagtatggcatcttccttttcttctccggctgggtcttcatcatgtccttctttgtgctctttttgctcccggagaccaaaaacattccaattgaggaaatgacagagagggtgtggaagaagcattggttgtggaagagattcatggatgaccatgtggagggcttccctgtttttggttataatgatgaagaaactgttgttaatggaagtgacaaaaagagagatgggtacggcaatggattcgatccttcttcccaattataa

SEQ ID NO: 150757 - protein, 536 aa, Vitis vinifera; identical to SEQ ID NO: 97403

SEQ ID NO: 150758 - DNA, 3229 bp, Torulaspora delbrueckii; identical to SEQ ID NO: 97090
  CDS (986)..(2689)

SEQ ID NO: 150759 - protein, 567 aa, Torulaspora delbrueckii; identical to SEQ ID NO: 97091

SEQ ID NO: 150760 - DNA, 1722 bp, Saccharomyces mikatae IFO 1815; identical to SEQ ID NO: 97094
  CDS (1)..(1722)

SEQ ID NO: 150761 - protein, 573 aa, Saccharomyces mikatae IFO 1815; identical to SEQ ID NO: 97095

SEQ ID NO: 150762 - DNA, 1503 bp, Vitis vinifera
  CDS (1)..(1503)
atggcagtggggggtttcgccgctgacgacaattccagggccttcagtggcaaggtaacagcgtcggtggtgatcacctgcatcgttgccgcatctggtggcctcatttttgggtatgacatcggaatttcaggaggtgtaacaacgatgcaaccctttcttaagaaattcttcccggtggtactgaggaaagcggcggacgccaagaccaacatatactgtgtgtatgacagccacgtcttaacagcattcacatcctcactgtacatagcggggttagcagcgtccctggtggctagtcgcctcaccagagcagtgggacgtagaaacacaatgataattggtggtttgactttcctgattggcgctgctctcaatggtggggccgaaaatgttgccatgctcatcttgggccgtatattgctgggatttggtgttggtttcactaaccaggcaacccctatctacctctcggagatggcgccaccgaaatggcgcggtgctttcggcacaagttttcaattcttcataggcataggggtggtggtagccaattgcctaaattatggaaccgctaagatcagctgggggtggcgcctctccctcggccttgcgattgtgccctcggtaatcatgactgtgggtgcactacttatctcagacaccccaagtagccttgtggagcgtgggaaggtggcccaagctcgcgactctctccgtaaagcccgaggaaaagacatcgacatcgaacctgagctggctgagctagtgaagacgagcgaagcagtcaaagctgcaaatgaagagccgttcgttactatattcgaaaggcagtatcggccgcacctagtgatggcctttgccattcctttctttcagcagctcactgggattaacatcatcgccttctacgcgccggtcctctttcaatctgtgggatttggaagcgactcggctctgatagcctccataatactgggatgtgtgaaccttttgtccatcattgtgtctacatttatagttgatcgatatggcagaagaattctgttcctggagggtggaactcagatgatcatcggtcaggtggcggtggcgtgtgtgctagcagtaactacgggcgtttcgggaacaaaggacatacccagggggtacgcggtgttggtactggtacttatgtgcatctatgcagctggttttggttggtcatggggtcctctgagctggctcattcccagtgagatttttcctatgaaaatccgcacaaccggccaagctataagcgttgccgtcaacttcgcaacaaccttcgtgctagcccagacattcttgaccatgctgtgccactttaaatacggcactttcctcttctatgccggttggctcattgcaatgacccttttcgtaatacttttcgtgccggagaccaaaggaattcctctagaatccatgtatcaagtgtgggagagacattggttctggcggaggtttgtttctctgccatag

SEQ ID NO: 150763 - protein, 500 aa, Vitis vinifera; identical to SEQ ID NO: 97097

SEQ ID NO: 150764 - DNA, 1590 bp, Sclerotinia sclerotiorum; identical to SEQ ID NO: 97098
  CDS (1)..(1590)

SEQ ID NO: 150765 - protein, 529 aa, Sclerotinia sclerotiorum; identical to SEQ ID NO: 97099

SEQ ID NO: 150766 - DNA, 1647 bp, Trichoderma reesei; identical to SEQ ID NO: 97102
  CDS (1)..(1647)

SEQ ID NO: 150767 - protein, 548 aa, Trichoderma reesei; identical to SEQ ID NO: 97103

SEQ ID NO: 150768 - DNA, 2536 bp, Pichia angusta; identical to SEQ ID NO: 97416
  CDS (578)..(2203)

SEQ ID NO: 150769 - protein, 541 aa, Pichia angusta; identical to SEQ ID NO: 97105

SEQ ID NO: 150770 - DNA, 1545 bp, Aspergillus niger; identical to SEQ ID NO: 97106
  CDS (1)..(1545)

SEQ ID NO: 150771 - protein, 514 aa, Aspergillus niger; identical to SEQ ID NO: 97107

SEQ ID NO: 150772 - DNA, 1752 bp, Aspergillus niger; identical to SEQ ID NO: 97108
  CDS (1)..(1752)

SEQ ID NO: 150773 - protein, 583 aa, Aspergillus niger; identical to SEQ ID NO: 97109

SEQ ID NO: 150774 - DNA, 1569 bp, Uromyces fabae; identical to SEQ ID NO: 97426
  CDS (1)..(1569)

SEQ ID NO: 150775 - protein, 522 aa, Uromyces fabae; identical to SEQ ID NO: 97427

SEQ ID NO: 150776 - DNA, 1956 bp, Solanum lycopersicum; identical to SEQ ID NO: 97428
  CDS (61)..(1632)

SEQ ID NO: 150777 - protein, 523 aa, Solanum lycopersicum; identical to SEQ ID NO: 97429

SEQ ID NO: 150778 - DNA, 1674 bp, Schizosaccharomyces pombe; identical to SEQ ID NO: 97116
  CDS (1)..(1674)

SEQ ID NO: 150779 - protein, 557 aa, Schizosaccharomyces pombe; identical to SEQ ID NO: 97117

SEQ ID NO: 150780 - DNA, 1668 bp, Schizosaccharomyces pombe; identical to SEQ ID NO: 97120
  CDS (1)..(1668)

SEQ ID NO: 150781 - protein, 555 aa, Schizosaccharomyces pombe; identical to SEQ ID NO: 97121

SEQ ID NO: 150782 - DNA, 1641 bp, Schizosaccharomyces pombe; identical to SEQ ID NO: 97124
  CDS (1)..(1641)

SEQ ID NO: 150783 - protein, 546 aa, Schizosaccharomyces pombe; identical to SEQ ID NO: 97125

SEQ ID NO: 150784 - DNA, 1608 bp, Schizosaccharomyces pombe; identical to SEQ ID NO: 97126
  CDS (1)..(1608)

SEQ ID NO: 150785 - protein, 535 aa, Schizosaccharomyces pombe; identical to SEQ ID NO: 97127

SEQ ID NO: 150786 - DNA, 1641 bp, Saccharomyces cerevisiae; identical to SEQ ID NO: 97130
  CDS (1)..(1641)

SEQ ID NO: 150787 - protein, 546 aa, Saccharomyces cerevisiae; identical to SEQ ID NO: 97131

SEQ ID NO: 150788 - DNA, 1704 bp, Saccharomyces cerevisiae; identical to SEQ ID NO: 97132
  CDS (1)..(1704)

SEQ ID NO: 150789 - protein, 567 aa, Saccharomyces cerevisiae; identical to SEQ ID NO: 97133

SEQ ID NO: 150790 - DNA, 1695 bp, Saccharomyces cerevisiae; identical to SEQ ID NO: 97134
  CDS (1)..(1695)

SEQ ID NO: 150791 - protein, 564 aa, Saccharomyces cerevisiae; identical to SEQ ID NO: 97135

SEQ ID NO: 150792 - DNA, 1704 bp, Saccharomyces cerevisiae; identical to SEQ ID NO: 97138
  CDS (1)..(1704)

SEQ ID NO: 150793 - protein, 567 aa, Saccharomyces cerevisiae; identical to SEQ ID NO: 97139

SEQ ID NO: 150794 - DNA, 1704 bp, Saccharomyces cerevisiae; identical to SEQ ID NO: 97140
  CDS (1)..(1704)

SEQ ID NO: 150795 - protein, 567 aa, Saccharomyces cerevisiae; identical to SEQ ID NO: 97141

SEQ ID NO: 150796 - DNA, 1695 bp, Saccharomyces cerevisiae; identical to SEQ ID NO: 97142
  CDS (1)..(1695)

SEQ ID NO: 150797 - protein, 564 aa, Saccharomyces cerevisiae; identical to SEQ ID NO: 97143

SEQ ID NO: 150798 - DNA, 1713 bp, Saccharomyces cerevisiae; identical to SEQ ID NO: 97144
  CDS (1)..(1713)

SEQ ID NO: 150799 - protein, 570 aa, Saccharomyces cerevisiae; identical to SEQ ID NO: 97145

SEQ ID NO: 150800 - DNA, 1626 bp, Saccharomyces cerevisiae; identical to SEQ ID NO: 97146
  CDS (1)..(1626)

SEQ ID NO: 150801 - protein, 541 aa, Saccharomyces cerevisiae; identical to SEQ ID NO: 97147

SEQ ID NO: 150802 - DNA, 1704 bp, Saccharomyces cerevisiae; identical to SEQ ID NO: 97148
  CDS (1)..(1704)

SEQ ID NO: 150803 - protein, 567 aa, Saccharomyces cerevisiae; identical to SEQ ID NO: 97149

SEQ ID NO: 150804 - DNA, 1731 bp, Saccharomyces cerevisiae; identical to SEQ ID NO: 97150
  CDS (1)..(1731)

SEQ ID NO: 150805 - protein, 576 aa, Saccharomyces cerevisiae; identical to SEQ ID NO: 97151

SEQ ID NO: 150806 - DNA, 1779 bp, Saccharomyces cerevisiae; identical to SEQ ID NO: 97152
  CDS (1)..(1779)

SEQ ID NO: 150807 - protein, 592 aa, Saccharomyces cerevisiae; identical to SEQ ID NO: 97153

SEQ ID NO: 150808 - DNA, 1713 bp, Saccharomyces cerevisiae; identical to SEQ ID NO: 96986
  CDS (1)..(1713)

SEQ ID NO: 150809 - protein, 570 aa, Saccharomyces cerevisiae; identical to SEQ ID NO: 96987

SEQ ID NO: 150810 - DNA, 1710 bp, Saccharomyces cerevisiae; identical to SEQ ID NO: 97154
  CDS (1)..(1710)

SEQ ID NO: 150811 - protein, 569 aa, Saccharomyces cerevisiae; identical to SEQ ID NO: 97155

SEQ ID NO: 150812 - DNA, 1704 bp, Saccharomyces cerevisiae; identical to SEQ ID NO: 97156
  CDS (1)..(1704)

SEQ ID NO: 150813 - protein, 567 aa, Saccharomyces cerevisiae; identical to SEQ ID NO: 97157

SEQ ID NO: 150814 - DNA, 1530 bp, Arabidopsis thaliana
  CDS (1)..(1530)
atgacattgacgatcccaaacgcacctgggagctccgggtacttggatatgttcccagagagaaggatgtcgtattttgggaattcttacattctgggtttgactgtcactgccggaatcggtggccttctgttcggttatgatacaggtgtaatttccggtgcccttttgtacattaaggatgatttcgaagttgttaagcagagcagtttcttacaggaaactattgtaagtatggctttagtcggtgccatgattggtgctgcagctggaggttggatcaatgactactacggtcgtaaaaaggcgactctttttgcagatgttgtctttgcagctggagctatcgttatggctgctgctcctgatccgtatgttttgatatcgggtcgtctcttggtcggtttaggagttggtgttgcttctgtgactgctccggtttatatagcggaagcatctccatcggaagttagaggtggacttgtgagcaccaacgtattgatgatcactggtggacagtttctttcatatctcgttaattctgctttcacacaggttccaggaacatggagatggatgcttggtgtttcaggcgttcccgctgtgattcagttcatcctcatgcttttcatgccagaatcccctcgatggcttttcatgaaaaatcgtaaagcggaagccatccaagtgctcgccagaacctatgacatctcgcggttagaagacgagattgatcatctttcagcggctgaagaggaagaaaaacaaaggaagcgcactgttggctacttggatgttttcagatccaaagaattgagacttgcatttcttgccggagcaggacttcaggcgtttcagcagttcactggtatcaatacagttatgtactacagccctacgatagtccaaatggctggatttcactcaaaccagctcgctttgttcctgtctctcattgttgctgccatgaatgctgctggaacagtcgtggggatttacttcatcgatcattgtggaaggaaaaagctagctctctcaagtttatttggcgtcattatatcactcttaatcctctcagtctcgtttttcaaacaatctgagacatcatctgatggagggctctatggttggctcgctgtgcttggcttagctctatacattgttttctttgcaccgggaatgggaccagtcccatggacggtgaactcagagatataccctcaacaataccgaggcatatgcggaggcatgtcagctacagttaactggatcagcaatttgattgtggcacaaacattcttgacaatcgcggaagctgctggaacaggaatgactttcttgattttggcgggaattgcggttcttgctgtaatctttgtgattgtgtttgtccctgagactcaagggctaacgttttcggaagttgaacagatttggaaagaaagagcttatggaaatatcagtggctggggcagtagcagtgatagcaacaacatggaagggttactcgagcagggatctcaatcttaa

SEQ ID NO: 150815 - protein, 509 aa, Arabidopsis thaliana
MTLTIPNAPGSSGYLDMFPERRMSYFGNSYILGLTVTAGIGGLLFGYDTGVISGALLYIKDDFEVVKQSSFLQETIVSMALVGAMIGAAAGGWINDYYGRKKATLFADVVFAAGAIVMAAAPDPYVLISGRLLVGLGVGVASVTAPVYIAEASPSEVRGGLVSTNVLMITGGQFLSYLVNSAFTQVPGTWRWMLGVSGVPAVIQFILMLFMPESPRWLFMKNRKAEAIQVLARTYDISRLEDEIDHLSAAEEEEKQRKRTVGYLDVFRSKELRLAFLAGAGLQAFQQFTGINTVMYYSPTIVQMAGFHSNQLALFLSLIVAAMNAAGTVVGIYFIDHCGRKKLALSSLFGVIISLLILSVSFFKQSETSSDGGLYGWLAVLGLALYIVFFAPGMGPVPWTVNSEIYPQQYRGICGGMSATVNWISNLIVAQTFLTIAEAAGTGMTFLILAGIAVLAVIFVIVFVPETQGLTFSEVEQIWKERAYGNISGWGSSSDSNNMEGLLEQGSQS

SEQ ID NO: 150816 - DNA, 1701 bp, Kluyveromyces lactis; identical to SEQ ID NO: 97158
  CDS (1)..(1701)

SEQ ID NO: 150817 - protein, 566 aa, Kluyveromyces lactis; identical to SEQ ID NO: 97159

SEQ ID NO: 150818 - DNA, 1704 bp, Kluyveromyces lactis; identical to SEQ ID NO: 97160
  CDS (1)..(1704)

SEQ ID NO: 150819 - protein, 567 aa, Kluyveromyces lactis; identical to SEQ ID NO: 97161

SEQ ID NO: 150820 - DNA, 1785 bp, Neurospora crassa; identical to SEQ ID NO: 97162
  CDS (1)..(1785)

SEQ ID NO: 150821 - protein, 594 aa, Neurospora crassa; identical to SEQ ID NO: 97163

SEQ ID NO: 150822 - DNA, 2655 bp, Saccharomyces cerevisiae; identical to SEQ ID NO: 97929
  CDS (1)..(2655)

SEQ ID NO: 150823 - protein, 884 aa, Saccharomyces cerevisiae; identical to SEQ ID NO: 97930

SEQ ID NO: 150824 - DNA, 1569 bp, Ricinus communis
  CDS (1)..(1569)
atggcaggagggtccttggcaccggccggtgtggccaaggaaagagcagaacaatatcaagggaaggtcacctttgctgtgttcgttgcctgtatggttgctgctgttggagggtcgatttttggatacgatattggaatctcaggaggagtgatctcaatggatgcatttcttgaaaaatttttccgtagtgtatatttaaagaagaagcatgcacatgaaaacaactactgcaaatacgacgaccaaaggctggcagcttttacctcttctctctaccttgctggattggctgcatctctagtggcaggtcctattactagaatatatggtcgccgtgcaagtataatttctggaggcattagctttcttattggtgcagccttgaatgccacagctattaatctggcaatgctcctcctaggacggatcatgctaggtgttggcataggatttgggaatcaggctgttccactatatttatcagagatggcgcctactcatcttcgaggaggactgaacattatgtttcagttagcaacaaccagtggaatctttacagcaaatatggtaaattatggtactcataagcttgaatcatggggatggagactctcactgggactagcagcagccccagctctcctaatgacaataggaggattacttctgcccgagacaccaaacagtttaattgaacaaggattgcatgagaaagggagaaatgtcctggagaaaatcagaggaaccaagcatgtagatgcagaatttcaggacatgctagatgcgagtgaattggctaactcaatcaagcatcccttcagaaacattcttgagaaaaggaacagaccgcaattggttatggcaattttcatgccaacgttccagattcttacaggcattaatattatcctcttctatgctcccccactgtttcaaagcatgggatttggaggaaatgccgcactctactcctcagctgtgactggagcagttctttgttcctctaccttcatttccatagcaacagttgacagactaggtagaagatttttacttatcagtggaggaatacaaatgataacatgccaggtaatagtggctataatcttgggagtaaaatttggggacaaccagcaactgtctaaaagcttctcagtgttggtggtaattatgatttgcctctttgttttagcttttggatggtcatggggtccattaggctggacagtaccaagtgagatatttccactcgaaacgcgatcagctggacagagcattacagtagctgtaaaccttttcttcactttcgtcatagcacagtctttcccttcacttctttgtgcattcaagtttgggatattcctcttctttgctggttgggttactgtcatgaccgccttcgtttacatcttcctgcctgaaaccaaaggagttcccattgaagagatgatattcctatggagaaagcactggttctggaagaaaatagtgccaggacaaccagaagttgatgatagtagggaaagcatggaaatgggtgaagctgttgcaagcagaattaagtag

SEQ ID NO: 150825 - protein, 522 aa, Ricinus communis; identical to SEQ ID NO: 97485

SEQ ID NO: 150826 - DNA, 1545 bp, Arabidopsis thaliana
  CDS (1)..(1545)
atggcaggaggggcatttatagacgagagtggccatggaggagactacgaaggtcgtgtaaccgcgtttgtcatgataacctgcattgtagctgcaatgggtggtctcctctttggttacgacattggtatctcaggaggagtgatatcaatggaggactttctaacgaaattcttccctgacgtgcttcgtcaaatgcaaaacaaaagagggcgtgaaacagaatattgtaaatatgacaatgagcttcttactctcttcacttcctctctttacctcgctgctttgttcgcttctttccttgcctccaccattacaaggctttttggccggaaggtctcaatggttatcgggtctctcgcttttctctctggagctcttctcaacggtttagctatcaacctcgagatgttgatcatcgggcggttatttctcggtgtaggtgtcggattcgctaaccaatctgttcctctttacctctctgagatggctcctgctaagatcagaggagctctcaacattggttttcaattagcaatcacgatcgggatcttagccgcgaacattgtcaattacgtgaccccaaagctccagaacgggatcggatggagattatctctcggtttagctggagttccggccgttatgatgcttgtcggatgctttttcttgccagatacgccaaactcaatccttgaacgtggaaacaaagaaaaggctaaggagatgctgcagaagatcagaggaaccatggaggttgagcatgagtttaatgaactttgcaacgcgtgtgaagccgcgaagaaagttaagcatccatggacgaacataatgcaagctcgttatcgaccgcagctcacgttttgtaccttcatcccattcttccagcagctaaccgggatcaatgtcattatgttctatgcacctgttctgtttaagaccatcggttttggaaatgacgcctctctcatatccgcagttatcaccggtcttgtcaatgtcctttccaccattgtctccatctactccgttgacaaattcggacgaagagctttgtttcttcaaggtggttttcagatgatcgtgacccagatcgcggtcgggtcgatgatcggatggaaatttggattcaacggggaaggaaatttgtcaggggttgatgcggatataatcttggcactgatatgtctctatgtggcgggtttcgcgtggtcatggggaccgttgggatggttagtgccgagtgagatatgtccattggaaattagatcagcaggacaatcgttaaacgtttcggtgaacatgttctttacattcttcattggacaattcttcttgacgatgctttgccatatgaagtttggtttgttctatttcttcgcgggtatggtcttgatcatgaccattttcatttacttcttgttgccggagacaaaaggtgttccgattgaggagatggggaaagtgtggaaagagcatagatattgggggaaatatagtaataatgatgatggtgatgatgttgatgatgatgcttatttttag

SEQ ID NO: 150827 - protein, 514 aa, Arabidopsis thaliana
MAGGAFIDESGHGGDYEGRVTAFVMITCIVAAMGGLLFGYDIGISGGVISMEDFLTKFFPDVLRQMQNKRGRETEYCKYDNELLTLFTSSLYLAALFASFLASTITRLFGRKVSMVIGSLAFLSGALLNGLAINLEMLIIGRLFLGVGVGFANQSVPLYLSEMAPAKIRGALNIGFQLAITIGILAANIVNYVTPKLQNGIGWRLSLGLAGVPAVMMLVGCFFLPDTPNSILERGNKEKAKEMLQKIRGTMEVEHEFNELCNACEAAKKVKHPWTNIMQARYRPQLTFCTFIPFFQQLTGINVIMFYAPVLFKTIGFGNDASLISAVITGLVNVLSTIVSIYSVDKFGRRALFLQGGFQMIVTQIAVGSMIGWKFGFNGEGNLSGVDADIILALICLYVAGFAWSWGPLGWLVPSEICPLEIRSAGQSLNVSVNMFFTFFIGQFFLTMLCHMKFGLFYFFAGMVLIMTIFIYFLLPETKGVPIEEMGKVWKEHRYWGKYSNNDDGDDVDDDAYF

SEQ ID NO: 150828 - DNA, 1542 bp, Arabidopsis thaliana; identical to SEQ ID NO: 97488
  CDS (1)..(1542)

SEQ ID NO: 150829 - protein, 513 aa, Arabidopsis thaliana; identical to SEQ ID NO: 97489

SEQ ID NO: 150830 - DNA, 1563 bp, Oryza sativa; identical to SEQ ID NO: 97168
  CDS (1)..(1563)

SEQ ID NO: 150831 - protein, 520 aa, Oryza sativa; identical to SEQ ID NO: 97169

SEQ ID NO: 150832 - DNA, 1569 bp, Oryza sativa; identical to SEQ ID NO: 97302
  CDS (1)..(1569)

SEQ ID NO: 150833 - protein, 522 aa, Oryza sativa; identical to SEQ ID NO: 97303

SEQ ID NO: 150834 - DNA, 1413 bp, Brassica napus; identical to SEQ ID NO: 97170
  CDS (1)..(1413)

SEQ ID NO: 150835 - protein, 470 aa, Brassica napus; identical to SEQ ID NO: 97171

SEQ ID NO: 150836 - DNA, 1599 bp, Brassica napus; identical to SEQ ID NO: 97172
  CDS (1)..(1599)

SEQ ID NO: 150837 - protein, 532 aa, Brassica napus; identical to SEQ ID NO: 97173

SEQ ID NO: 150838 - DNA, 1551 bp, Brassica napus; identical to SEQ ID NO: 97174
  CDS (1)..(1551)

SEQ ID NO: 150839 - protein, 516 aa, Brassica napus; identical to SEQ ID NO: 97175

SEQ ID NO: 150840 - DNA, 1527 bp, Brassica napus; identical to SEQ ID NO: 97176
  CDS (1)..(1527)

SEQ ID NO: 150841 - protein, 508 aa, Brassica napus; identical to SEQ ID NO: 97177

SEQ ID NO: 150842 - DNA, 1524 bp, Brassica napus; identical to SEQ ID NO: 97178
  CDS (1)..(1524)

SEQ ID NO: 150843 - protein, 507 aa, Brassica napus; identical to SEQ ID NO: 97179

SEQ ID NO: 150844 - DNA, 1569 bp, Brassica napus; identical to SEQ ID NO: 97180
  CDS (1)..(1569)

SEQ ID NO: 150845 - protein, 522 aa, Brassica napus; identical to SEQ ID NO: 97181

SEQ ID NO: 150846 - DNA, 1596 bp, Brassica napus; identical to SEQ ID NO: 97182
  CDS (1)..(1596)

SEQ ID NO: 150847 - protein, 531 aa, Brassica napus; identical to SEQ ID NO: 97183

SEQ ID NO: 150848 - DNA, 1635 bp, Brassica napus; identical to SEQ ID NO: 97184
  CDS (1)..(1635)

SEQ ID NO: 150849 - protein, 544 aa, Brassica napus; identical to SEQ ID NO: 97185

SEQ ID NO: 150850 - DNA, 1494 bp, Brassica napus; identical to SEQ ID NO: 97186
  CDS (1)..(1494)

SEQ ID NO: 150851 - protein, 497 aa, Brassica napus; identical to SEQ ID NO: 97187

SEQ ID NO: 150852 - DNA, 1428 bp, Brassica napus; identical to SEQ ID NO: 97188
  CDS (1)..(1428)

SEQ ID NO: 150853 - protein, 475 aa, Brassica napus; identical to SEQ ID NO: 97189

SEQ ID NO: 150854 - DNA, 1428 bp, Brassica napus; identical to SEQ ID NO: 97190
  CDS (1)..(1428)

SEQ ID NO: 150855 - protein, 475 aa, Brassica napus; identical to SEQ ID NO: 97191

SEQ ID NO: 150856 - DNA, 1413 bp, Triticum aestivum; identical to SEQ ID NO: 97516
  CDS (1)..(1413)

SEQ ID NO: 150857 - protein, 470 aa, Triticum aestivum; identical to SEQ ID NO: 97517

SEQ ID NO: 150858 - DNA, 1488 bp, Triticum aestivum; identical to SEQ ID NO: 97192
  CDS (1)..(1488)

SEQ ID NO: 150859 - protein, 495 aa, Triticum aestivum; identical to SEQ ID NO: 97193

SEQ ID NO: 150860 - DNA, 1530 bp, Triticum aestivum; identical to SEQ ID NO: 97194
  CDS (1)..(1530)

SEQ ID NO: 150861 - protein, 509 aa, Triticum aestivum; identical to SEQ ID NO: 97195

SEQ ID NO: 150862 - DNA, 1524 bp, Glycine max; identical to SEQ ID NO: 97196
  CDS (1)..(1524)

SEQ ID NO: 150863 - protein, 507 aa, Glycine max; identical to SEQ ID NO: 97197

SEQ ID NO: 150864 - DNA, 1524 bp, Glycine max; identical to SEQ ID NO: 97198
  CDS (1)..(1524)

SEQ ID NO: 150865 - protein, 507 aa, Glycine max; identical to SEQ ID NO: 97199

SEQ ID NO: 150866 - DNA, 1659 bp, Glycine max; identical to SEQ ID NO: 97200
  CDS (1)..(1659)

SEQ ID NO: 150867 - protein, 552 aa, Glycine max; identical to SEQ ID NO: 97201

SEQ ID NO: 150868 - DNA, 1452 bp, Glycine max; identical to SEQ ID NO: 97202
  CDS (1)..(1452)

SEQ ID NO: 150869 - protein, 483 aa, Glycine max; identical to SEQ ID NO: 97203

SEQ ID NO: 150870 - DNA, 1524 bp, Triticum aestivum; identical to SEQ ID NO: 97204
  CDS (1)..(1524)

SEQ ID NO: 150871 - protein, 507 aa, Triticum aestivum; identical to SEQ ID NO: 97205

SEQ ID NO: 150872 - DNA, 1488 bp, Hordeum vulgare; identical to SEQ ID NO: 97206
  CDS (1)..(1488)

SEQ ID NO: 150873 - protein, 495 aa, Hordeum vulgare; identical to SEQ ID NO: 97207

SEQ ID NO: 150874 - DNA, 1512 bp, Brassica napus; identical to SEQ ID NO: 97208
  CDS (1)..(1512)

SEQ ID NO: 150875 - protein, 503 aa, Brassica napus; identical to SEQ ID NO: 97209

SEQ ID NO: 150876 - DNA, 1389 bp, Brassica napus; identical to SEQ ID NO: 97210
  CDS (1)..(1389)

SEQ ID NO: 150877 - protein, 462 aa, Brassica napus; identical to SEQ ID NO: 97211

SEQ ID NO: 150878 - DNA, 1644 bp, Brassica napus; identical to SEQ ID NO: 97212
  CDS (1)..(1644)

SEQ ID NO: 150879 - protein, 547 aa, Brassica napus; identical to SEQ ID NO: 97213

SEQ ID NO: 150880 - DNA, 1524 bp, Brassica napus; identical to SEQ ID NO: 97214
  CDS (1)..(1524)

SEQ ID NO: 150881 - protein, 507 aa, Brassica napus; identical to SEQ ID NO: 97215

SEQ ID NO: 150882 - DNA, 1569 bp, Brassica napus; identical to SEQ ID NO: 97216
  CDS (1)..(1569)

SEQ ID NO: 150883 - protein, 522 aa, Brassica napus; identical to SEQ ID NO: 97217

SEQ ID NO: 150884 - DNA, 1428 bp, Brassica napus; identical to SEQ ID NO: 97218
  CDS (1)..(1428)

SEQ ID NO: 150885 - protein, 475 aa, Brassica napus; identical to SEQ ID NO: 97219

SEQ ID NO: 150886 - DNA, 1527 bp, Brassica napus; identical to SEQ ID NO: 97220
  CDS (1)..(1527)

SEQ ID NO: 150887 - protein, 508 aa, Brassica napus; identical to SEQ ID NO: 97221

SEQ ID NO: 150888 - DNA, 1635 bp, Brassica napus; identical to SEQ ID NO: 97222
  CDS (1)..(1635)

SEQ ID NO: 150889 - protein, 544 aa, Brassica napus; identical to SEQ ID NO: 97223

SEQ ID NO: 150890 - DNA, 1524 bp, Brassica napus; identical to SEQ ID NO: 97224
  CDS (1)..(1524)

SEQ ID NO: 150891 - protein, 507 aa, Brassica napus; identical to SEQ ID NO: 97225

SEQ ID NO: 150892 - DNA, 1683 bp, Glycine max; identical to SEQ ID NO: 97226
  CDS (1)..(1683)

SEQ ID NO: 150893 - protein, 560 aa, Glycine max; identical to SEQ ID NO: 97227

SEQ ID NO: 150894 - DNA, 1467 bp, Glycine max; identical to SEQ ID NO: 97228
  CDS (1)..(1467)

SEQ ID NO: 150895 - protein, 488 aa, Glycine max; identical to SEQ ID NO: 97229

SEQ ID NO: 150896 - DNA, 1518 bp, Glycine max; identical to SEQ ID NO: 97230
  CDS (1)..(1518)

SEQ ID NO: 150897 - protein, 505 aa, Glycine max; identical to SEQ ID NO: 97231

SEQ ID NO: 150898 - DNA, 1494 bp, Glycine max; identical to SEQ ID NO: 97232
  CDS (1)..(1494)

SEQ ID NO: 150899 - protein, 497 aa, Glycine max; identical to SEQ ID NO: 97233

SEQ ID NO: 150900 - DNA, 1569 bp, Glycine max; identical to SEQ ID NO: 97234
  CDS (1)..(1569)

SEQ ID NO: 150901 - protein, 522 aa, Glycine max; identical to SEQ ID NO: 97235

SEQ ID NO: 150902 - DNA, 1536 bp, Glycine max; identical to SEQ ID NO: 97236
  CDS (1)..(1536)

SEQ ID NO: 150903 - protein, 511 aa, Glycine max; identical to SEQ ID NO: 97237

SEQ ID NO: 150904 - DNA, 1557 bp, Glycine max; identical to SEQ ID NO: 97238
  CDS (1)..(1557)

SEQ ID NO: 150905 - protein, 518 aa, Glycine max; identical to SEQ ID NO: 97239

SEQ ID NO: 150906 - DNA, 1461 bp, Glycine max; identical to SEQ ID NO: 97240
  CDS (1)..(1461)

SEQ ID NO: 150907 - protein, 486 aa, Glycine max; identical to SEQ ID NO: 97241

SEQ ID NO: 150908 - DNA, 1506 bp, Glycine max; identical to SEQ ID NO: 97242
  CDS (1)..(1506)

SEQ ID NO: 150909 - protein, 501 aa, Glycine max; identical to SEQ ID NO: 97243

SEQ ID NO: 150910 - DNA, 1467 bp, Glycine max; identical to SEQ ID NO: 97244
  CDS (1)..(1467)

SEQ ID NO: 150911 - protein, 488 aa, Glycine max; identical to SEQ ID NO: 97245

SEQ ID NO: 150912 - DNA, 1572 bp, Glycine max; identical to SEQ ID NO: 97246
  CDS (1)..(1572)

SEQ ID NO: 150913 - protein, 523 aa, Glycine max; identical to SEQ ID NO: 97247

SEQ ID NO: 150914 - DNA, 1542 bp, Zea mays; identical to SEQ ID NO: 97248
  CDS (1)..(1542)

SEQ ID NO: 150915 - protein, 513 aa, Zea mays; identical to SEQ ID NO: 97249

SEQ ID NO: 150916 - DNA, 1557 bp, Glycine max; identical to SEQ ID NO: 97250
  CDS (1)..(1557)

SEQ ID NO: 150917 - protein, 518 aa, Glycine max; identical to SEQ ID NO: 97251

SEQ ID NO: 150918 - DNA, 1533 bp, Zea mays; identical to SEQ ID NO: 97252
  CDS (1)..(1533)

SEQ ID NO: 150919 - protein, 510 aa, Zea mays; identical to SEQ ID NO: 97253

SEQ ID NO: 150920 - DNA, 1503 bp, Zea mays; identical to SEQ ID NO: 97254
  CDS (1)..(1503)

SEQ ID NO: 150921 - protein, 500 aa, Zea mays; identical to SEQ ID NO: 97255

SEQ ID NO: 150922 - DNA, 1611 bp, Zea mays; identical to SEQ ID NO: 97256
  CDS (1)..(1611)

SEQ ID NO: 150923 - protein, 536 aa, Zea mays; identical to SEQ ID NO: 97257

SEQ ID NO: 150924 - DNA, 1596 bp, Zea mays; identical to SEQ ID NO: 97258
  CDS (1)..(1596)

SEQ ID NO: 150925 - protein, 531 aa, Zea mays; identical to SEQ ID NO: 97259

SEQ ID NO: 150926 - DNA, 1521 bp, Zea mays; identical to SEQ ID NO: 97260
  CDS (1)..(1521)

SEQ ID NO: 150927 - protein, 506 aa, Zea mays; identical to SEQ ID NO: 97261

SEQ ID NO: 150928 - DNA, 1572 bp, Zea mays; identical to SEQ ID NO: 97262
  CDS (1)..(1572)

SEQ ID NO: 150929 - protein, 523 aa, Zea mays; identical to SEQ ID NO: 97263

SEQ ID NO: 150930 - DNA, 1509 bp, Zea mays; identical to SEQ ID NO: 97264
  CDS (1)..(1509)

SEQ ID NO: 150931 - protein, 502 aa, Zea mays; identical to SEQ ID NO: 97265

SEQ ID NO: 150932 - DNA, 1458 bp, Zea mays; identical to SEQ ID NO: 97266
  CDS (1)..(1458)

SEQ ID NO: 150933 - protein, 485 aa, Zea mays; identical to SEQ ID NO: 97267

SEQ ID NO: 150934 - DNA, 1458 bp, Zea mays; identical to SEQ ID NO: 97268
  CDS (1)..(1458)

SEQ ID NO: 150935 - protein, 485 aa, Zea mays; identical to SEQ ID NO: 97269

SEQ ID NO: 150936 - DNA, 1572 bp, Zea mays; identical to SEQ ID NO: 97270
  CDS (1)..(1572)

SEQ ID NO: 150937 - protein, 523 aa, Zea mays; identical to SEQ ID NO: 97271

SEQ ID NO: 150938 - DNA, 1602 bp, Zea mays; identical to SEQ ID NO: 97272
  CDS (1)..(1602)

SEQ ID NO: 150939 - protein, 533 aa, Zea mays; identical to SEQ ID NO: 97273

SEQ ID NO: 150940 - DNA, 1545 bp, Zea mays; identical to SEQ ID NO: 97274
  CDS (1)..(1545)

SEQ ID NO: 150941 - protein, 514 aa, Zea mays; identical to SEQ ID NO: 97275

SEQ ID NO: 150942 - DNA, 1509 bp, Zea mays; identical to SEQ ID NO: 97276
  CDS (1)..(1509)

SEQ ID NO: 150943 - protein, 502 aa, Zea mays; identical to SEQ ID NO: 97277

SEQ ID NO: 150944 - DNA, 1620 bp, Zea mays; identical to SEQ ID NO: 97278
  CDS (1)..(1620)

SEQ ID NO: 150945 - protein, 539 aa, Zea mays; identical to SEQ ID NO: 97279

SEQ ID NO: 150946 - DNA, 1575 bp, Zea mays; identical to SEQ ID NO: 97280
  CDS (1)..(1575)

SEQ ID NO: 150947 - protein, 524 aa, Zea mays; identical to SEQ ID NO: 97281

SEQ ID NO: 150948 - DNA, 1602 bp, Zea mays; identical to SEQ ID NO: 97282
  CDS (1)..(1602)

SEQ ID NO: 150949 - protein, 533 aa, Zea mays; identical to SEQ ID NO: 97283

SEQ ID NO: 150950 - DNA, 1458 bp, Zea mays; identical to SEQ ID NO: 97284
  CDS (1)..(1458)

SEQ ID NO: 150951 - protein, 485 aa, Zea mays; identical to SEQ ID NO: 97285

SEQ ID NO: 150952 - DNA, 1533 bp, Zea mays; identical to SEQ ID NO: 97286
  CDS (1)..(1533)

SEQ ID NO: 150953 - protein, 510 aa, Zea mays; identical to SEQ ID NO: 97287

SEQ ID NO: 150954 - DNA, 1563 bp, Zea mays; identical to SEQ ID NO: 97288
  CDS (1)..(1563)

SEQ ID NO: 150955 - protein, 520 aa, Zea mays; identical to SEQ ID NO: 97289

SEQ ID NO: 150956 - DNA, 24 bp, Artificial sequence
  primer
atggcagttgaggagaacaatatg

SEQ ID NO: 150957 - DNA, 24 bp, Artificial sequence
  primer
ttattctagcatggccttgtacca

SEQ ID NO: 150958 - protein, 509 aa, Artificial sequence
  consensus sequence
  Variant (2)..(4): Xaa in position 2 to 4 is any amino acid
  Variant (7)..(9): Xaa in position 7 to 9 is any amino acid
  Variant (11)..(13): Xaa in position 11 to 13 is any amino acid
  Variant (15)..(55): Xaa in position 15 to 55 is any amino acid
  Variant (56)..(77): Xaa in position 56 to 77 is any or no amino acid
  Variant (80)..(92): Xaa in position 80 to 92 is any amino acid
  Variant (93)..(93): Xaa in position 93 is any or no amino acid
  Variant (95)..(109): Xaa in position 95 to 109 is any amino acid
  Variant (110)..(112): Xaa in position 110 to 112 is any or no amino acid
  Variant (115)..(117): Xaa in position 115 to 117 is any amino acid
  Variant (119)..(119): Xaa in position 119 is any amino acid
  Variant (121)..(121): Xaa in position 121 is any amino acid
  Variant (123)..(128): Xaa in position 123 to 128 is any amino acid
  Variant (130)..(133): Xaa in position 130 to 133 is any amino acid
  Variant (135)..(136): Xaa in position 135 to 136 is any amino acid
  Variant (138)..(140): Xaa in position 138 to 140 is any amino acid
  Variant (143)..(148): Xaa in position 143 to 148 is any amino acid
  Variant (150)..(154): Xaa in position 150 to 154 is any amino acid
  Variant (156)..(167): Xaa in position 156 to 167 is any amino acid
  Variant (168)..(187): Xaa in position 168 to 187 is any or no amino acid
  Variant (190)..(204): Xaa in position 190 to 204 is any amino acid
  Variant (206)..(209): Xaa in position 206 to 209 is any amino acid
  Variant (211)..(212): Xaa in position 211 to 212 is any amino acid
  Variant (214)..(215): Xaa in position 214 to 215 is any amino acid
  Variant (217)..(267): Xaa in position 217 to 267 is any amino acid
  Variant (268)..(298): Xaa in position 268 to 298 is any or no amino acid
  Variant (301)..(302): Xaa in position 301 to 302 is any amino acid
  Variant (304)..(304): Xaa in position 304 is any amino acid
  Variant (306)..(309): Xaa in position 306 to 309 is any amino acid
  Variant (311)..(314): Xaa in position 311 to 314 is any amino acid
  Variant (315)..(315): Xaa in position 315 is any or no amino acid
  Variant (317)..(319): Xaa in position 317 to 319 is any amino acid
  Variant (321)..(348): Xaa in position 321 to 348 is any amino acid
  Variant (349)..(352): Xaa in position 349 to 352 is any or no amino acid
  Variant (356)..(364): Xaa in position 356 to 364 is any amino acid
  Variant (365)..(368): Xaa in position 365 to 368 is any or no amino acid
  Variant (370)..(399): Xaa in position 370 to 399 is any amino acid
  Variant (400)..(415): Xaa in position 400 to 415 is any or no amino acid
  Variant (417)..(429): Xaa in position 417 to 429 is any amino acid
  Variant (431)..(432): Xaa in position 431 to 432 is any amino acid
  Variant (434)..(447): Xaa in position 434 to 447 is any amino acid
  Variant (449)..(473): Xaa in position 449 to 473 is any amino acid
  Variant (474)..(483): Xaa in position 474 to 483 is any or no amino acid
  Variant (485)..(500): Xaa in position 485 to 500 is any amino acid
  Variant (505)..(507): Xaa in position 505 to 507 is any amino acid
GXXXFGXXXGXXXGXXXXXXXXXXXXXXXXXXXXXXXXXXXXXXXXXXXXXXXXXXXXXXXXXXXXXXXXXXXXXXXGRXXXXXXXXXXXXXXGXXXXXXXXXXXXXXXXXXGRXXXGXGXGXXXXXXPXXXXEXXPXXXRGXXXXXXQXXXXXGXXXXXXXXXXXXXXXXXXXXXXXXXXXXXXXXWRXXXXXXXXXXXXXXXGXXXXPXXPXXLXXXXXXXXXXXXXXXXXXXXXXXXXXXXXXXXXXXXXXXXXXXXXXXXXXXXXXXXXXXXXXXXXXXXXXXXXXXXXXXXXXQQXXGXNXXXXYXXXXXFXXXGXXXXXXXXXXXXXXXXXXXXXXXXXXXXXXXXGRRXXXXXXXXXXXXXMXXXXXXXXXXXXXXXXXXXXXXXXXXXXXXXXXXXXXXXXXXXXXXFXXXXXXXXXXXXXEXXPXXXXXXXXXXXXXXNXXXXXXXXXXXXXXXXXXXXXXXXXXXXXXXXXXXFXXXXXXXXXXXXXXXXETKGXXXEE

SEQ ID NO: 150959 - protein, 41 aa, Artificial sequence
  protein pattern
  Variant (3)..(5): Xaa in position 3 to 5 is any amino acid
  Variant (7)..(7): Xaa in position 7 is any amino acid
  Variant (8)..(8): Xaa in position 8 is Ala, Gly, Ser or Val
  Variant (9)..(9): Xaa in position 9 is Ala, Ile, Leu or Val
  Variant (11)..(16): Xaa in position 11 to 16 is any amino acid
  Variant (18)..(20): Xaa in position 18 to 20 is any amino acid
  Variant (21)..(21): Xaa in position 21 is Ala, Gly or Ser
  Variant (23)..(23): Xaa in position 23 is any amino acid
  Variant (24)..(24): Xaa in position 24 is Ala, Cys, Gly, Ser, Thr or Val
  Variant (26)..(28): Xaa in position 26 to 28 is any amino acid
  Variant (31)..(40): Xaa in position 31 to 40 is any amino acid
  Variant (41)..(41): Xaa in position 41 is Ala, Cys, Gly, Asn, Ser, Thr or Val
GRXXXGXXXGXXXXXXPXXXXEXXPXXXRGXXXXXXXXXXX

SEQ ID NO: 150960 - DNA, 2052 bp, SACCHAROMYCES CEREVISIAE; identical to SEQ ID NO: 28610
  CDS (1)..(2052)

SEQ ID NO: 150961 - protein, 683 aa, SACCHAROMYCES CEREVISIAE; identical to SEQ ID NO: 28611

SEQ ID NO: 150962 - DNA, 2055 bp, Kluyveromyces lactis
  CDS (1)..(2055)
atgtcgtcggataaattgcataaggttgtgcatgaagctcacgatgttgaagctcgtcatgctccagaacatttctacaattctcaaccgggtaaatcgtactgtactgatgaagaacattaccgtgagatgtacactcagtccattgaggacccagcagggtttttcggtccattggccaaggaatatctagattgggatcgtccattcacccaagtccaaagcggttctttggaacacggtgacattgcctggttcttaaatggtgaactgaatgcttcttataactgtgttgacagacacgcttttgccaacccagacaagccagctttaatctacgaagccgacgatgaatctgaaaacaaggtgatcacttttggcgaattgttgagacaggtctctgaagtggctggtgtcttgcaatcttggggtgtcaagaaaggagacaccgtcgccgtttacttgccaatgattcctgctgcagttgttgctatgttggccgttgcaagattaggtgccattcattcggttatctttgccggtttctctgccggttccttgaaggaaagagttgtcgatgcaggctgtaaagtggtcatcacttgcgatgaaggtaagagaggtggtaagaccgttcataccaagaagattgtcgacgaaggtttggccggtgtcgattccgtttccaagatcttggttttccaaagaactggtactcaaggtatcccaatgaagccagctagagatttctggtggcacgaagagtgtgtcaagcaaagaggttacttgccacctgtcccagtcaactccgaagatccattgttcttgttgtacacctctggttccaccggttctccaaaaggtgtcgtgcactctactgctggttacttgttaggttctgctttgaccaccagattcgttttcgatattcatccagaagatgttttgttcactgctggtgacgtcggttggattaccggccacacttacgccttgtacggtccattgaccttaggtaccgctaccattattttcgaatctactccagcttacccagattatggtagatactggagaatcattgaacgtcatagagctacccacttctacgtcgccccaactgccctaagattgatcaaacgtgtcggtgaagaagaaattgccaagtatgatacctcctccttaagagtcttgggttctgtcggtgaaccaatctctccagatctatgggaatggtaccacgaaaaggttggtaagaataactgtgttatctgtgacaccatgtggcaaaccgaatccggttcacacttgattgccccattggctggtgctgtcccaaccaaaccaggttccgctaccgtcccattcttcggtattaacgcctgtatcatcgacccagtttctggtgaagaattgaagggtaacgatgttgaaggtgtcttggcagtgaagtccccatggccttctatggacagatctgtctggaacaaccatgctcgttacttcgaaacttatttgaagccatacccaggatactacttcacaggtgatggtgctggtagagatcacgacggttactactggatcagaggtagagttgacgatgtcgttaacgtttccggtcacagactttctactgctgaaatcgaagctgctctagctgaacacgaaggtgtttctgaagctgccgttgttggtatcactgatgaactaacaggtcaagctgtcattgcattcgtttccttgaaggacggctatctgtctgaaaatgcggtagagggtgacagtacccacatctctccagacaacttacgtcgtgagttgattctacaagtcagaggtgaaattggtccattcgctgcaccaaagaccgttgttgttgtcaacgatttgccaaaaactagatccggtaaaattatgagaagagtcttgagaaaggttgcatccaaggaagctgatcaattgggtgatctaagtaccttagccaatgcagacgttgtaccatctatcatttctgcagtagaaaatcaatttttcagtcagcagaagaaataa

SEQ ID NO: 150963 - protein, 684 aa, Kluyveromyces lactis
MSSDKLHKVVHEAHDVEARHAPEHFYNSQPGKSYCTDEEHYREMYTQSIEDPAGFFGPLAKEYLDWDRPFTQVQSGSLEHGDIAWFLNGELNASYNCVDRHAFANPDKPALIYEADDESENKVITFGELLRQVSEVAGVLQSWGVKKGDTVAVYLPMIPAAVVAMLAVARLGAIHSVIFAGFSAGSLKERVVDAGCKVVITCDEGKRGGKTVHTKKIVDEGLAGVDSVSKILVFQRTGTQGIPMKPARDFWWHEECVKQRGYLPPVPVNSEDPLFLLYTSGSTGSPKGVVHSTAGYLLGSALTTRFVFDIHPEDVLFTAGDVGWITGHTYALYGPLTLGTATIIFESTPAYPDYGRYWRIIERHRATHFYVAPTALRLIKRVGEEEIAKYDTSSLRVLGSVGEPISPDLWEWYHEKVGKNNCVICDTMWQTESGSHLIAPLAGAVPTKPGSATVPFFGINACIIDPVSGEELKGNDVEGVLAVKSPWPSMDRSVWNNHARYFETYLKPYPGYYFTGDGAGRDHDGYYWIRGRVDDVVNVSGHRLSTAEIEAALAEHEGVSEAAVVGITDELTGQAVIAFVSLKDGYLSENAVEGDSTHISPDNLRRELILQVRGEIGPFAAPKTVVVVNDLPKTRSGKIMRRVLRKVASKEADQLGDLSTLANADVVPSIISAVENQFFSQQKK

SEQ ID NO: 150964 - DNA, 2211 bp, Zea mays
  CDS (1)..(2211)
atggcacagcatatatacgccaccggctgcggccgctgcgggtgcgcccgccccatcatccggacactactgcccgcgctgacccaccatctcgcctcctcgtctctgttgcggcgccggaaggctcccatgggcgccagcgatcacctgggcctggcggcggtggccgccgccaagccgcggaatggcaggacgtgcatggccgtgctgggcgagccactgccggctcttgacgaccccggcatcctcgtccaccccagcgccgacttcgccgcccaggcgctcgtctcgtccacgaaacagtaccgagatatgtaccaaaagtcgatcgacgacccagctggtttctggtcagaaatcgcagatgagttctactggaagcagaagtggagccctgataatgtttgcgctgagaaccttgacgtgaccaaggggccgatcatgattgaatggtttaaggggggaaagaccaacatatgctacaatgcagtggaccgcaatgtggaggcagggaatggggacaagatcgccatgtactgggaggggaatgagcccagtcaggatgggaagctcacctactctgaactgctggaaaaggtttgccagctgtcaaattacttgaaaagcgtcggcgtacgaaaaggtgatgccgtggtgatctacctaccaatgttgatggagctgccgattgcaatgcttgcttgtgcccgcattggtgctgttcactcggttgtgtttgctggcttctcagcagatgcactggcccaacgagtcattgattgcaagcctaaggttgttattacctgcaatgctgtgaaaagggggatgaaaatcatccatctcaaagatatagtagatgcatctctggatcaaagtgcaaagaatggagttgatgtaggcatttgcttgacatatgaaaatcagtccgctctgaataaagtagacactcgatggaaaacaggaagagatgtctggtggcaggatgttgtgcctgatttcccaactaaatgcgatgtggaatgggttgatgcagaggatccactgtttcttttgtacacaagtggcagcacaggaaagccaaagggtgtgttgcatacaactgggggatatatggtctactctgctacaacatttaagcatgcatttgactacaaaccaacagacatatactggtgcactgcagattgtggctggattactggacatagttatgtgacatatggtccactattgaatggagccacagttcttgttttcgaaggggccccaaattaccctgatcctggccgctgttgggacattgttgataaatatggagtgacaatattttatacagcaccaacacttatacgctcacttatgcgtgatggtactgagtatgttgctcggtactctcgcaagtctctccgagtacttggaagtgtgggtgagccaatcaaccccaccgcatggaggtggttgtatgatgttattggtgactcacgatgccccatatcagatacttggtggcagactgaaaccgggggattcatgatcactcctttacctggtgcttggcctcaaaagccaggatcagcaacgtttcctttcttcggtgtgcagccagtcattgttgacgagaaaggtcgggaaatggaaggagaatgcagtggatatctttgcataaagaaatcatggcctggggctttccggactctgtatggagataaagagagatatgagacgacatacttcaaaccatttgctggatattatttctcgggcgatggctgcagcagggataaagatggctaccactggctgactggaagagttgatgatgttatcaatgttagtggacaccggattgggacagcggaagttgagtctgctctggtttcacatccaaaatgtgctgaggctgctgttgttggtattgatcatgaggttaaaggccagggaatatatgcttttgtgactttggtggatggtgttccctacagcgatgatctacggaaaagcctcgttacgacggtccgcagtcagattggtgcgtttgctgctcctgacaagatccattgggcacctgggctccctaagacacgaagtgggaagatcatgcgaagaatcttaagaaaaatcgcatccaggcaactagatgagctcggcgacacgagcacgcttgctgaccctggtgttgtggaccagctgattgcactcagtgacagctaa

SEQ ID NO: 150965 - protein, 736 aa, Zea mays
MAQHIYATGCGRCGCARPIIRTLLPALTHHLASSSLLRRRKAPMGASDHLGLAAVAAAKPRNGRTCMAVLGEPLPALDDPGILVHPSADFAAQALVSSTKQYRDMYQKSIDDPAGFWSEIADEFYWKQKWSPDNVCAENLDVTKGPIMIEWFKGGKTNICYNAVDRNVEAGNGDKIAMYWEGNEPSQDGKLTYSELLEKVCQLSNYLKSVGVRKGDAVVIYLPMLMELPIAMLACARIGAVHSVVFAGFSADALAQRVIDCKPKVVITCNAVKRGMKIIHLKDIVDASLDQSAKNGVDVGICLTYENQSALNKVDTRWKTGRDVWWQDVVPDFPTKCDVEWVDAEDPLFLLYTSGSTGKPKGVLHTTGGYMVYSATTFKHAFDYKPTDIYWCTADCGWITGHSYVTYGPLLNGATVLVFEGAPNYPDPGRCWDIVDKYGVTIFYTAPTLIRSLMRDGTEYVARYSRKSLRVLGSVGEPINPTAWRWLYDVIGDSRCPISDTWWQTETGGFMITPLPGAWPQKPGSATFPFFGVQPVIVDEKGREMEGECSGYLCIKKSWPGAFRTLYGDKERYETTYFKPFAGYYFSGDGCSRDKDGYHWLTGRVDDVINVSGHRIGTAEVESALVSHPKCAEAAVVGIDHEVKGQGIYAFVTLVDGVPYSDDLRKSLVTTVRSQIGAFAAPDKIHWAPGLPKTRSGKIMRRILRKIASRQLDELGDTSTLADPGVVDQLIALSDS

SEQ ID NO: 150966 - DNA, 2121 bp, Zea mays; identical to SEQ ID NO: 122212
  CDS (1)..(2121)

SEQ ID NO: 150967 - protein, 706 aa, Zea mays; identical to SEQ ID NO: 122213

SEQ ID NO: 150968 - DNA, 2118 bp, Oryza sativa; identical to SEQ ID NO: 121922
  CDS (1)..(2118)

SEQ ID NO: 150969 - protein, 705 aa, Oryza sativa; identical to SEQ ID NO: 121923

SEQ ID NO: 150970 - DNA, 2244 bp, Oryza sativa; identical to SEQ ID NO: 122204
  CDS (1)..(2244)

SEQ ID NO: 150971 - protein, 747 aa, Oryza sativa; identical to SEQ ID NO: 122205

SEQ ID NO: 150972 - DNA, 2097 bp, Glycine max
  CDS (1)..(2097)
atggcttctaatctcagaaccaacaatttcctgcgccatgtggaatcaatgaagcttcttccatcaggtgcgggtcacatttcacacttgaatgctgtgatacttggtgaatctctcgccactgaagaggatgatttcgttcttccaagtgaggactttgctagccaagccaatgttcagtccccagaacagtatctgaagatgtataatagatccattgaggatcctgctggattctggtctgagattgcctcagagttctattggaaacagagatggggtgataaagtgtgtgatgaaaattttgatgtgaggaaagggaatataaagattgagtggttcaagggtggcatcaccaacatctgttataattgcttggatagaaatgttgaagctggacttggtgacaaggttgccatttactgggaaggcaatgagcctggtttggatggtactttgacatacactgaacttctacaacaagtttgccagcttgcaaactaccttaaagatattggtgtgaagaagggagatgccgtaattatttatttgcccatgcttatggagcttcccatcgcaatgcttgcttgcgcccggattggtgctgttcattcggttgtatttgctggtttttctgcagaagctctttcccagagaatcattgattgtaaaccaaaagttgttattacttgcaatgctgttaaaaggggccctaagcctatctatctaaaagatattgttgatgctgcaatcaatgattcagcccaaaatggggtctctatagataaatgcctagtttatgaaaacccattggcaatgaagagggtagataccaaatggaaggaagggcgtgatatatggtggcaggatgtcattcctcaatatccaactacttgtccgttggagtgggttgatgcagaggatccactttttctactctatacaagtgggagcacaggaaaacctaagggtgtcctccatacaactggtggttacatggtgtacactgcaacaacatttaagtatgcatttgactacaagccgtctgacatctactggtgtacagctgattgtggttggattactgggcacagctatgtcacttatggacccatgctcaatggtgcatctgttattgtgtatgaaggggctcctaattatcctgatgctgggagatgttgggacattgttgacaaatataaggtgacaatattctacactgctccgacattggtgcggtctctcatgcgtgatggtgatgcgtttgttactcgctactcaaggaaatctttacgagtcctaggaagtgtaggtgagcccataaatccaagtgcatggaggtggttttacaatgtagttggagattcaaggtgccctatctctgacacttggtggcaaacagaaacaggtggcttcatgataactccactaccaggtgcttggccccagaaacctggttctgcaactttccctttctttggagttcagcctgtcatactggatgagaaaggtgttgaaatagaaggggagtgcaatggatatttgtgtgtgaagaaatcatggcctggggcattcagaactctgtatggtgatcatgaaagatatgaaacaacatatttcaagccatttgccggatactatttcagtggtgatggttgcagcagggataaagatggataccattggctcattggaagagttgacgatgtcatcaatgttagtgggcatcgaattggcacggcagaagtggaatcagctttagtttcacatccgcaatgtgcagaggctgctgtggttggtgtggagcatgaggtcaaaggacagggcatctatgcatttgttacagttgtggatggtgttccttacagtgaagaactgcggaaggaccttgtactcatagttcgaaagcagataggagcctttgcagcacctgataaaattcattgggcacctggccttccaaaaacaaggagtggaaagataatgcgaagaattctgagaaaaattgcgtctcggcagctggatgaacttggagatacaagtacccttgcagatccaaatgtggtcaatcaacttatagaacttgcagattcttga

SEQ ID NO: 150973 - protein, 698 aa, Glycine max; identical to SEQ ID NO: 122209

SEQ ID NO: 150974 - DNA, 2097 bp, Glycine max
  CDS (1)..(2097)
atggcctctaatctcaggaccaacaatttcctgcgccatgtggaatcaatgaagcttcttccatcaggtgctggccacatttcgcacctgaacgctgtgatacttggtgaatctctcgccactgaagaggatgatttcgttcttccaagtgaggactttgctggccaagccaatgttcagtccccagaacagtatctgaagatgtataagagatcgattgaggaccctgctggattctggtctgagattgcctcagagttctattggaaacagagatggggtgacaaagtgtgtgatgaaaattttgatgtaaggaaagggaatataaagattgagtggttcaagggtggcatcaccaacatctgttataattgcttggatagaaatgttgaagctggacttggtgacaaggtcgccgtttactgggaaggcaatgagcctggtttggatggtactttgacatacactcagcttctccagcaagtttgccagcttgcaaactaccttaaagatattggcgtgaagaagggagatgctgtaattatttatttgcccatgcttatggagcttcccatcgcaatgcttgcctgtgcccggattggtgctgttcattcggttgtatttgctggtttttctgcagaagctctttcccagagaatcattgattgtaaaccaaaagttgtaattacttgcaatgctgttaaaaggggctctaagcctatctatctgaaagatattgttgatgctgcaatcaatgattcatcccaaaatggggtttctatagataaatgcctagtttatgaaaacccattagcaatgaagagggtagataccaaatggaaggaagggcgtgatatatggtggcaggatgtcattcatcaatatccaactacttgtccagtggagtgggttgatgcagaggatccactttttctactctatacaagtgggagtacaggaaaaccaaagggtgtcctccatacaactggtggttacatggtgtacactgcaacaacattcaagtatgcatttgactacaagccgcatgacatctactggtgtactgctgattgtggttggattactgggcacagctatgtcacttatggacccatgctcaatggtgcatctgtcatcgtgtatgaaggggctcctaattatcctgatgctgggagatgttgggacattgttgacaaatataaggtgacaatattctacactgctcctacattggtgcggtccctcatgcgtgatggtgacacgtttgttactcgctactcaaggaaatctttacgagtcctaggaagtgtaggcgagcccataaatccaagtgcatggaggtggttttacaatgtagttggagattcaaggtgccctatctctgacacttggtggcaaacagaaacgggtggcttcatgataactccactaccaggtgcttggccccagaaacctggttctgcaactctccctttctttggagttcagccagtcattgtggatgagaaaggtgttgaaatagaaggagagtgcaatggatatttgtgtgtgaagaaatcatggcccggggcattcagaactctgtatggtgatcatgaaagatatgaaacaacatatttcaagccattttccggatactatttcagtggtgatggttgcagcagggataaagatggataccattggctcactggaagagttgatgatgttatcaatgttagtgggcatcgaattggcacagcagaagtggaatcagctttagtttcacatccgcaatgtgcagaggctgctgtggttggtgtggagcatgaggtcaaaggacagggcatctatgcatttgttacagttgtggatggtgttccttacagtgaagaactgcggaaggaccttgtactcacagttcgaaagcagataggagcctttgcagcgcctgacaaaattcattgggcacctggccttccaaaaacaaggagtggaaagataatgcgaagaattctgagaaaaattgcttcccggcagctggatgaacttggagatacaagtaccctttcagatccaaatgtggtcaatcaacttatagaacttgcagattcttga

SEQ ID NO: 150975 - protein, 698 aa, Glycine max
MASNLRTNNFLRHVESMKLLPSGAGHISHLNAVILGESLATEEDDFVLPSEDFAGQANVQSPEQYLKMYKRSIEDPAGFWSEIASEFYWKQRWGDKVCDENFDVRKGNIKIEWFKGGITNICYNCLDRNVEAGLGDKVAVYWEGNEPGLDGTLTYTQLLQQVCQLANYLKDIGVKKGDAVIIYLPMLMELPIAMLACARIGAVHSVVFAGFSAEALSQRIIDCKPKVVITCNAVKRGSKPIYLKDIVDAAINDSSQNGVSIDKCLVYENPLAMKRVDTKWKEGRDIWWQDVIHQYPTTCPVEWVDAEDPLFLLYTSGSTGKPKGVLHTTGGYMVYTATTFKYAFDYKPHDIYWCTADCGWITGHSYVTYGPMLNGASVIVYEGAPNYPDAGRCWDIVDKYKVTIFYTAPTLVRSLMRDGDTFVTRYSRKSLRVLGSVGEPINPSAWRWFYNVVGDSRCPISDTWWQTETGGFMITPLPGAWPQKPGSATLPFFGVQPVIVDEKGVEIEGECNGYLCVKKSWPGAFRTLYGDHERYETTYFKPFSGYYFSGDGCSRDKDGYHWLTGRVDDVINVSGHRIGTAEVESALVSHPQCAEAAVVGVEHEVKGQGIYAFVTVVDGVPYSEELRKDLVLTVRKQIGAFAAPDKIHWAPGLPKTRSGKIMRRILRKIASRQLDELGDTSTLSDPNVVNQLIELADS

SEQ ID NO: 150976 - DNA, 2043 bp, Caenorhabditis elegans
  CDS (1)..(2043)
atgtcggacgttcgcgtcaagttcaacctagccaacgatggagaaggtctcgacgaggatattttcctccctccagccccactccttgccggtgctcactgtgctggccttcaatcttaccacgatttgtaccgttcctcgatcaacgatgctgacgagttctggcgtaccgtctcatctgaactccatttcgaacaaggaacctctaagggtctcgaatggaatttcgactcgaaagctggaaatgtcttcgtcaagtttatggatggagccaagactaacatctcgtacaactgtttggaaagaaacattaaacgtggatatggaaacaaaatcgcctacattttcgaaggaaacgagccaaccgacacctccacctggacatacaacgagctacacgcccaagtagtccaattctccgctgttctgagatctcatggcgtcaaacgaggcgatgtggttgctttatatcttccaatgattcccgaattagcagttgcaatgcttgcgtgtgcccgtatcggagcaatgcattctgttgttttcgctggtttctctgccgaatcacttgccgctcgtgttgtcgacgctcgctgcagagttttggttacggcggacggagtttttcgaggagctaaaccaattgggctcaagtcaattgcggatgcagctgccgttctcgcatcgcaggaagatgtcaaagtggaagctatcattatggtggaacacttaaaacgagtcacgaagcctgatggagtggaacttcccaaggtcgattacaccgatatcaccgtcatctacgattcggagatgctcaagtgtgcaggcgtggattccccggtagaatggatggattctgaagatccgctatttattctctacacatctggctcaaccggaaaaccgaaaggtattcaacacactacagctggatacatgacgtacgcctacgcaaccacaaaatacacttttgatgcacaagaagacgatgtttactggtgtactgccgattgtggatggatcaccggacactcgtaccttctttatggacctttgatgaatgggctcaagggaatttggtatgaaggtgtgccgacttatccgactccttctagaatgtgggatgtcactgataagtatggtgtgaccaagctgtatacctcaccaacagccgcaagagctcttatggctctcggaaatcagtggcttgaaagctcttctcgcaaaactctcaaggttatcggaacagttggagagcccatcaatcctgctgcatggatgtggttgtacaagcaagttggactttccaatgtatccattgtggatacttactggcaaactgaaactggaggacacatgatcacatgccttccaggagcaactccaatgaagccaggagcagctgcaatgccattcttcggagcatctccagttcttttggatgctgaaggtcgtgttattgaaggtccgggagaaggatcactatgctttgatcgtgcctggcctggaatgatgcgtggaatctatggagatgagcaacgctttgtcaagacctatttggctccattcaatggatactatttcactggagatggtgccagacgtgatgaagatggatacttgtggataactggacgtgttgatgatttgatgaatgtcagtggtcatcttctgtctactgctgaaattgaatcagctcttgtggctcatgagaaagttgctgaagctgccgttgttgctgctccacatgacatcaagggatccttcccatacgcattcgtcactttgaatgttggagagagaatcaatgaaaagcttgtggctgagctcaagaaactagttcgcgagaaaattggtgcattggctgttccagatgttatccaagaagctccaggacttccaaaaactcgttccggcaaggttaccagaagaatcttgagaaagattgctgaaggatccgaaagtggaatcggtgatactactactctagtcgacgaatctgtcatcaaacaactaatctctggacgttctgcacgtgcataa

SEQ ID NO: 150977 - protein, 680 aa, Caenorhabditis elegans
MSDVRVKFNLANDGEGLDEDIFLPPAPLLAGAHCAGLQSYHDLYRSSINDADEFWRTVSSELHFEQGTSKGLEWNFDSKAGNVFVKFMDGAKTNISYNCLERNIKRGYGNKIAYIFEGNEPTDTSTWTYNELHAQVVQFSAVLRSHGVKRGDVVALYLPMIPELAVAMLACARIGAMHSVVFAGFSAESLAARVVDARCRVLVTADGVFRGAKPIGLKSIADAAAVLASQEDVKVEAIIMVEHLKRVTKPDGVELPKVDYTDITVIYDSEMLKCAGVDSPVEWMDSEDPLFILYTSGSTGKPKGIQHTTAGYMTYAYATTKYTFDAQEDDVYWCTADCGWITGHSYLLYGPLMNGLKGIWYEGVPTYPTPSRMWDVTDKYGVTKLYTSPTAARALMALGNQWLESSSRKTLKVIGTVGEPINPAAWMWLYKQVGLSNVSIVDTYWQTETGGHMITCLPGATPMKPGAAAMPFFGASPVLLDAEGRVIEGPGEGSLCFDRAWPGMMRGIYGDEQRFVKTYLAPFNGYYFTGDGARRDEDGYLWITGRVDDLMNVSGHLLSTAEIESALVAHEKVAEAAVVAAPHDIKGSFPYAFVTLNVGERINEKLVAELKKLVREKIGALAVPDVIQEAPGLPKTRSGKVTRRILRKIAEGSESGIGDTTTLVDESVIKQLISGRSARA

SEQ ID NO: 150978 - DNA, 2013 bp, Caenorhabditis elegans
  CDS (1)..(2013)
atggagaaggtctcgacgaggatatttcagattttcctccctccagccccactccttgccggtgctcactgtgctggccttcaatcttaccacgatttgtaccgttcctcgatcaacgatgctgacgagttctggcgtaccgtctcatctgaactccatttcgaacaaggaacctctaagggtctcgaatggaatttcgactcgaaagctggaaatgtcttcgtcaagtttatggatggagccaagactaacatctcgtacaactgtttggaaagaaacattaaacgtggatatggaaacaaaatcgcctacattttcgaaggaaacgagccaaccgacacctccacctggacatacaacgagctacacgcccaagtagtccaattctccgctgttctgagatctcatggcgtcaaacgaggcgatgtggttgctttatatcttccaatgattcccgaattagcagttgcaatgcttgcgtgtgcccgtatcggagcaatgcattctgttgttttcgctggtttctctgccgaatcacttgccgctcgtgttgtcgacgctcgctgcagagttttggttacggcggacggagtttttcgaggagctaaaccaattgggctcaagtcaattgcggatgcagctgccgttctcgcatcgcaggaagatgtcaaagtggaagctatcattatggtggaacacttaaaacgagtcacgaagcctgatggagtggaacttcccaaggtcgattacaccgatatcaccgtcatctacgattcggagatgctcaagtgtgcaggcgtggattccccggtagaatggatggattctgaagatccgctatttattctctacacatctggctcaaccggaaaaccgaaaggtattcaacacactacagctggatacatgacgtacgcctacgcaaccacaaaatacacttttgatgcacaagaagacgatgtttactggtgtactgccgattgtggatggatcaccggacactcgtaccttctttatggacctttgatgaatgggctcaagggaatttggtatgaaggtgtgccgacttatccgactccttctagaatgtgggatgtcactgataagtatggtgtgaccaagctgtatacctcaccaacagccgcaagagctcttatggctctcggaaatcagtggcttgaaagctcttctcgcaaaactctcaaggttatcggaacagttggagagcccatcaatcctgctgcatggatgtggttgtacaagcaagttggactttccaatgtatccattgtggatacttactggcaaactgaaactggaggacacatgatcacatgccttccaggagcaactccaatgaagccaggagcagctgcaatgccattcttcggagcatctccagttcttttggatgctgaaggtcgtgttattgaaggtccgggagaaggatcactatgctttgatcgtgcctggcctggaatgatgcgtggaatctatggagatgagcaacgctttgtcaagacctatttggctccattcaatggatactatttcactggagatggtgccagacgtgatgaagatggatacttgtggataactggacgtgttgatgatttgatgaatgtcagtggtcatcttctgtctactgctgaaattgaatcagctcttgtggctcatgagaaagttgctgaagctgccgttgttgctgctccacatgacatcaagggatccttcccatacgcattcgtcactttgaatgttggagagagaatcaatgaaaagcttgtggctgagctcaagaaactagttcgcgagaaaattggtgcattggctgttccagatgttatccaagaagctccaggacttccaaaaactcgttccggcaaggttaccagaagaatcttgagaaagattgctgaaggatccgaaagtggaatcggtgatactactactctagtcgacgaatctgtcatcaaacaactaatctctggacgttctgcacgtgcataa

SEQ ID NO: 150979 - protein, 670 aa, Caenorhabditis elegans
MEKVSTRIFQIFLPPAPLLAGAHCAGLQSYHDLYRSSINDADEFWRTVSSELHFEQGTSKGLEWNFDSKAGNVFVKFMDGAKTNISYNCLERNIKRGYGNKIAYIFEGNEPTDTSTWTYNELHAQVVQFSAVLRSHGVKRGDVVALYLPMIPELAVAMLACARIGAMHSVVFAGFSAESLAARVVDARCRVLVTADGVFRGAKPIGLKSIADAAAVLASQEDVKVEAIIMVEHLKRVTKPDGVELPKVDYTDITVIYDSEMLKCAGVDSPVEWMDSEDPLFILYTSGSTGKPKGIQHTTAGYMTYAYATTKYTFDAQEDDVYWCTADCGWITGHSYLLYGPLMNGLKGIWYEGVPTYPTPSRMWDVTDKYGVTKLYTSPTAARALMALGNQWLESSSRKTLKVIGTVGEPINPAAWMWLYKQVGLSNVSIVDTYWQTETGGHMITCLPGATPMKPGAAAMPFFGASPVLLDAEGRVIEGPGEGSLCFDRAWPGMMRGIYGDEQRFVKTYLAPFNGYYFTGDGARRDEDGYLWITGRVDDLMNVSGHLLSTAEIESALVAHEKVAEAAVVAAPHDIKGSFPYAFVTLNVGERINEKLVAELKKLVREKIGALAVPDVIQEAPGLPKTRSGKVTRRILRKIAEGSESGIGDTTTLVDESVIKQLISGRSARA

SEQ ID NO: 150980 - DNA, 2232 bp, Arabidopsis thaliana; identical to SEQ ID NO: 126435
  CDS (1)..(2232)

SEQ ID NO: 150981 - protein, 743 aa, Arabidopsis thaliana; identical to SEQ ID NO: 126436

SEQ ID NO: 150982 - DNA, 2037 bp, Acyrthosiphon pisum
  CDS (1)..(2037)
atgtcgaaaaacgtatacctcccgtatagcgcgacatccgagaaggctcacgtcaagtctatggaacattaccgggaaatgcacaataaatcattggagtcgaccgcgcaattttggtccgaaatcgcgtcacaatttcactgggaaacgccgtacgacatcaacaacttttactcatacaacttcgacgtgaccaaagggcccgttcaagtcaaatggatggaaggtgccactacaaacgtgtgctacaacctactggacaagaacgtgcgcaatgggatgggtgacaaagtagctttttactgggaaggcaatgatccggaagactatagcaaaatcacatataaaaaacttttagaggaagtttgccggttttcaaatgtattgaaatctaaaggcgtagttaaaggtgaccgtgtcgcaatttatatgccaatgatttttgagatcgtgattactatgttatcgtgtgcaagaatcggcgcagttcactctattgttttcgcaggattttcatccgattcgctagcagagcgtatggccgactgtaagtgcaaggtccttgtgacagctgatagcgtatacagaggagacaaattgttaaacattaaaagcctatgtgatattgcgatggacaaagccaagaattttggccacgaagtttcaacttgtattgtagttcgtcacttaccgcgtctttacagatccatgaacacatctaatggtacaaacgggtctaactccgacatcatagatctacattcagacgtgccatggactgatggacgagattattggtggcatgatgagatggatgatgtagaaccctcttgttatccagtctgggtgtctgcagaagatccactatttatgttatacacgagtggatcaacaggaaaaccaaaaggagtacttcatacaactggtggatacttattatacgctgctactactttcaagtatgtttttgattaccacccaggggatgtttattggtgcacagcagatattggttggatcactggccactcttacgttgtttatggacctttagcaaatggggcaacttcagttatatttgaaggaacaccattttatccagataatggaagatactggtcagttattgaaaaatacaaagttacacagttttacactgcaccgacagccattcgtgcacttatgaagtttggagaagaaccagtgaagaaacataatctcgattcactaaaagtattgggttcagtaggtgaaccaataaacccagaagcttggttgtggtattaccaacatattggtaaagaaagatgttccatagcagacacattttggcaaactgaaaccggagggcatgttataactccactaccgggttgtacaccaatgaaaccaggatcggcatcatttccgttctttggtgttaaaccaatcctattggatgaaagtggtaaagaaattgaaggagttggagagggatacttagttttcaataagccttggcccggtataatgcgcacattatttggaaatcatgaacggttccaatcagtttacttcagcaaatttccaggatactattgtacaggagatggtgcaagaagagatgaagatggatacttttgggtgactggaagagtggatgatatgttaaatgtatctgggcatttgatgagcactgctgaagtggaatctgtactcacagaacacccagatgtttctgaagctgcagttgtatcaagaccacatccaatcaaaggagagtgtctttattgttttattactcctaatcatggtgtgacttttacaccacaactttcatccgagttggttaaaaaagtgagggaatcgattgggccttttgctatgccggacgttattcaacatgcaccaggtcttccaaaaactcggtctggaaaaataatgagaagagtcttacgaaaagtagcaatcaatgacagagaagtaggtgacatatcaacattagctgacgaacatatagttgaagaactattcaaaaatcgaccggagaaatcataa

SEQ ID NO: 150983 - protein, 678 aa, Acyrthosiphon pisum
MSKNVYLPYSATSEKAHVKSMEHYREMHNKSLESTAQFWSEIASQFHWETPYDINNFYSYNFDVTKGPVQVKWMEGATTNVCYNLLDKNVRNGMGDKVAFYWEGNDPEDYSKITYKKLLEEVCRFSNVLKSKGVVKGDRVAIYMPMIFEIVITMLSCARIGAVHSIVFAGFSSDSLAERMADCKCKVLVTADSVYRGDKLLNIKSLCDIAMDKAKNFGHEVSTCIVVRHLPRLYRSMNTSNGTNGSNSDIIDLHSDVPWTDGRDYWWHDEMDDVEPSCYPVWVSAEDPLFMLYTSGSTGKPKGVLHTTGGYLLYAATTFKYVFDYHPGDVYWCTADIGWITGHSYVVYGPLANGATSVIFEGTPFYPDNGRYWSVIEKYKVTQFYTAPTAIRALMKFGEEPVKKHNLDSLKVLGSVGEPINPEAWLWYYQHIGKERCSIADTFWQTETGGHVITPLPGCTPMKPGSASFPFFGVKPILLDESGKEIEGVGEGYLVFNKPWPGIMRTLFGNHERFQSVYFSKFPGYYCTGDGARRDEDGYFWVTGRVDDMLNVSGHLMSTAEVESVLTEHPDVSEAAVVSRPHPIKGECLYCFITPNHGVTFTPQLSSELVKKVRESIGPFAMPDVIQHAPGLPKTRSGKIMRRVLRKVAINDREVGDISTLADEHIVEELFKNRPEKS

SEQ ID NO: 150984 - DNA, 2142 bp, Saccharomyces cerevisiae S288c; identical to SEQ ID NO: 121908
  CDS (1)..(2142)

SEQ ID NO: 150985 - protein, 713 aa, Saccharomyces cerevisiae S288c; identical to SEQ ID NO: 121909

SEQ ID NO: 150986 - DNA, 1959 bp, Agrobacterium rhizogenes; identical to SEQ ID NO: 122160
  CDS (1)..(1959): transl_table=11

SEQ ID NO: 150987 - protein, 652 aa, Agrobacterium rhizogenes; identical to SEQ ID NO: 122161

SEQ ID NO: 150988 - DNA, 1956 bp, Mesorhizobium loti MAFF303099; identical to SEQ ID NO: 122184
  CDS (1)..(1956): transl_table=11

SEQ ID NO: 150989 - protein, 651 aa, Mesorhizobium loti MAFF303099; identical to SEQ ID NO: 122185

SEQ ID NO: 150990 - DNA, 2082 bp, Arabidopsis thaliana; identical to SEQ ID NO: 121920
  CDS (1)..(2082)

SEQ ID NO: 150991 - protein, 693 aa, Arabidopsis thaliana; identical to SEQ ID NO: 121921

SEQ ID NO: 150992 - DNA, 1938 bp, Pseudomonas aeruginosa PAO1; identical to SEQ ID NO: 122156
  CDS (1)..(1938): transl_table=11

SEQ ID NO: 150993 - protein, 645 aa, Pseudomonas aeruginosa PAO1 [sequence omitted]

SEQ ID NO: 150994 - DNA, 1959 bp, Escherichia coli O157:H7 EDL933; identical to SEQ ID NO: 126887
  CDS (1)..(1959): transl_table=11

SEQ ID NO: 150995 - protein, 652 aa, Escherichia coli O157:H7 EDL933; identical to SEQ ID NO: 126888

SEQ ID NO: 150996 - DNA, 1956 bp, Agrobacterium tumefaciens str. C58; identical to SEQ ID NO: 122162
  CDS (1)..(1956): transl_table=11

SEQ ID NO: 150997 - protein, 651 aa, Agrobacterium tumefaciens str. C58; identical to SEQ ID NO: 122163

SEQ ID NO: 150998 - DNA, 1950 bp, Sinorhizobium meliloti 1021; identical to SEQ ID NO: 126869
  CDS (1)..(1950): transl_table=11

SEQ ID NO: 150999 - protein, 649 aa, Sinorhizobium meliloti 1021 [sequence omitted]

SEQ ID NO: 151000 - DNA, 1959 bp, Escherichia coli str. K-12 substr. MG1655; identical to SEQ ID NO: 126421
  CDS (1)..(1959): transl_table=11

SEQ ID NO: 151001 - protein, 652 aa, Escherichia coli str. K-12 substr. MG1655; identical to SEQ ID NO: 122177

SEQ ID NO: 151002 - DNA, 1944 bp, Caulobacter crescentus CB15
  CDS (1)..(1944): transl_table=11
gtggtgagcgacggacaggttttcccggttcctgcggatctggcgcgagacgcccatatcgatgcggccgcctatgacgcggcgctggctcgcgtcgaagccgaccccgaaggctattggcgcgacatcgccgcccggctcgactggatcacgccgcccaccaagatcaaggacgtctcctacgccaaggaagacttccgcatccgctggtacgaggacggcgttctcaacgtctcggccaactgcatcgatcgccacctgccggccaagaaagacgacgtggccctggtgttcgagggcgacgagcccgggacctccagcacgctgacctacggccagctgcacgaggaggtttgccgcatggccaacgtcctcaaggcgcagggcgtcaagaagggcgaccgggtcaccatctatctgccgatggtgccgctggcggccgtggccatgctggcctgcgcgcgcatcggagcggttcactcggtggtgttcggcggcttctcgcccgacagcatcgccggccgcatccaggactgcgcctcgcacttcgtgatcaccgccgacgagggccgccgcggcggccgccgcgtgccgctgaaggccaatatcgacgaagcgctgaagcactgcccatgggtcggcaaggtgctgatgatccgctggaccggcgccgatgtgccgctgaaggcgggccgcgacatcgtctggcaggacgtccgcgacaccgtctcggccgactgcccgcccgagcctatgaacgccgaggacccgctgttcatcctctacacctcgggctcgacggggaagcccaagggcgtgctgcacaccaccggcggctatctggcctgggcgtcgtggaccttctgggcggtgttcgactacaagccgggcgaggtgttctggtgcaccgccgacgtcggctgggtcaccggtcacagctatgtcgtctacggcccgctggccaatggcgggaccagcctgatcttcgagggtgtgcccaactatcccacccccagccgcttctgggaggtgatcgacaagcaccaggtgtcgatcttctacaccgcccccaccgctctgcgcgccctgatgcgcgaaggcgacgcgcatgtgaccaagaacgacctttcgtccctgcgcctgctgggcagcgtcggcgagccgatcaatccggaggcctggctctggtaccaccgcgtggtcggcaaggagaaactgccgatcgtcgacacctggtggcagaccgagaccggcggcatgctgatcaccccgctgcccggcgccaccgccctgaagccgggctcggcctccaagccgctgccgggcgtcaagccgcagctcgtggacgccgagggcaagtttctggacggcgccaccgagggaaatctggtcatcaccgacagctggccgggccagatgcggaccgtctatggcgaccaccagcggttcttcgagacctatttctcgacctatcccggcaagtacttcaccggcgacggctgccgccgcgacgccgatggctactactggatcaccggccgggtggacgatgtgatcaacgtctcgggccaccgcctgggcaccgccgagatcgagagcgccctcgtcgcgcacgagaccgtcgccgaggcggccgtggtcggctatccgcacgacatcaagggccagggcgtctatgcctatgtcactctgaaggcggggatcgaggctacggacgcgctgcgcaaggacctcgtcctgtgggtgcgccacgagatcggccctttcgccgcgccggacgtcatccagtgggccccgggcctgcccaagacccgctcgggcaagatcatgcgccgcatcctgcgcaagatcgccgagaacgagctcggcagcctgggcgacacctcgaccctggctgatccatcggtggtcgatgatctggtgaagaaccgcgcggggacctga

SEQ ID NO: 151003 - protein, 647 aa, Caulobacter crescentus CB15 [sequence omitted]

SEQ ID NO: 151004 - DNA, 1959 bp, Salmonella enterica subsp. enterica serovar Typhimurium str. LT2; identical to SEQ ID NO: 122188
  CDS (1)..(1959): transl_table=11

SEQ ID NO: 151005 - protein, 652 aa, Salmonella enterica subsp. enterica serovar Typhimurium str. LT2; identical to SEQ ID NO: 122189

SEQ ID NO: 151006 - DNA, 1956 bp, Brucella melitensis bv. 1 str. 16M; identical to SEQ ID NO: 122166
  CDS (1)..(1956): transl_table=11

SEQ ID NO: 151007 - protein, 651 aa, Brucella melitensis bv. 1 str. 16M; identical to SEQ ID NO: 122167

SEQ ID NO: 151008 - DNA, 1989 bp, Schizosaccharomyces pombe; identical to SEQ ID NO: 28622
  CDS (1)..(1989)

SEQ ID NO: 151009 - protein, 662 aa, Schizosaccharomyces pombe [sequence omitted]

SEQ ID NO: 151010 - DNA, 1899 bp, Encephalitozoon cuniculi GB-M1; identical to SEQ ID NO: 28120
  CDS (1)..(1899)

SEQ ID NO: 151011 - protein, 632 aa, Encephalitozoon cuniculi GB-M1; identical to SEQ ID NO: 28121

SEQ ID NO: 151012 - DNA, 1956 bp, Streptomyces coelicolor A3(2); identical to SEQ ID NO: 126925
  CDS (1)..(1956): transl_table=11

SEQ ID NO: 151013 - protein, 651 aa, Streptomyces coelicolor A3(2); identical to SEQ ID NO: 126926

SEQ ID NO: 151014 - DNA, 1944 bp, Xanthomonas axonopodis pv. citri str. 306; identical to SEQ ID NO: 126935
  CDS (1)..(1944): transl_table=11

SEQ ID NO: 151015 - protein, 647 aa, Xanthomonas axonopodis pv. citri str. 306 [sequence omitted]

SEQ ID NO: 151016 - DNA, 1986 bp, Leptospira interrogans serovar Lai str. 56601; identical to SEQ ID NO: 126893
  CDS (1)..(1986): transl_table=11

SEQ ID NO: 151017 - protein, 661 aa, Leptospira interrogans serovar Lai str. 56601 [sequence omitted]

SEQ ID NO: 151018 - DNA, 2013 bp, Drosophila melanogaster; identical to SEQ ID NO: 121934
  CDS (1)..(2013)

SEQ ID NO: 151019 - protein, 670 aa, Drosophila melanogaster; identical to SEQ ID NO: 121935

SEQ ID NO: 151020 - DNA, 1962 bp, Pseudomonas putida KT2440; identical to SEQ ID NO: 122154
  CDS (1)..(1962): transl_table=11

SEQ ID NO: 151021 - protein, 653 aa, Pseudomonas putida KT2440; identical to SEQ ID NO: 122155

SEQ ID NO: 151022 - DNA, 1935 bp, Pseudomonas putida KT2440; identical to SEQ ID NO: 122158
  CDS (1)..(1935): transl_table=11

SEQ ID NO: 151023 - protein, 644 aa, Pseudomonas putida KT2440 [sequence omitted]

SEQ ID NO: 151024 - DNA, 1959 bp, Bradyrhizobium japonicum USDA 110; identical to SEQ ID NO: 121936
  CDS (1)..(1959): transl_table=11

SEQ ID NO: 151025 - protein, 652 aa, Bradyrhizobium japonicum USDA 110; identical to SEQ ID NO: 121937

SEQ ID NO: 151026 - DNA, 1956 bp, Pseudomonas syringae pv. tomato str. DC3000
  CDS (1)..(1956): transl_table=11
atgagtgcagcttccctgtaccccgtccgcccagaagtcgcagcgactacgctgacggatgaggcgacctacaaggccatgtaccagcagtcggtggtcaacccggatggtttctggcgtgagcaggcgcagcgcctcgactggatcaagccgtttagcgtggtcaagcagacctcgttcgacgaccatcgcgtcgacatcaaatggtttgccgatggcacgttgaacgttgcctacaactgcctggaccgtcacctggccgagcgcggcgacaccatcgccatcatctgggaaggcgacgacccttccgagcaccgcgaaatcacctaccgcgagctgcacgaagaggtctgcaaattcgccaacgccctgcgcggccaggacgtgcaccgcggcgacgttgtcaccatctatatgccaatgatccccgaggctgtggtcgccatgctggcgtgcgcccggatcggtgcgattcactcggtggtgttcggcggtttctcgccggaagcactggcggggcgcatcatcgattgcagctccaaggtggtgatcacggccgacgaaggcctgcgtggcggtaaaaaaaccgcgctcaaggccaacgtcgaccgcgccctgaccaacccggaaaccagcagcgtgcagaaggtgatcgtctgcaagcgcaccggtggcgagatcgagtggaaccgtcaccgcgacatctggtatcacgcgctgcttgaagtggcgtccagcacctgcgcacccaaagagatgggcgcggaagaatcgctgtttatcctttacacctcgggctcgaccggcaaacccaaaggcgtgctgcacaccacggcgggctacctgctctacgccgcgctcacccacgagcgcgtgttcgactacaagccgggcgaaatctactggtgcacggccgatgttggctgggtcaccgggcacagttacatcgtctatggcccgctggccaatggcgcgaccacgctgctgtttgaaggtgtgccgaactacccggacatcactcgcgtgtcgaagatcatcgacaagcacaaggtcaacatcctctacaccgcgcccaccgcgattcgcgccatgatggctgaaggcaccaagtccgtcgaaggcgcggacggttccagcctgcgcctgttgggttcggtgggcgagccgatcaatccggaagcctggggctggtactacaacaccgtcggcaagcagaactgcccgattgtcgacacctggtggcagaccgaaaccggcggcatcctgatcagcccgctgccaggtgcaacagcgctgaaaccgggctcggccacacggccgttcttcggcgtgattccggcactggtggacaatctgggtaacctcatcgagggcgcggccgagggcaatctggtgattctcgattcctggccgggtcagtcgcgcaccctgtacggcgaccatgaccgttttgtcgacacctatttcaagaccttccggggcatgtatttcaccggtgacggtgcccgtcgcgatgaagacggctactactggatcaccgggcgcgtggacgatgtgctcaacgtatccggccaccggatgggcacggctgaaatcgagagcgcgatggttgcgcaccctaaagtcgcggaagccgccgtggtcggcgtgccgcacgatctgaaagggcagggcatttacgtctacgttaccctcaatgctggcgaagagccgagcgatgcgctgcgcaccgaactgcgcaactgggtgcgcaaggaaatcggcccgattgcctcgccggacttcatccagtgggcacccggcctgccgaaaacccgttcgggcaagatcatgcgccgcatcctgcgcaagatcgccaccgctgagtacgacgcgctgggcgatatctccaccctggccgatccaggcgtggtgcagcacctgatcgaaacgcacaagagcatgagcgcggcctga

SEQ ID NO: 151027 - protein, 651 aa, Pseudomonas syringae pv. tomato str. DC3000
MSAASLYPVRPEVAATTLTDEATYKAMYQQSVVNPDGFWREQAQRLDWIKPFSVVKQTSFDDHRVDIKWFADGTLNVAYNCLDRHLAERGDTIAIIWEGDDPSEHREITYRELHEEVCKFANALRGQDVHRGDVVTIYMPMIPEAVVAMLACARIGAIHSVVFGGFSPEALAGRIIDCSSKVVITADEGLRGGKKTALKANVDRALTNPETSSVQKVIVCKRTGGEIEWNRHRDIWYHALLEVASSTCAPKEMGAEESLFILYTSGSTGKPKGVLHTTAGYLLYAALTHERVFDYKPGEIYWCTADVGWVTGHSYIVYGPLANGATTLLFEGVPNYPDITRVSKIIDKHKVNILYTAPTAIRAMMAEGTKSVEGADGSSLRLLGSVGEPINPEAWGWYYNTVGKQNCPIVDTWWQTETGGILISPLPGATALKPGSATRPFFGVIPALVDNLGNLIEGAAEGNLVILDSWPGQSRTLYGDHDRFVDTYFKTFRGMYFTGDGARRDEDGYYWITGRVDDVLNVSGHRMGTAEIESAMVAHPKVAEAAVVGVPHDLKGQGIYVYVTLNAGEEPSDALRTELRNWVRKEIGPIASPDFIQWAPGLPKTRSGKIMRRILRKIATAEYDALGDISTLADPGVVQHLIETHKSMSAA

SEQ ID NO: 151028 - DNA, 1956 bp, Photorhabdus luminescens subsp. laumondii TTO1; identical to SEQ ID NO: 121956
  CDS (1)..(1956): transl_table=11

SEQ ID NO: 151029 - protein, 651 aa, Photorhabdus luminescens subsp. laumondii TTO1; identical to SEQ ID NO: 121957

SEQ ID NO: 151030 - DNA, 1953 bp, Rhodopseudomonas palustris CGA009; identical to SEQ ID NO: 121960
  CDS (1)..(1953): transl_table=11

SEQ ID NO: 151031 - protein, 650 aa, Rhodopseudomonas palustris CGA009; identical to SEQ ID NO: 121961

SEQ ID NO: 151032 - DNA, 1938 bp, Bdellovibrio bacteriovorus HD100; identical to SEQ ID NO: 121962
  CDS (1)..(1938): transl_table=11

SEQ ID NO: 151033 - protein, 645 aa, Bdellovibrio bacteriovorus HD100; identical to SEQ ID NO: 121963

SEQ ID NO: 151034 - DNA, 2085 bp, Ashbya gossypii ATCC 10895; identical to SEQ ID NO: 122130
  CDS (1)..(2085)

SEQ ID NO: 151035 - protein, 694 aa, Ashbya gossypii ATCC 10895; identical to SEQ ID NO: 122131

SEQ ID NO: 151036 - DNA, 2064 bp, Ashbya gossypii ATCC 10895; identical to SEQ ID NO: 28604
  CDS (1)..(2064)

SEQ ID NO: 151037 - protein, 687 aa, Ashbya gossypii ATCC 10895; identical to SEQ ID NO: 28605

SEQ ID NO: 151038 - DNA, 1968 bp, Strongylocentrotus purpuratus; identical to SEQ ID NO: 121964
  CDS (1)..(1968)

SEQ ID NO: 151039 - protein, 655 aa, Strongylocentrotus purpuratus; identical to SEQ ID NO: 121965

SEQ ID NO: 151040 - DNA, 1947 bp, Aspergillus terreus NIH2624
  CDS (1)..(1947)
atgtcaacacatacacacttgaaagactttgatgagtaccagcgactttacgaagaatccactaaatcaccagagactttttgggcgcgtacagcccgcagtctactagccttcgacaaagacttccagacgacctatactggctgcatggagcaagggaaaaatgcctggttcccggacggcttgctaaacgcatgttacaactgcgttgaccggcatgcattgcgccatcccaacaaacccgctataatctacgaagcagacgagcccaacaacagcggcacagtgacatacggcgacttgcttcgggatgtgtcacagctagcatgggtcctccgccagcacggggtgcaaaagggcgacaccgtcacgatttacatgccgaactgctctcaggtcatagtggctatgctggcgtgcgcccgcctcggggctatccactctgtggttttctccggcttttcctccgcctcgctcgcagagcgcatccaagacgccgggtcaaacgtggttctcacttcagactatggtcagcgcggggggaagcgcatcaacaccaaatccatcgttgaccacgcactgcaagaatgtccgtttgtaagggcggttatagcattccgtcggacggacactgcggtcgactgggtccgcggacgggacttctggtggcatgaagagatcgtaaaagctcccatttatctcgccccggaggcaatgggtgccgaagaccctctattcctaatctacacgtctggatccacaggcaaaccgaaaggcattctgcataccacagcgggctatctcgtgggcgccgccgcctcggggaaatacaccttcaacatccacagggacgatcgcatgttctgttcggcggacgtgggttggatcaccgggcacacgtataccgtctacgcgcccctgctacttgggtgcgcgacgacggtgtttgagggtaccccgacgtatccgaccccgtccaggtactgggatattattgagaagcatgggatcacgcatctctgcgctgcgccaactgctctgcgcgtcctcaagaacgcggggaatgattgcatggatggctacgagatgaaggatctccgcgtgttgtgcacagctggcgagccgattgcaccagaggtctgggactggtattccggcgccgtgggggatggggaagggtgtgtgcttgatacctactggcagacagaaacgggctcccacctggtcgccccgctggccggcatcacccctaccaagccagggagcgtgtccctaccgttctttgggatcaagccggcaattttagatcctggttcagggaaggaggtgactgaacatgatgacgagggagctctggtcatcaaacagccgtggcccagcatggctcgcaccatttggggagctcacgagctgtacatggatacatatttcagtagatacccggggtactacttcaccggcgacctggcaagtcgtgacaaagacggattttattggatcaagggtcgagcagatgatatcgtcaacgtctcgggccatcgaatttccaccgcggaaatcgaagctgtcatcctcgatcatgagcaagccatcgaaacagctgtagtcggcgtgccagacaaggtgacgggacattccttgaatgcttttgtatcagcaaagtcagacccacggaccgatgaaagtacacatgacgaggttcgcaaaggagtccggacagctatcggctcttttgcggcaccaaagtctatctttcttgtcagtgacctgccaaaaactcgcagcggcaagataatgcgccggattctgcggcgaattgccggtggcgagcaggatttgggggatttgtctacgttgatgaacccggactcggttgcagaagttgccgaccagagtgttagggagccactgtcagtggacatgttttctgcagaaccagacggctga

SEQ ID NO: 151041 - protein, 648 aa, Aspergillus terreus NIH2624
MSTHTHLKDFDEYQRLYEESTKSPETFWARTARSLLAFDKDFQTTYTGCMEQGKNAWFPDGLLNACYNCVDRHALRHPNKPAIIYEADEPNNSGTVTYGDLLRDVSQLAWVLRQHGVQKGDTVTIYMPNCSQVIVAMLACARLGAIHSVVFSGFSSASLAERIQDAGSNVVLTSDYGQRGGKRINTKSIVDHALQECPFVRAVIAFRRTDTAVDWVRGRDFWWHEEIVKAPIYLAPEAMGAEDPLFLIYTSGSTGKPKGILHTTAGYLVGAAASGKYTFNIHRDDRMFCSADVGWITGHTYTVYAPLLLGCATTVFEGTPTYPTPSRYWDIIEKHGITHLCAAPTALRVLKNAGNDCMDGYEMKDLRVLCTAGEPIAPEVWDWYSGAVGDGEGCVLDTYWQTETGSHLVAPLAGITPTKPGSVSLPFFGIKPAILDPGSGKEVTEHDDEGALVIKQPWPSMARTIWGAHELYMDTYFSRYPGYYFTGDLASRDKDGFYWIKGRADDIVNVSGHRISTAEIEAVILDHEQAIETAVVGVPDKVTGHSLNAFVSAKSDPRTDESTHDEVRKGVRTAIGSFAAPKSIFLVSDLPKTRSGKIMRRILRRIAGGEQDLGDLSTLMNPDSVAEVADQSVREPLSVDMFSAEPDG

SEQ ID NO: 151042 - DNA, 2013 bp, Aspergillus terreus NIH2624
  CDS (1)..(2013)
atgtccgaaggcaacgttatgccccccaagtcctccgtggtggtggaggcccacgaagtcgacactttccatgttcccaaggctttctatgagaaacaccccaccgggactcatctgaaagatctcgacgaatacaagaagctctatgaggagtccatccgaaaccccgacaccttctgggcccgcatggcccgggaactgctcaccttcgacaaggacttccagacgacccacgttggctccttggccaacggtgacaatgcctggttcgttgagggtcgcttaaatgcctcctttaactgtgtcgaccgccatgccctgaagaaccccgacaaggtcgccatcatctacgaagccgacgagcccaatgagggccgcaccatcacttacggcgagctcctgcgcgaggtctcgcgcgtcgcctgggtgctgaagcagcatggcgtgaagaagggcgacaccgtcgccatctacctccccatgattcccgaggccatcattgccttcctcgcgtgttcgcgtatcggtgccgtccactctgtcgtcttcgccggtttctcctccgactcgcttcgggaccgcgttctcgacgctggttccaaggtcgtcatcaccaccgacgagggtaagcgtggcggtaagatcatcggcaccaagcgcatcgtcgatgaggcgctgaagcagtgccccgacgtgtcgagcgttctggtgtacaagcgtaccggcgccgaggtcccttggacccagggtcgtgacatctggtggcacgaagaggtcgagaagtaccccaactacctggcgcccgagtcgatgagctccgaggaccctctcttcctcctttatacctcgggttccactggaaagcccaagggtgtcatgcacacgaccgccggttatctcctgggtgctgccatgaccggcaagtacgtgtttgatattcatgatgatgaccgctacttctgcggtggtgatgtcggctggatcacgggccacacctatgtggtgtacgcccctctgcttctgggatgtgccacagtggtctttgagagtacccccgcctacccgaacttctcccgctactgggatgttatcgagaaacacaaggtcacgcagttctacgtcgcccccaccgctctgcggctgctcaagcgggctggcgacgagcatatccatcacaagatggcccacctgcgtattctgggctccgtcggtgaacccatcgctgccgaggtctggaagtggtactttgagaaggtcggaaaggaagaggcgcacatttgcgacacatactggcaaaccgagactggttccaacgtcatcactcctctgggtggaatcacgcccacgaagcccggcagtgcctccctgcccttcttcggtatcgagcctgccatcattgaccccgtctcgggcgaggagatcagtggcaacgatgttgagggtgtgcttgccttcaagcagccttggcctagtatggcccgcactgtctggggtgcccacaagcgctacatggacacctatctgaatgtctacaagggatactatttcaccggtgatggcgctggccgtgaccacgagggatactactggatccgtggtcgtgttgatgacgtcgtgaacgtgtcgggccaccgtctgtcgactgctgaaatcgaggctgcccttctcgagcaccacatggtcgccgaagccgccgtcgtcggcattgctgatgagttgacgggccaagccgtcaatgccttcgttgccctcaaggagggtaatgagacgaccgagcaggtccgcaaggatctggtgatgcaggttcgcaagtcgatcggaccgttcgctgcccccaaggctgtcttcgttgtcgatgacctccccaagacccgtagcggcaagatcatgcgccgtattttgcggaagattctgagtggcgaggaggacagccttggtgacacctcgacgctgtcggatccctccgttgtcgacaagatcatccaaacggtccatgctgcccgtggcaaataa

SEQ ID NO: 151043 - protein, 670 aa, Aspergillus terreus NIH2624
MSEGNVMPPKSSVVVEAHEVDTFHVPKAFYEKHPTGTHLKDLDEYKKLYEESIRNPDTFWARMARELLTFDKDFQTTHVGSLANGDNAWFVEGRLNASFNCVDRHALKNPDKVAIIYEADEPNEGRTITYGELLREVSRVAWVLKQHGVKKGDTVAIYLPMIPEAIIAFLACSRIGAVHSVVFAGFSSDSLRDRVLDAGSKVVITTDEGKRGGKIIGTKRIVDEALKQCPDVSSVLVYKRTGAEVPWTQGRDIWWHEEVEKYPNYLAPESMSSEDPLFLLYTSGSTGKPKGVMHTTAGYLLGAAMTGKYVFDIHDDDRYFCGGDVGWITGHTYVVYAPLLLGCATVVFESTPAYPNFSRYWDVIEKHKVTQFYVAPTALRLLKRAGDEHIHHKMAHLRILGSVGEPIAAEVWKWYFEKVGKEEAHICDTYWQTETGSNVITPLGGITPTKPGSASLPFFGIEPAIIDPVSGEEISGNDVEGVLAFKQPWPSMARTVWGAHKRYMDTYLNVYKGYYFTGDGAGRDHEGYYWIRGRVDDVVNVSGHRLSTAEIEAALLEHHMVAEAAVVGIADELTGQAVNAFVALKEGNETTEQVRKDLVMQVRKSIGPFAAPKAVFVVDDLPKTRSGKIMRRILRKILSGEEDSLGDTSTLSDPSVVDKIIQTVHAARGK

SEQ ID NO: 151044 - DNA, 1956 bp, Coccidioides immitis RS
  CDS (1)..(1956)
atgaatgaatataaccagctctaccaacaatctatcaatgatcctgacaccttctgggcgcgcatggcgcgcgatcttattactttcgaaaaggatttcgacaagactcacattgggaccctcgaaggcggggataatgcctggtttgtcggtggtcgattaaatgcgtccttcaactgcgttgatcgccatgcaatgcgtgacccgaacaaggttgcaatcatctatgaagccgatgagcctggccacggccgcagtattacctatgcagaattgttgaaggaagtctccagactggcctgggtgatgaagagccaaggtgttaggaaaggcgataccgtcgcgatttatcttcctatgatccctgaggccatcttcgcgcttcttgcctgtgcgcgtattggcgccattcattctgtggtctttgcgggcttctcttccgattccctgcgtgatcgtaccctggatgcccggtcaaaattcattatcacaaccgatgagggaaagcgtggtggaaaagtcattgggactaagaaaattgttgatgaagctttaaaacaatgcccagatgttaccaattgccttgttttcaagagaactggggccgacgtgccttggaccaaaggccgtgacctgtggtggcatgaagaggttgataaatatccaaattatctgcctgctgagtcaatggactctgaagacccgcttttccttctctacacatctggctccaccgggaaaccaaagggtgttatgcacacaactgctggctaccttgttggagcagctgcaactggaaaatatgtctttgatattcacccagctgaccgttttttttgcggtggtgatgttggatggattactggacatacttatgttgtctatgctccattgcttttggggtgcactactgtggtgtttgaaagcacaccagcgtatcccaatttctcgcgatactgggatgttattgagaagcacaaggtcacccagttttatgtagcacctacggctttgcgcctgttgaaacgtgcaggtgaccaccacataaatcatgaaatgaaggatttacgtattctgggctctgttggtgaaccaatcgctgcagaggtttggaagtggtaccatgaggttgttgggaaaagacaagcccatattgttgatacatactggcaaaccgagaccggctcccatgttatcacccccttgggtggtattactccaactaaaccaggaagtgcttcgcttccattctttggtattgaccctgtcattctggatccagttacaggtgcagagattccgggaaatgatgtggagggaatccttgctttcagaaagccatggccaagcatggctcgcactgtatggggcgatcataaacgatacatggacacctatctcaatgtttataaaggcttttatttcactggtgatggcgctggacgtgatcatgaaggctattactggattagaggtcgtgtggatgatgttgtgaacgtctctggccaccgcctttcaactgcagagatcgaagcagcacttatcgaacaccactgtgttgcagaagccgcggttgttggagttcctgatccgctaactggacaagctgtgcatgcatttgtggccctgaagagtggaaatgacaatagagaacagctccaaaaggagttgattatgcaagtccgcaaatcgattggaccatttgctgccccgaaggttgtgtttgtgatcgatgaccttccgaaaacacgtagcgggaagatcatgagacgcatcttgcgaaagattctgagcggtgaggaggacagtcttggtgacatttcaacgctctcggatcctagcgtcgtgaataaaatcatcgacactttccacgaatggaaaaaagctatggcagctgccgccgccgctgctgctgctgtgtcagcaaccgcgccaccaaacagcacaaccggttaa

SEQ ID NO: 151045 - protein, 651 aa, Coccidioides immitis RS
MNEYNQLYQQSINDPDTFWARMARDLITFEKDFDKTHIGTLEGGDNAWFVGGRLNASFNCVDRHAMRDPNKVAIIYEADEPGHGRSITYAELLKEVSRLAWVMKSQGVRKGDTVAIYLPMIPEAIFALLACARIGAIHSVVFAGFSSDSLRDRTLDARSKFIITTDEGKRGGKVIGTKKIVDEALKQCPDVTNCLVFKRTGADVPWTKGRDLWWHEEVDKYPNYLPAESMDSEDPLFLLYTSGSTGKPKGVMHTTAGYLVGAAATGKYVFDIHPADRFFCGGDVGWITGHTYVVYAPLLLGCTTVVFESTPAYPNFSRYWDVIEKHKVTQFYVAPTALRLLKRAGDHHINHEMKDLRILGSVGEPIAAEVWKWYHEVVGKRQAHIVDTYWQTETGSHVITPLGGITPTKPGSASLPFFGIDPVILDPVTGAEIPGNDVEGILAFRKPWPSMARTVWGDHKRYMDTYLNVYKGFYFTGDGAGRDHEGYYWIRGRVDDVVNVSGHRLSTAEIEAALIEHHCVAEAAVVGVPDPLTGQAVHAFVALKSGNDNREQLQKELIMQVRKSIGPFAAPKVVFVIDDLPKTRSGKIMRRILRKILSGEEDSLGDISTLSDPSVVNKIIDTFHEWKKAMAAAAAAAAAVSATAPPNSTTG

SEQ ID NO: 151046 - DNA, 2013 bp, Neosartorya fischeri NRRL 181
  CDS (1)..(2013)
atgtctgacggcgatgttaagcccccaaagccggccgtggtggtcgaggcccacgatgtcgacactttccacgtccccaaagctttctatgagaagcacccttcgaagactcatctgaaagatttggacgagtacaagaaactatacgacgagtctatccgtagccccgacacgttctgggcccgcatggcccgtgagctgctcactttcgaacaagacttccaaaccactcacgtcggctcgctcgagaatggcgacaatgcctggttcgtcgaaggtcgcttgaatgcctcattcaactgtgtggatcgtcatgccatcaagaaccctaacaaggtcgcgatcatctacgaggccgatgagcctaatgagggccgcatcattacctacggcgagctcctccgcgaagtgtcccgcgttgcctgggtcctgaagcagcagggtgtcaagaagggtgacactgtcgctatctaccttcccatgattcctgaggccgttgtggcttttctcgcctgtgcccgtatcggtgccgttcactccgttgtcttcgctggtttctcctcggactccctgcgtgatcgtgtccttgatgccggatccaaggtcgttatcaccacagacgagggtaagcgtggtggcaaggtgattggcaccaagcgcattgtcgatgaggccctcaagcagtgccccgatgttaccagtgtgctggtctacaagcgtactggtgctgaagtcccctggaccaacggccgtgacatttggtggcacgaggaggtcgagaagtacccctgctatctcgctcctgagtcgatgaactccgaggaccctctcttcctcctctacacctctggttccaccggtaagcccaagggtgttatgcacactactgccggctaccttcttggtgccgcgatgaccggcaagtacgtctttgacatccacgacgacgatcgcttcttctgcggtggtgacgttggctggatcaccggacacacctacgtcgtctatgcgcctcttcttcttggttgctctactgtcgttttcgaaagcactcccgcctaccccaacttctcccgctactgggatgtcattgagaagcacaaggtcactcagttctacgtcgcccccacagctctgcgtctgctgaagcgtgccggtgatgagcacatccaccacaagatggagcacctgcgtatcctgggctccgtcggtgaaccaattgccgctgaggtctggaagtggtacttcgagaaggtcggaaaggaagaagctcacatttgcgacacctactggcaaactgagaccggctcgaacgtcatcactcccctcggtggaattacttccaccaagccaggcagtgcatccttgcccttcttcggcattgagcccgctatcatcgaccccgtctccggcgaggagatctcgggcaacgatgtcgagggtgttcttgctttcaagcagccttggcccagcatggcccggaccgtgtggggtgcccacaagcgctatatggacacttacctgaacgtctacaagggctactacttcactggagatggcgctggccgtgaccacgacggatactactggattcgcggtcgtgtcgacgacgtggtcaatgtctctggacaccgtttgtctactgctgagatcgaggccgctcttcttgaacaccaccaggttgccgaagcggctgtcgtcggtattgccgatgaactcactggccaagctgtcaacgccttcgtttctctcaaggagggcaacgagaccaccgagcaagtccgcaaggatcttgtgatgcaagttcgcaagtcaatcggtccatttgccgcacccaaggcggtttacgtcgtagaagacctccccaagactcgcagtggcaagattatgcgccgtatcctacggaagattctgagcggtgaagaagatagcttgggtgatatctcaaccttgtcggatccttccgtggtcgacaagatcattgagactgttcatgctgcccgagccaagtag

SEQ ID NO: 151047 - protein, 670 aa, Neosartorya fischeri NRRL 181
MSDGDVKPPKPAVVVEAHDVDTFHVPKAFYEKHPSKTHLKDLDEYKKLYDESIRSPDTFWARMARELLTFEQDFQTTHVGSLENGDNAWFVEGRLNASFNCVDRHAIKNPNKVAIIYEADEPNEGRIITYGELLREVSRVAWVLKQQGVKKGDTVAIYLPMIPEAVVAFLACARIGAVHSVVFAGFSSDSLRDRVLDAGSKVVITTDEGKRGGKVIGTKRIVDEALKQCPDVTSVLVYKRTGAEVPWTNGRDIWWHEEVEKYPCYLAPESMNSEDPLFLLYTSGSTGKPKGVMHTTAGYLLGAAMTGKYVFDIHDDDRFFCGGDVGWITGHTYVVYAPLLLGCSTVVFESTPAYPNFSRYWDVIEKHKVTQFYVAPTALRLLKRAGDEHIHHKMEHLRILGSVGEPIAAEVWKWYFEKVGKEEAHICDTYWQTETGSNVITPLGGITSTKPGSASLPFFGIEPAIIDPVSGEEISGNDVEGVLAFKQPWPSMARTVWGAHKRYMDTYLNVYKGYYFTGDGAGRDHDGYYWIRGRVDDVVNVSGHRLSTAEIEAALLEHHQVAEAAVVGIADELTGQAVNAFVSLKEGNETTEQVRKDLVMQVRKSIGPFAAPKAVYVVEDLPKTRSGKIMRRILRKILSGEEDSLGDISTLSDPSVVDKIIETVHAARAK

SEQ ID NO: 151048 - DNA, 2013 bp, Aspergillus clavatus NRRL 1
  CDS (1)..(2013)
atgtctgacggcgacgttaagcctcggaagccggccgtggtccttgaggcccacgaagtcgatactttccatgttcccaaggcgttctacgagaagcaccccacaggtcctcacctgaaagaccttgatgagtacaagaagctatacgaggagtccattcggcaccccgacactttctgggcctgcatggcccgcgagctgctcactttcgacaaagacttccagaccactcacatcggttcgctcgagaacggcgacaatgcctggttcgttgagggccagctgaatgcctcgttcaactgtgtggaccgtcatgcgatcaagaaccccaacaaggtggccatcatctacgaggccgacgagcccagcgagggccgtatcatcacctatggcgaattgctccgtgaggtctcccgcgtcgcgtgggttctgaagcagcagggcgtcaagaagggcgacactgtcgctatctacctccccatgattcccgaagccgttgtagctttcctcgcctgctcccgtattggcgccgttcactccgtcgtctttgccggtttctcttccgattccctccgtgaccgtgttctcgacgccggctctaaggtcgtcatcaccactgatgagggtaagcgtggcggcaaggtcatcggcaccaagcgcatcgtcgacgaggctctcaagcagtgcccagatgtcaccagtgtgctcgtctacaagcgtaccggggctgaggttccctggacccagggtcgcgatgtttggtggcacgaggaggttgagaaataccccaactatcttgccgccgagcccatgaactccgaggatcctctcttcttgctctacacctccggttccaccggtaagcctaagggtgtcatgcacactaccgctggctacctgctcggcgcggccatgactggcaagtacgtctttgacattcacgacgatgatcgcttcttctgcggtggtgacgttggttggattaccggtcacacctatgtcgtctatgcgcctttgctcttgggttgctcgaccgtggtcttcgagagcactcccgcctaccccaacttctcccgctactgggatgtcattgagaagcacaaggtcacccaattctatgttgcgcccactgctctgcgtctgctgaagcgtgccggagacgagcacatccaccacaagatggagcacctgcgtatcctgggttcggtcggtgaacccatcgcagctgaggtgtggaagtggtacttcgagaaggtcggaaaggaggaggcccacatttgcgacacatactggcaaaccgagaccggttcgaacgtcatcactcccctgggtggcattacacccaccaagcctggcagtgcctcgatgcccttctttggcattgagcccgctatcattgaccccgtgtctggcgaggagatttccggtaacgacgtggagggcgtgcttgccttcaagcaggcctggcctagcatggcccggacggtgtggggcgcccacaagcgctatatggagacctacctgaatgtctacaagggctactacttcacgggagacggtgctggccgtgatcacgacggatactactggattcgtggccgtgttgatgacgttgtcaacgtttctggacaccgtctgtctactgctgagattgaagccgctcttattgaacaccaccaggttgccgaagctgcagtggttggtattgccgatgagctgaccggccaggccgtgaatgcctttgtttcgctcaaggagggcactgagtcgagcgagcaagtccgcaaagatcttgtgatgcaggtccgcaagtcgattggacctttcgccgctcccaaggcggtttatgttgtggaggaccttcccaagactcgcagtggtaagatcatgcgccgtattctgcgcaagatcttgagcggtgaagaggatagcctgggtgacacctcgactctgtccgatccttctgtggtcgacaagatcattgggactgtccatgctgctagaggcaaataa

SEQ ID NO: 151049 - protein, 670 aa, Aspergillus clavatus NRRL 1
MSDGDVKPRKPAVVLEAHEVDTFHVPKAFYEKHPTGPHLKDLDEYKKLYEESIRHPDTFWACMARELLTFDKDFQTTHIGSLENGDNAWFVEGQLNASFNCVDRHAIKNPNKVAIIYEADEPSEGRIITYGELLREVSRVAWVLKQQGVKKGDTVAIYLPMIPEAVVAFLACSRIGAVHSVVFAGFSSDSLRDRVLDAGSKVVITTDEGKRGGKVIGTKRIVDEALKQCPDVTSVLVYKRTGAEVPWTQGRDVWWHEEVEKYPNYLAAEPMNSEDPLFLLYTSGSTGKPKGVMHTTAGYLLGAAMTGKYVFDIHDDDRFFCGGDVGWITGHTYVVYAPLLLGCSTVVFESTPAYPNFSRYWDVIEKHKVTQFYVAPTALRLLKRAGDEHIHHKMEHLRILGSVGEPIAAEVWKWYFEKVGKEEAHICDTYWQTETGSNVITPLGGITPTKPGSASMPFFGIEPAIIDPVSGEEISGNDVEGVLAFKQAWPSMARTVWGAHKRYMETYLNVYKGYYFTGDGAGRDHDGYYWIRGRVDDVVNVSGHRLSTAEIEAALIEHHQVAEAAVVGIADELTGQAVNAFVSLKEGTESSEQVRKDLVMQVRKSIGPFAAPKAVYVVEDLPKTRSGKIMRRILRKILSGEEDSLGDTSTLSDPSVVDKIIGTVHAARGK

SEQ ID NO: 151050 - DNA, 2013 bp, Drosophila pseudoobscura pseudoobscura
  CDS (1)..(2013)
atgccagcggaaaaatcaatatacgatccgaatccggccatcagccaaaacgcttacatatccagcttcgaggagtacaagaagttctaccaggagtccctcgacaatcctgcagagttctggtcccgtgtggccaagcagttccactgggagacgcccgccgatcaggaaaagtttctgcaatacaacttcaacatctccaagggacccatttacattaagtggatggagggtgcctcgaccaatatctgctacaatctcctcgatcgcaacgtccgcaacggattgggcgaccagatcgcctactattgggagggcaaccaccccgacgactactcgcgcgggctcacctaccgcaaactgttggaggaggtctgccgcttcgcgaacgtgctgaaggaccatggcatcaggaagggcgatcgcgtgtccatctacatgcccatgatcttggagctgcccattgccatgctggcctgcgcccgcatcggggcggtgcactcgattgtgttcgccggcttctcgccggactccctggcggagcgtatgttcgactgcaaggccaagctgctgatcacggccgacggggcctggcgcggggagaaggcgctgtacctgaaggccctttgcgacacggcgctggagaaggtcgaggagttgggccactccgtggagaagtgcattgtggtgtcgcacctcaagcgggtgacgccctgccaggataaccatgtggaggaggagataccatggaccgatgatcgcgactactggtggcacgaggagatggaggacaaggagccggcttgctatcccgagtggatggacgccgaggatccgctcttcatgctctacacaagcggctccaccggcaagcccaagggtgttctccacaccaccgccggctatctgctgtacgcagccaccactttcaagatcgtcttcgactacaagccgggcgatatctactggtgcactgctgacgtgggctggatcactggacacacctacgtggtgtacgggcccctggccaacggtgccacttcagttattttcgagggcactcccttctttcccggaaacgatcggtactggagtgtcattgacaagtacaaggtcactcagttctataccgcccccacggccattcgtgctctgatgaagttcggcgagggaccggtcctcaagcacaacttaagtggtctcaaagttttgggcagcgttggggagcctatcaatccggaggcctggctctggtactatcgatacattggcaaggagcagtgctccattgtggacaccttctggcagacggaaactggcggtcatgtcatcacacctctgccaggtgccacgcccatgaagccgggatcagcttcgttcccattctttggtgtcaagcccattctgctggatgagtgcggcattgaaatcaaaggcgagggcgagggctacttggtgttctctcagccctggccaggcatgatgcgcactttgtacaacaatcacgagcgcttcgaggacacctacttctcgaaattccctggctactattgcactggtgatggtgctcgtcgcgatgctgatgattatctatggatcactggccgtgtcgacgacatgttgaacgtgtcgggacatctcatgtccactgccgaggtggagtccgtgctcaccgagcatccacgcgtggccgagtccgctgtagtttcgcgtccgcatccggtgaagggcgaatgcctttactgtttcatcacgcccaatgagaacgaacccttcgatcagaagcttatctcggatctgaaaaagatggtgcgcgagcgcattgggccgtttgcccagcccgatgttatccagaatgcccctggcttgcccaagacccgctccggcaaaataatgcgccgtgtgctccgcaagattgccgtaaacgatcgcaacgtgggcgacacttcgaccctggctgatgagcagattgtggagcagctgtttgccaatcgtcccgtggaggccaagtag

SEQ ID NO: 151051 - protein, 670 aa, Drosophila pseudoobscura pseudoobscura
MPAEKSIYDPNPAISQNAYISSFEEYKKFYQESLDNPAEFWSRVAKQFHWETPADQEKFLQYNFNISKGPIYIKWMEGASTNICYNLLDRNVRNGLGDQIAYYWEGNHPDDYSRGLTYRKLLEEVCRFANVLKDHGIRKGDRVSIYMPMILELPIAMLACARIGAVHSIVFAGFSPDSLAERMFDCKAKLLITADGAWRGEKALYLKALCDTALEKVEELGHSVEKCIVVSHLKRVTPCQDNHVEEEIPWTDDRDYWWHEEMEDKEPACYPEWMDAEDPLFMLYTSGSTGKPKGVLHTTAGYLLYAATTFKIVFDYKPGDIYWCTADVGWITGHTYVVYGPLANGATSVIFEGTPFFPGNDRYWSVIDKYKVTQFYTAPTAIRALMKFGEGPVLKHNLSGLKVLGSVGEPINPEAWLWYYRYIGKEQCSIVDTFWQTETGGHVITPLPGATPMKPGSASFPFFGVKPILLDECGIEIKGEGEGYLVFSQPWPGMMRTLYNNHERFEDTYFSKFPGYYCTGDGARRDADDYLWITGRVDDMLNVSGHLMSTAEVESVLTEHPRVAESAVVSRPHPVKGECLYCFITPNENEPFDQKLISDLKKMVRERIGPFAQPDVIQNAPGLPKTRSGKIMRRVLRKIAVNDRNVGDTSTLADEQIVEQLFANRPVEAK

SEQ ID NO: 151052 - DNA, 2028 bp, Scheffersomyces stipitis CBS 6054
  CDS (1)..(2028): transl_table=12
atgcctgaatctactcaacaatcccacctcaccttggaccacgagaagaagatggaccctccacagggtttcttcgagaggtccaagtccaagcctaacttgccagactttgacacctacaagaagatgtacgaccagtccgttaccgatccaaataccttcttcggtgaacaagccaagaacagcttggattggttcaaaccttttgacttggcaagatttcctgtcgattccaaggacgacttcaaaaacggtgacttgccagcttggttcatcaacggtcagttgaatgcctgttacaatgctgttgaccgttgggccatcaagaaccccaacaagcctgctatcatctatgaaggagatgaaccaaacaccggcagaatcatctcttacggtgaattattgaaacaggtatcgaagttggcacagtctttgacaaagttgggagtcaagaagggagactctgttgccgtctatttaccaatgattcctgaagccatcgttacattgttggctatcgtgagaattggagctatccactcggtagttttcgcaggtttctcgtcgacatcacttaaggacagaatcttggatggtgactctcaaatcgtcatcactgctgacgagtctaagagaggtggaaagactattgaaaccaagaaaattgtcgacgacgccttgaaggactgtccaaatgtcagaaacgtcattgtcttcaagagaactggtaacgctcacgtacctttcaatcctaagagagatttgtggtggcacgaagaattggacaaatatggtccatacttcccacctgttccagtcaactctgaagacccattgttcttgttatatacctcgggttctactggaaagccaaagggtgttcagcacaacaccgctggttacttgttgggcgctcttttgaccaccaagtatacttttgatgtccacgaagatgatattatctttactgcaggtgatatcggctggattaccgggcatacgtatgtcgtatacggtcctcttttgaatggtgccaccaccgttgtttttgaaggaactccagcctatcctaacttctcgagatactgggatatcgttgacgagtacaaagttaaccagttctatgtcgcccctactgcccttagattgttgaagagagccggcactaagtttgttgagaactacgacttgtcttcgctcagagttcttggatccgtcggtgaacctattgctgctgaagtctggcattggtacaacgacaacatcggcagaggcaaggcacacattgtcgatacctactggcaaaccgagtcgggatcacatttgttaactcctttggccggtgtgactcctacgaagcctggttctgcttctttaccattctttggtattgttcccaagatcttggatcctaccactggtgccgaattgaatgagaacgacgtcgaaggtgttttggcaatcaaatctgcctggccatcgatcaccagaggtatcttcaacgactacaacagatttatcgacacctacttgaaaccataccctaaccactacttttccggagatggtgctgccagagataatgatggtttctactggatcttgggtagagttgatgatgtggttaatgtatctggtcatagattatccactgccgaaattgaggctgctcttattgagcaccacttagtggctgaatcggccgttgtgggttatgctgacgacttgactggtcaagctgtggctgcctacgtttccctcaagaaagacaagaacatcgaagacgacatcgaagccgtcaagaaggaattgatcttgactgtcagaaaggaaattggtccttttgctgctcctaagttgattttgttggttgatgacttaccaaagaccagatctggtaagatcatgagaagaatcttgagaaaggttttggctggtgaagctgatcagttgggtgatatctcaactttgtcgaaccccggtgttgtcaaacagatcatcgatgttgtcaactcctcaaagaagtaa

SEQ ID NO: 151053 - protein, 675 aa, Scheffersomyces stipitis CBS 6054
MPESTQQSHLTLDHEKKMDPPQGFFERSKSKPNLPDFDTYKKMYDQSVTDPNTFFGEQAKNSLDWFKPFDLARFPVDSKDDFKNGDLPAWFINGQLNACYNAVDRWAIKNPNKPAIIYEGDEPNTGRIISYGELLKQVSKLAQSLTKLGVKKGDSVAVYLPMIPEAIVTLLAIVRIGAIHSVVFAGFSSTSLKDRILDGDSQIVITADESKRGGKTIETKKIVDDALKDCPNVRNVIVFKRTGNAHVPFNPKRDLWWHEELDKYGPYFPPVPVNSEDPLFLLYTSGSTGKPKGVQHNTAGYLLGALLTTKYTFDVHEDDIIFTAGDIGWITGHTYVVYGPLLNGATTVVFEGTPAYPNFSRYWDIVDEYKVNQFYVAPTALRLLKRAGTKFVENYDLSSLRVLGSVGEPIAAEVWHWYNDNIGRGKAHIVDTYWQTESGSHLLTPLAGVTPTKPGSASLPFFGIVPKILDPTTGAELNENDVEGVLAIKSAWPSITRGIFNDYNRFIDTYLKPYPNHYFSGDGAARDNDGFYWILGRVDDVVNVSGHRLSTAEIEAALIEHHLVAESAVVGYADDLTGQAVAAYVSLKKDKNIEDDIEAVKKELILTVRKEIGPFAAPKLILLVDDLPKTRSGKIMRRILRKVLAGEADQLGDISTLSNPGVVKQIIDVVNSSKK

SEQ ID NO: 151054 - DNA, 2040 bp, Scheffersomyces stipitis CBS 6054
  CDS (1)..(2040): transl_table=12
atgactgttaccccacagcaccaagtcgtccacgaggccaacggtgtcaccccaagacccactcctaaggagttttttgacaaacagccccgtcctggccatatcacctccatcgaacagtaccaggaattataccagaagtccatcgccgaccctgaaggattctttggtcctatggccaaggagttgttgtcgtgggacagagacttcgacaaggtcaagtccggttctttgaaggacggtgacgttgcctggttcattggcggccagttgaacgcttcctacaactgtgtagacagatgggcctatgcgactccagacaagactgccatcatctacgaagctgacgaagaaaaggactcgtacaagttgacctacgccgagttgttgagagaagtctccaaggtagctggtgtgttgaagagctggggcatcaaaaagggtgatactgttgctatctacttgccaatgactcctcaagctgttattgctatgctcgctgtagccagattaggtgccatccactcggttatctttgcaggtttctcttctggttccatcagagacagagtcaacgatgcttcttgtaaggctcttattacctgtgacgaaggtagaagaggtggtaagaccgttaacatcaagaaattgtgcgacgaagccttgaagagctgtcctactgtagaaaaggtgcttgttttcaagagaaccggaaacgaaaatattgaattggaagagggtagagatttctggtgggatgaagaaaccgccaagttctcgggttacttgccacctgttccagtcaattctgaagacccattgttcttgttgtatacatctggttccactggtactcctaagggtgttgtccacaccactgggggctacctcttaggtgctgccatgaccaccaagtacattttcgacgtccacccagaagacatcttgttcactgccggtgatgtcggttggattactggtcacacctatgctttgtacggacctttggctctcggtatcccaacaatcgtttttgaaggtactccagcctacccagactttggtagattctggcaaattgtcgaaaagcacaaggctacccacttctacgtagctcctactgccctcagattgttgagaaagagtggcgagcaagagattccaaagtacgacttgtcttctttgagaacattgggctctgttggtgaacctatctcccctgatatctgggaatggtacaacgagcacgttggacaaggcagatgccacatctccgacacctactggcaaactgagtctggttctcacttcattgctccaattgccggtgtcactccaaacaaacctggttcagcctctttgccattctttggtatcgagaccgctcttattgatccagtttccggccacgaactcgaaggtaacgacatcgaaggtgttcttgccatcaagagcacctggccatctatggctagatctgtctggaacaaccacaccaagtacatggacacatacttgaacccatacccaggctactactttaccggcgacggtgctgccagagatcacgacggctactactggattagaggtagagtcgatgatgtcgtcaatgtgtctggtcacagattgtctactgctgaaatagaagctgccctcatcgaacacaacggtgtttctgaagctgctgtggttggtattaccgacgacttaactggtcaagccgtagttgcctacgttgctctcaagaacgaatacgtcgacaagatcgccggcaaggaaaccagcgacgaagcctttgccttgagaaaggaattgatcatgaccgtcagaaaggaaatcggacctttcgcagctccaaagagcgtcatcattgtcgccgacttgccaaagaccagatctggtaagatcatgagaagaatcttgagaaagatctctgccaacgaagcagaccaattgggtgacatcaccactttgtccaaccctcagtctgtcgttggtataatcgactcctttgctgctcaatttgctaagaaataa

SEQ ID NO: 151055 - protein, 679 aa, Scheffersomyces stipitis CBS 6054
MTVTPQHQVVHEANGVTPRPTPKEFFDKQPRPGHITSIEQYQELYQKSIADPEGFFGPMAKELLSWDRDFDKVKSGSLKDGDVAWFIGGQLNASYNCVDRWAYATPDKTAIIYEADEEKDSYKLTYAELLREVSKVAGVLKSWGIKKGDTVAIYLPMTPQAVIAMLAVARLGAIHSVIFAGFSSGSIRDRVNDASCKALITCDEGRRGGKTVNIKKLCDEALKSCPTVEKVLVFKRTGNENIELEEGRDFWWDEETAKFSGYLPPVPVNSEDPLFLLYTSGSTGTPKGVVHTTGGYLLGAAMTTKYIFDVHPEDILFTAGDVGWITGHTYALYGPLALGIPTIVFEGTPAYPDFGRFWQIVEKHKATHFYVAPTALRLLRKSGEQEIPKYDLSSLRTLGSVGEPISPDIWEWYNEHVGQGRCHISDTYWQTESGSHFIAPIAGVTPNKPGSASLPFFGIETALIDPVSGHELEGNDIEGVLAIKSTWPSMARSVWNNHTKYMDTYLNPYPGYYFTGDGAARDHDGYYWIRGRVDDVVNVSGHRLSTAEIEAALIEHNGVSEAAVVGITDDLTGQAVVAYVALKNEYVDKIAGKETSDEAFALRKELIMTVRKEIGPFAAPKSVIIVADLPKTRSGKIMRRILRKISANEADQLGDITTLSNPQSVVGIIDSFAAQFAKK

SEQ ID NO: 151056 - DNA, 2013 bp, Aspergillus niger CBS 513.88; identical to SEQ ID NO: 122110
  CDS (1)..(2013)

SEQ ID NO: 151057 - protein, 670 aa, Aspergillus niger CBS 513.88; identical to SEQ ID NO: 122111

SEQ ID NO: 151058 - DNA, 1935 bp, Ostreococcus lucimarinus CCE9901
  CDS (1)..(1935)
atggatacacttcgaaactgttcgagtcgtggccagtacgacgagctctatcgcgaatccgttactgagccagagaaattttggtccaaactggccaaggacttcgtctggagtgctgactggtctgatagtgtgagcgccttcaacttcaataccgacgtcggaaaagttgacgtctcatggtttgccggcgggaagaccaacattgcgtggaattgcatcgaacgaaatattgaaaggggctgtggagagcaggtcgcgttaatctgggaaggtaatgacgtcggtgaagaagggacaaaaacgtacagtgagctccaagcagatgtcaatcggctggcaaactggctgaaatcggtcggagttgctaagggtgatgctgttgtactgtacttacctatgattatggaacttcctattgcgatgcttgcttgtgcccgcatcggggctgtccactctgttgtgtttgcaggattttcttctgaggcgttagcgcagcgtcttctgggatcggcggcgaaagtggtgttaacatgttcagctgtgatgagaggttcgaaacacataaatttaaaagctgtcgtcgacgaagcatgtgattccagtgccgaaaagggtcataaaattgaacactgcttatgtttcatgaacgagaggcttgacgtggagggctttctcacaactagtcgtgatgaacattggcagcaagcagtacatgcacaatccatggagtgcacaacagaatgggttgatgcggagcatccactcttcatgttgtacacgtctggttctacaggctccccgaagggcgtcctccatactaccggagggtacatggtttatgctggagctacatgcgcctctgttttcaacatgcaacaaggtgatatattttggtgcactgcagattgtggctggataacaggtcatacgtacgtgacatatggaccacttctaaacggtgccgcttcagttgtctttgagggagtaccgacacatccagatgctggtcggtgttggcaaatcgtggacaaatataatgtgaaagcattctacacagcgccaactgcgataagagcgttgcagcgatacggtaacgactttgttctcaaacaccaaaggctgtcgctgaaaatattgggtacagtcggagaaccgattaaccccgaagcatggcagtggtactccgagatcgtcggaggtggacgctgtccgatcgtagacacctggtggcaaacggaaaccggtgggcatatgatcactccactgccttttgcgatagagcagaagccaggttcggcgactctcccgttctttggtgttcaaccagtattactgaacgatgccggagaagaattgacaggagaggccgaagggtatttgtgtttcaagaaaccgtggccatccatgtttcgaacacttttttcggatcataaaaggtacgaagaagcgtacttctccatgtttaaagggtactacttttcaggcgatggggccaagcgtgactcggatgggtattattggattaccggacgtgttgacgatgtcatcaacgtgtctggtcatcgtatcggcactgcggaggtcgagtcggcattagtcacccatcaggagtgtactgaagccgctgtagtgggaattgatcacgctatcaagggtcagtcgatatacgcttttgtaacgttgcgcgaaggttgtgttctcacggaggcaacgaagaaagctctggtgaactgtgtgaggactgttatcggtccgttcgcagcacctgatactattcaatgggcgccaggattaccaaaaacgcgtagtggtaaaattatgagacgcatcttgaggaaaatagcgtctcgagaagaagactcgttgggtgacatatccactctagctgatcctagcgttgtggatgcccttgtgaaagagcgaagtcaatag

SEQ ID NO: 151059 - protein, 644 aa, Ostreococcus lucimarinus CCE9901
MDTLRNCSSRGQYDELYRESVTEPEKFWSKLAKDFVWSADWSDSVSAFNFNTDVGKVDVSWFAGGKTNIAWNCIERNIERGCGEQVALIWEGNDVGEEGTKTYSELQADVNRLANWLKSVGVAKGDAVVLYLPMIMELPIAMLACARIGAVHSVVFAGFSSEALAQRLLGSAAKVVLTCSAVMRGSKHINLKAVVDEACDSSAEKGHKIEHCLCFMNERLDVEGFLTTSRDEHWQQAVHAQSMECTTEWVDAEHPLFMLYTSGSTGSPKGVLHTTGGYMVYAGATCASVFNMQQGDIFWCTADCGWITGHTYVTYGPLLNGAASVVFEGVPTHPDAGRCWQIVDKYNVKAFYTAPTAIRALQRYGNDFVLKHQRLSLKILGTVGEPINPEAWQWYSEIVGGGRCPIVDTWWQTETGGHMITPLPFAIEQKPGSATLPFFGVQPVLLNDAGEELTGEAEGYLCFKKPWPSMFRTLFSDHKRYEEAYFSMFKGYYFSGDGAKRDSDGYYWITGRVDDVINVSGHRIGTAEVESALVTHQECTEAAVVGIDHAIKGQSIYAFVTLREGCVLTEATKKALVNCVRTVIGPFAAPDTIQWAPGLPKTRSGKIMRRILRKIASREEDSLGDISTLADPSVVDALVKERSQ

SEQ ID NO: 151060 - DNA, 1956 bp, Ostreococcus lucimarinus CCE9901
  CDS (1)..(1956)
atgtatcatcgctcaattcacgagcgtgatcagttctggaccgagatcgcgggcgaactgtactttgaaaatttggactcgagcgcgtcgacgcacaactttgacccgtctcgggggcccgttcacgtgaaatggttcgagggcgcgaggacgaacatggcgtacaactgcctcgaaaaacaaattgaaaatggtatgggtgacaaacgagccttgattttcgaagcgaatgatgagattaattgcacggaatttacgttccgtgagttgctcgtcgaggtggagactttcgcaaaatttttgatagcgcacggcgtgcagaagggcgatcgcgtggtcatgtacttgccgatgattccagcgttaccgatcgccatgctcgcgtgctcgcgaatcggcgcagtgcacagcgttgtgtttgccgggtacagcgcgaaatctctcgcgcagcgcgttcacgattgcaaagccaaaatggtcatcaccgcgagcgcgtcccgtcgcgccgaaaagatcattccgctgaagaaaatcgtggacgaagcaatggagatttgcaagagcgatgggttttgcgtaaacaaagttgtcgtgaagcataacgctgacattgagatcgaaggcgttccgcacgtcgaagacgtaccttttcattcggatcgggatttgtggtggaacgagagtgtcgccgagtttaggacggatggaaagccagcacctattgaatttctggacagttgcgacacggcgttcattctctacacgtctggttcgactggtaaacccaaaggcgtcgtacacagcgtcggcggttatcagacgtacgtgtacgccaccagcaagttcgtcttcgatctacatgccggagaggacgttttgttctgcaccgccgacctaggatggatcacggggcattcatacggcttgtacggaccgctgttgaatggatgcgcgactgtgctcttcgaaggcgtgcctacgtatccagatgcaggtgtgtggtggcaaactgtggacaaatacgacgttactgtcttctacacttcgccgacggcgttgcgcacgttgcaaggttacggtgaggatcctgtcaagcgaagttcgcgcgcttctttgcgaatccttggaactgtcggcgagccgatttcgagcgagacgtggctgtggtaccacagcgtcgtcggcgacgataaactcccgatttgtgacacgtggtggcagacagaaacgggcggtcatatcatcacaccgttacccggtgcgacacccttgaaggcttcgagcgcgacttttccgttttttggaatcgttcccgtgctgcttgatccgaaagatggaactgaaattcaaggcgagggcgaaggatgcttgtgcatcaaagaaccatggccggggatgtttctcgacgttcacggcgcgcacgagcggtacgaaaattcttacttcaaggtgtacgagggtggttactacttctcgggcgatggcgcgcgacgcgattccgatggatacctcttcatcacgggtcgcttggacgacgtcatgaacgtcagtggtcatcgcatcgggaccgccgaggttgagtctgcattagtgcagcactcgagttgcatcgaagccgccgtggtttcaatcgcgcacgaagtcaagggcgaatccatcgtcgcttacgtcatcttagatccgtctcgaagcatcgagaaacggtcgtcgctcgaaatccatcaacgagaactcatcacgaacgttcgcatggaaatcggccccttcgcggcgccagaacgcgtcgtcatcgtgaaagatttgccgaagactcgaagcggaaagatcatgcgaagaattttgaagaaaatcgccgccggcgacgtcgacgatttcggcgacgtctccgcgttggccgacccgggggtcgtagacgagatcatcaaagccgagagacacgcgcgcggaacgcgatga

SEQ ID NO: 151061 - protein, 651 aa, Ostreococcus lucimarinus CCE9901
MYHRSIHERDQFWTEIAGELYFENLDSSASTHNFDPSRGPVHVKWFEGARTNMAYNCLEKQIENGMGDKRALIFEANDEINCTEFTFRELLVEVETFAKFLIAHGVQKGDRVVMYLPMIPALPIAMLACSRIGAVHSVVFAGYSAKSLAQRVHDCKAKMVITASASRRAEKIIPLKKIVDEAMEICKSDGFCVNKVVVKHNADIEIEGVPHVEDVPFHSDRDLWWNESVAEFRTDGKPAPIEFLDSCDTAFILYTSGSTGKPKGVVHSVGGYQTYVYATSKFVFDLHAGEDVLFCTADLGWITGHSYGLYGPLLNGCATVLFEGVPTYPDAGVWWQTVDKYDVTVFYTSPTALRTLQGYGEDPVKRSSRASLRILGTVGEPISSETWLWYHSVVGDDKLPICDTWWQTETGGHIITPLPGATPLKASSATFPFFGIVPVLLDPKDGTEIQGEGEGCLCIKEPWPGMFLDVHGAHERYENSYFKVYEGGYYFSGDGARRDSDGYLFITGRLDDVMNVSGHRIGTAEVESALVQHSSCIEAAVVSIAHEVKGESIVAYVILDPSRSIEKRSSLEIHQRELITNVRMEIGPFAAPERVVIVKDLPKTRSGKIMRRILKKIAAGDVDDFGDVSALADPGVVDEIIKAERHARGTR

SEQ ID NO: 151062 - DNA, 2013 bp, Meyerozyma guilliermondii ATCC 6260
  CDS (1)..(2013)
atgcctgaaagtacagatcacttggaccacgagaaaatgctcgatccgccaaaaggatttttcgagaggtccacttccaaacctaatcttgcctcgttggacgagtataaaaagctctacaaacagtcgatcgaagacccggccacgttttttggaaatgctgcgaaactgttcttggactgggacagaccgtttgactacacgagatttcccgttgatcctaaagacgactttaaaaatggagatattccatcttggttcatcaatggtcaattgaacgcttcgtacaatgctgtggacagatgggcgatgaaaaacccagaaaaacccgccatcatttacgaggctgacgaggtcaacgaaggcagaaccatcacctatggtgaattgctcaaggatgtcagcaagttggcagctactcttaccaatctcggagtcaagaaaggcgactccgtagcggtttatttgcccatgatcccagaagcaattgtgactctcttggctatcgttagaattggtgcgctccattccgtggtgtttgctggtttctcgtccacgtcgttgcgggacagaatcatcgatgccgactccagaatcgtcatcaccgccgatgagtccaagagaggcggaaagaccatcgagacgaaaaaaatcgtggacgacgcattgaaggaatgtccccatgtgcgcaacgtgcttgtgttcaagagaaccggaaactctcatgtcccattcctggctggccgtgatctttggtggcacgatgagttgcagaaatacggaccatatttccctcccgtaccagttaactctgaggatccattgttcttgttgtacacttctggttccaccggaaaaccaaagggtgttcagcacaacaccgcaggttaccttttgggtgcattaatgacggctaagtacacctttgatctccacgaggaagacatcatcttcaccgctggagatgtgggctggattactggccacacttatgtggtttacggtccattattgtgtggtgcgactacagtcgtcttcgagggaaccccagcttatcccgactattctagatactgggacgtcgtcgacaagtacaaggtgaaccagttttatgttgcacccactgctttgcgtctcctcaagagagccggcacaaagtacgttgaaaagcacgatttgagctctcttcgtgttttgggctctgttggtgaacccattgctgctgaggtatggcactggtacaacgacaatattggccgcggaaaggctcatattgtagacacctactggcaaactgaatcgggttcacacttgttgactcctttggctggtgtgaccccaaccaaacctggttctgcttcgttgccatttttcggtattgacgctagaatcttggacccagtctcaggcaaggatttggtggataacaacgtcgagggtgtgttgtgtgtcaagtctgcctggccgtctatcactagaggtatttaccacgactacgccaggtacattgaaacatacttgaagccataccctaaccattatttcctgggagatggtgctgccagagacaaggatggctttttctggattttgggtagagtcgacgatgttgtcaatgtatctggtcatagattgtcaactgctgaaatcgaagctgccttgatcgaacatgaattggtgggagaaagtgctgtggttggctacgctgacgagttgactggtcaggctgtggctgcgtacgtatctttgaaatccaatgtcgaggtcgacgacttggaagctatcaagaaagagttgatcttgacggttcggaaggaaatcggtcctttcgctgctccaaagttgatcttattggtggatgatcttcccaagacgagatctggaaagatcatgagaagaatcttgagaaaggtgttggcaggcgaagaagatcaattgggcgacatctctacattgtcgaacccccaggtggtttcccaagtgatcgaggtcgtaaaagcttcacgtaagtaa

SEQ ID NO: 151063 - protein, 670 aa, Meyerozyma guilliermondii ATCC 6260
MPESTDHLDHEKMLDPPKGFFERSTSKPNLASLDEYKKLYKQSIEDPATFFGNAAKLFLDWDRPFDYTRFPVDPKDDFKNGDIPSWFINGQLNASYNAVDRWAMKNPEKPAIIYEADEVNEGRTITYGELLKDVSKLAATLTNLGVKKGDSVAVYLPMIPEAIVTLLAIVRIGALHSVVFAGFSSTSLRDRIIDADSRIVITADESKRGGKTIETKKIVDDALKECPHVRNVLVFKRTGNSHVPFLAGRDLWWHDELQKYGPYFPPVPVNSEDPLFLLYTSGSTGKPKGVQHNTAGYLLGALMTAKYTFDLHEEDIIFTAGDVGWITGHTYVVYGPLLCGATTVVFEGTPAYPDYSRYWDVVDKYKVNQFYVAPTALRLLKRAGTKYVEKHDLSSLRVLGSVGEPIAAEVWHWYNDNIGRGKAHIVDTYWQTESGSHLLTPLAGVTPTKPGSASLPFFGIDARILDPVSGKDLVDNNVEGVLCVKSAWPSITRGIYHDYARYIETYLKPYPNHYFLGDGAARDKDGFFWILGRVDDVVNVSGHRLSTAEIEAALIEHELVGESAVVGYADELTGQAVAAYVSLKSNVEVDDLEAIKKELILTVRKEIGPFAAPKLILLVDDLPKTRSGKIMRRILRKVLAGEEDQLGDISTLSNPQVVSQVIEVVKASRK

SEQ ID NO: 151064 - DNA, 2070 bp, Lodderomyces elongisporus NRRL YB-4239
  CDS (1)..(2070)
atgccagaacaaaaaaatactctgcaaaaacaatctcagtctcatatttccttggaccatgaaaagatgcaacaaccaccacaaggatttttcgacagacaaccaaatggccaagagccaaacttgaaggactttgccacctaccaaaaattgtacaatcaatcgattcaagacccaaatgcattttggactaaacaagctcaagaatacttgcactggtctaaaccatttgaagttgctagattcccacaagaccccaaggatgactttaaaaatggagacttgcccgcttggtttatcaatggtgaattgaatgcatgctacaatgcagttgaccgctgggcattgaagaaccccaacaagccagcaattatctatgaggctgacgaggttggagaaggcagaataatcacttatggagaattgttgaaggaggtttccaaattggcccaggttttggtcaagttgggtgtcaagaagggcgactcggttgcagtgtacttgccaatgattccagaggctatcgttacattgttggctattgtccgtattggtgccatgcactctgtggtttttgccggcttttcttcagcctctttgcgtgaccgtatcttggatgccgactctaagattgttattaccgctgacgaatccaagagaggtggaaagactattgaaacaaagaagattgtggatggcgcattgaaggaatgcccagatgtacgcaatgttattgtgtttaagagaactggtaacccacacgtgccatttgacaattccaacggaagagacttgtggtggcacgaggagatggccaagaatggctcttatttcccaccaaccccaatgaatgccgaagacccattgtttttgctttatacctcgggctctaccggtaaacccaagggtgtccaacacaccactgccggttacttgttgggtgcactcatgactacaaagtatacctttgacgttcacgaagatgacattttattcactgctggtgacattggctggattacaggtcacacttattgtgtttacggtccattgttgaatggtgccacctctgtggtgtttgaaggtacccctgcttatccaaacttttcaagatactgggaaattgttgacaagtacaaggttaaccaattttacgttgctccaacggctttgagattgttgaagagggccggtaccaagtatattgaaaactatgaccttggctcattaagagttcttggctctgttggtgaaccaattgcagctgaggtttggcactggtataacgacaatattggtcgtggtaaagcccatatcgttgacacttattggcaaaccgagtctggttctcacttgttgactccattggctggtatcacaccaacgaaaccaggatctgcctctttgccatttttcggtgttgaaccaaagattttggacccaaccactggtgctgagttgaaggataacgacgttgaaggtgtcttggctattaaacaagcatggccatccatcacaagaggaatctacaatgactataatcgttttatcgatacttatttggcaccataccctaaccactactttagtggtgatggtgcagcaagagaccttgaaggcttttactggatcttgggtagagtcgatgatgttgttaatgtgtctggccacagattatcaactgctgagattgaagctgctttgattgaacatcaattggttgccgagagtgccgttgttggatatgctgacgaattgactggtcaagctgttgccgcttatgtcgctttgaagaaggataagttgccagccaatacaactgaagaagatctcgaactcattaaaaaagagttggttctcactgtgcgtaaagagattggtccatttgctgcaccaaagttgattcttttggttgacgacttgccaaagactagatctggtaagattatgagaagaattttgagaaaagttcttgctggtgaagaagaccaattgggtgacacttcaacattgtccaatccacaagttgtccaacaaattattgacattgttcacaagagcaagaagtga

SEQ ID NO: 151065 - protein, 689 aa, Lodderomyces elongisporus NRRL YB-4239
MPEQKNTLQKQSQSHISLDHEKMQQPPQGFFDRQPNGQEPNLKDFATYQKLYNQSIQDPNAFWTKQAQEYLHWSKPFEVARFPQDPKDDFKNGDLPAWFINGELNACYNAVDRWALKNPNKPAIIYEADEVGEGRIITYGELLKEVSKLAQVLVKLGVKKGDSVAVYLPMIPEAIVTLLAIVRIGAMHSVVFAGFSSASLRDRILDADSKIVITADESKRGGKTIETKKIVDGALKECPDVRNVIVFKRTGNPHVPFDNSNGRDLWWHEEMAKNGSYFPPTPMNAEDPLFLLYTSGSTGKPKGVQHTTAGYLLGALMTTKYTFDVHEDDILFTAGDIGWITGHTYCVYGPLLNGATSVVFEGTPAYPNFSRYWEIVDKYKVNQFYVAPTALRLLKRAGTKYIENYDLGSLRVLGSVGEPIAAEVWHWYNDNIGRGKAHIVDTYWQTESGSHLLTPLAGITPTKPGSASLPFFGVEPKILDPTTGAELKDNDVEGVLAIKQAWPSITRGIYNDYNRFIDTYLAPYPNHYFSGDGAARDLEGFYWILGRVDDVVNVSGHRLSTAEIEAALIEHQLVAESAVVGYADELTGQAVAAYVALKKDKLPANTTEEDLELIKKELVLTVRKEIGPFAAPKLILLVDDLPKTRSGKIMRRILRKVLAGEEDQLGDTSTLSNPQVVQQIIDIVHKSKK

SEQ ID NO: 151066 - DNA, 2028 bp, Lodderomyces elongisporus NRRL YB-4239
  CDS (1)..(2028)
atggcttcaactgaaaatcatactgttgtgcacgaggcaaatggcgtgccctttagagctactccaaaggaattctttgaaagacaacctagctcaggtggccatttaaaagacattgaccattaccgtgaactctatgagaaatccatcaatgatcctcaaggattctttggcccattggctaaggaaatgttatcatgggacagagacttccacaccatcaagtctggtactttgaaagaaggcaatgccgcatggttcctcggaggccaattgaatgcctcatacaattgtgtcgatagacacgccttaaagaacccaaacaagccagctttgatttatgaggccgacgaagatagcgactcatacattatcacttatggagaattgttgaaggaagtttccagagtcgctggtgtcttgcaaagctggggtgtgggtaacggtgacaccgttgctgtctatttgccaatgaatgcccaggccattatcgccatgttggccatcaccagattgggtgcagcacactcggtgatttttgccggtttctcttcaggctcgatcaaggacagagtcaatgacgcccaatgtaaagcattgattacttgtgacgaaggtaagagaggtggaagagtcacaaacatcaagagattgtgtgacgatgctttggagagctgtccaagcgttaaacatgtcttggtccacaagagaaccaacaacaaggagattgcaatgaaggaaggaagagatttctactgggacgaggaaaccgttaagttcccaggttacttgcctcccgtatcagtagactctgaagacccattgtttttgctttatacttcgggctcaaccggtactccaaagggtgttgttcacaccaccgctggtttccttttgggagcagcattaaccaccaagtacgtgtttgacgttcacgaagaggatattttgttcaccgcaggtgacgttggttggatcactggccacacttatgccttgtatggaccattattgctcggtatcccatcaatcatctttgaaggtaccccagcatacccagactatggtagattctggcacattgtgcaaaaacacagggcgacacacttttacgttgcccctacagcattgagattattgcgtaaagcaggccaagaggagattaagaagtacgacatctcctcattgagaaccttgggttcagttggagaaccaatctcaccagatatctgggaatggtacaatgaatatgtcggtaaggatcaatgtcacatttcagacacttattggcaaaccgagtctggatcccacttgattgccccattggctggtattacaccaaacaagccaggatctgcatcatacccattctttggtattgaaactgcattgattgatccagtctctggtgctgagattaaaggcaatgacgttgaaggtgtcttggtggttaaggaccactggccatcaatggctagaactgtttaccacaaccacaccaagtatatggacacatatatgaatccatacccaggctactatttcaccggtgacggtgctgctagagaccatgatggttactactggatcagaggtagagtcgatgatgttgtcaatgtctctggccacagattatccaccgctgagattgaagctgcgttgattgaagaccaaaaagttggtgaggcggctgtcgttggtatcaatgatgacattaccggtcaagctgtgattgcatatgttgcattaaaggactccaacaccgagcaaacagaagaagatctcttgaccttgagaaaagaattggtcttgattgtgagaaaatctattggtccatttgccgcacccaaggctgtgattgttgttgcagacttgccaaagacaagatcgggtaagattatgagaagaatcttgagaaagattagttcgaacgaagccgaccagctaggcgacattaccactttgcaaaacccacaatcggtggaaggtattgttaagtcctttgctgctcaatacggaaagaaataa

SEQ ID NO: 151067 - protein, 675 aa, Lodderomyces elongisporus NRRL YB-4239
MASTENHTVVHEANGVPFRATPKEFFERQPSSGGHLKDIDHYRELYEKSINDPQGFFGPLAKEMLSWDRDFHTIKSGTLKEGNAAWFLGGQLNASYNCVDRHALKNPNKPALIYEADEDSDSYIITYGELLKEVSRVAGVLQSWGVGNGDTVAVYLPMNAQAIIAMLAITRLGAAHSVIFAGFSSGSIKDRVNDAQCKALITCDEGKRGGRVTNIKRLCDDALESCPSVKHVLVHKRTNNKEIAMKEGRDFYWDEETVKFPGYLPPVSVDSEDPLFLLYTSGSTGTPKGVVHTTAGFLLGAALTTKYVFDVHEEDILFTAGDVGWITGHTYALYGPLLLGIPSIIFEGTPAYPDYGRFWHIVQKHRATHFYVAPTALRLLRKAGQEEIKKYDISSLRTLGSVGEPISPDIWEWYNEYVGKDQCHISDTYWQTESGSHLIAPLAGITPNKPGSASYPFFGIETALIDPVSGAEIKGNDVEGVLVVKDHWPSMARTVYHNHTKYMDTYMNPYPGYYFTGDGAARDHDGYYWIRGRVDDVVNVSGHRLSTAEIEAALIEDQKVGEAAVVGINDDITGQAVIAYVALKDSNTEQTEEDLLTLRKELVLIVRKSIGPFAAPKAVIVVADLPKTRSGKIMRRILRKISSNEADQLGDITTLQNPQSVEGIVKSFAAQYGKK

SEQ ID NO: 151068 - DNA, 2010 bp, Ajellomyces capsulatus NAm1
  CDS (1)..(2010)
atgtctgatggtccagttacgcctcccaaggcaccagtagttgtcgaagcccacgaggtggacactttccacgtgcccaaggctttccttgagaagcatactacaagaacccatatagcaaacctggatgagtatcagaagctctatgaagaatccatccgtgaccccgatactttttggtcacggctggcccgtgaactcatcacattcgaaaaggatttcgacaccacccgctacgggtcttttgcgggaggagacgttgcgtggttccttggtggacgtttgaacgcatcgtacaactgcgtcgaccgtcatgctctgaaggatccaaataaggtggctgtaatctacgaggctgatgaacccaatgaaggtcgcactattacatatggcgagcttctgaaggaggtctctcgactggcctgggtgctgaagcaggctggtgttcggaagggggataccgtggctatttacctgccaatgatccccgaagccgtaattgcgttcctggcatgcgttcgtattggtgcagtccactctgtcgttttcgctgggttctcatcagattccctccgcgaccgcgtcttggatgccaagtcaagaatcgtcattaccacggacgaggggaaacgaggtggaaaattaatcggaaccaagaagattgttgatgaagcccttagacaatgccctgacgtcacgaattgcattgtttacaagagaacaggcgctgatgtgccatggacaaagggcagagatttgtggtggcatgaagaggttgagaagtatcccaactacattgctcctgagtcaatggactctgaggaccctctcttcctactgtacacatccgggtcgactggaaagccaaagggtctgatgcacacgacagccggttatttggtcggtgcagccgctactggcaaatatgtgtttgatattcacaactcggaccgcttcttctgtggcggtgatgttggttggattaccggacacacctatgtcgtgtatgctcctctgcttcttggatgtgcaactgtggttttcgagagcacaccggcctatcctaacttctcccgttactgggatgttattgataaacaccaagtgacccagttctatgttgcgccaacagctttaaggcttctgaagcgtgctggaaatgactacatccaccacaagctcaagagccttcgtattttgggatctgttggcgagccaattgcagcggaggtgtggaaatggtatttcgagatcgttgggaaggaggaatgccatcttgttgacacctactggcaaactgagactggttctcacgttatcacccctttgggcggcattacaccaacaaagcccggcagtgcttcgcttcccttcttcggcattgagcctgccatcattgacccggtatctggagaggagatcaaaggcaatgacgttgaaggcgttctagcgattaaacaaccatggccaagcatggcgcgcacagtctggggtgcccacaagagatatatggacacttatttcaacatctacaaagacttctactttaccggcgatggtgctggacgtgaccatgacggatactactggatccgaggtcgtgttgacgacgttgtcaacgtttccggccaccgtctgtcaactgcagaaattgaagctgctcttattgaacactctgctgtggctgaagccgctgtcgttggtattgccgacgaactcaccgggcaggcggtcaatgcgtttgtcgccttgaagaccacgagtgacaatatcgaacaactccgcaaggatctcatcatgcaggttcgcaagtcaattgggccgtttgccgctcccaaggctgtattcatcgtcgatgacctgcccaagactcgcagtggtaaaatcatgcgaagaatcttgagaaagattcttagcggcgaggaggatagcttgggtgatatctcgactctctctgatccgagtgttgttgcgaaaatcatcgaggtttaccacgcttcaaagaagtag

SEQ ID NO: 151069 - protein, 669 aa, Ajellomyces capsulatus NAm1
MSDGPVTPPKAPVVVEAHEVDTFHVPKAFLEKHTTRTHIANLDEYQKLYEESIRDPDTFWSRLARELITFEKDFDTTRYGSFAGGDVAWFLGGRLNASYNCVDRHALKDPNKVAVIYEADEPNEGRTITYGELLKEVSRLAWVLKQAGVRKGDTVAIYLPMIPEAVIAFLACVRIGAVHSVVFAGFSSDSLRDRVLDAKSRIVITTDEGKRGGKLIGTKKIVDEALRQCPDVTNCIVYKRTGADVPWTKGRDLWWHEEVEKYPNYIAPESMDSEDPLFLLYTSGSTGKPKGLMHTTAGYLVGAAATGKYVFDIHNSDRFFCGGDVGWITGHTYVVYAPLLLGCATVVFESTPAYPNFSRYWDVIDKHQVTQFYVAPTALRLLKRAGNDYIHHKLKSLRILGSVGEPIAAEVWKWYFEIVGKEECHLVDTYWQTETGSHVITPLGGITPTKPGSASLPFFGIEPAIIDPVSGEEIKGNDVEGVLAIKQPWPSMARTVWGAHKRYMDTYFNIYKDFYFTGDGAGRDHDGYYWIRGRVDDVVNVSGHRLSTAEIEAALIEHSAVAEAAVVGIADELTGQAVNAFVALKTTSDNIEQLRKDLIMQVRKSIGPFAAPKAVFIVDDLPKTRSGKIMRRILRKILSGEEDSLGDISTLSDPSVVAKIIEVYHASKK

SEQ ID NO: 151070 - DNA, 1956 bp, Botryotinia fuckeliana B05.10
  CDS (1)..(1956)
atgtctgaaggaaaggtaaagccatctactcccgtagtagcagaagctcatgatgtcgatacattccgactcgacgaatacaagaaactctacaatgaatcaatcaaagagcccaacaagttttggggaagaatggcccgtgaacttcttacctggcaaaaagatttcgagactgtacacagcggatcgtttgtgggcggtgacaatgcctggttcttggagggtcaattaaatgcttcattcaattgtgttgatcgccatgcgatcaagaacccagacaagccagctatcatttacgaagccgatgaagctagcgatggtcgcactctcacatatagcgaacttctgcgagaagtttgcaaaaccgcatatgttctcaaacaaatgggtgttaagaagggggacactgttgcgatttatctgcctatgattccagaagctgttattgctttcttggcttgttcgcgtattggtgcagttcactctgtagtctttgccggtttctcatccgattcccttcgagacagagttattgatgctcagtcgaaagttgtgattacgtcggatgagggcaagcgtggtggaaaactcattggcacaaagaagattgtggatgatgcgctgaaacaatgtcccgatgtcacgcactgtttggtttacagacgtaccggtgccgacgttccaatgaccgaaggacgtgattggtggtggcatgaggaggtcgagaaatggccatcttacattgctccagagccaatgaactccgaggatccattgttcttactttatacctctggatcaactggaaaaccaaagggtgttatgcactcaaccgctggttatcttttaggtgcggcagctactggaaagtatgtattcgatattcacgactcagataaattcttctgtggcggtgatgttggatggattactggtcatacatatgtagtttatgcccctcttcttcttggtgttgcaactgttgtgttcgaaggaactccagcatatccaaatttctccagatattgggatgttattgagaagcacgaggtcacacaattctatgttgcgcctacagcgctcagattattgaagcgtgccggtgatcaacatgtcaaggcacaaatgaagcacttgagagtattgggatcagttggtgaaccaattgctgccgaggtctggaaatggtatttcgagattgttggaaaggaagaagctcacgttgttgacacctactggcaaactgagaccggttccaatgtcattactcctctcgcaggtgttacccctaccaagcctggtagtgcatcacttccattttttggtatcgagcctgcgattatcgaccctgtctccggagaagaaattcacggaaatgatgtcgagggtgtattggctttcaagcaaccatggcccagtatggctcgtaccgtttggggagcacacaagagatatatggatacatatttgaacgtctacaaggggtactacttcactggtgatggagcaggacgtgatcacgaaggttactactggatccgaggccgtgttgacgacgttgtcaacgtcagcggtcatcgtctctctaccgccgaaattgaagctgctttgattgagcatcatgctgttgccgaagctgcagtcgttggtatcaacgatgagcttactggacaagcagtcaatgctttcgtcgctattaaggacggtaatgaggttaacgattcactgaagaaggatctcatcttacaagtccgaaagagtatcggtccattcgcagctccaaaggcagtatttgttgttccagatttgccaaagactagaagtggtaagattatgcgcagaattttgagaaagattctagcgggtgaagaagatcagttgggtgacatttctacgctctccgatccaagtgtagtcgagaaaatcatcaatatagttcacagcgcaagaaagtag

SEQ ID NO: 151071 - protein, 651 aa, Botryotinia fuckeliana B05.10
MSEGKVKPSTPVVAEAHDVDTFRLDEYKKLYNESIKEPNKFWGRMARELLTWQKDFETVHSGSFVGGDNAWFLEGQLNASFNCVDRHAIKNPDKPAIIYEADEASDGRTLTYSELLREVCKTAYVLKQMGVKKGDTVAIYLPMIPEAVIAFLACSRIGAVHSVVFAGFSSDSLRDRVIDAQSKVVITSDEGKRGGKLIGTKKIVDDALKQCPDVTHCLVYRRTGADVPMTEGRDWWWHEEVEKWPSYIAPEPMNSEDPLFLLYTSGSTGKPKGVMHSTAGYLLGAAATGKYVFDIHDSDKFFCGGDVGWITGHTYVVYAPLLLGVATVVFEGTPAYPNFSRYWDVIEKHEVTQFYVAPTALRLLKRAGDQHVKAQMKHLRVLGSVGEPIAAEVWKWYFEIVGKEEAHVVDTYWQTETGSNVITPLAGVTPTKPGSASLPFFGIEPAIIDPVSGEEIHGNDVEGVLAFKQPWPSMARTVWGAHKRYMDTYLNVYKGYYFTGDGAGRDHEGYYWIRGRVDDVVNVSGHRLSTAEIEAALIEHHAVAEAAVVGINDELTGQAVNAFVAIKDGNEVNDSLKKDLILQVRKSIGPFAAPKAVFVVPDLPKTRSGKIMRRILRKILAGEEDQLGDISTLSDPSVVEKIINIVHSARK

SEQ ID NO: 151072 - DNA, 2010 bp, Sclerotinia sclerotiorum 1980 UF-70
  CDS (1)..(2010)
atgtctgaaggaaaagtaaaaccatctactccagtagtagcagaagctcatgatgtcgacactttccatcctccgcaaaagatgtttgccaagcatccaagcaaacctcacttaagtggactcgatgaatacaagaaactctacgatgaatcgatcaaggagcccaacaagttctggggaagaatggcccgtgagcttttaacctggcaaaaggattttgagaccgttcacagtggatcgttagcaggcggcgacaatgcttggttcctagagggtcaattaaatgcttcttacaattgtgttgatcgtcatgcaattaagaatccagacaaaccagccatcatctacgaagccgacgagactaccgatggtcgtactcttacatacgcggaactccttcgagaagtctgcagaacagcatatgttctcaaacaaatgggtgtcaagaagggagatactgttgcgatatacttgcccatgattccagaagctgttattgcgttcttggcttgttcgcgtattggtgcagttcactctgttgtctttgctggtttctcctccgattccctcagagacagagttattgatgctcaatcgaaagttgttattacctcggatgagggtaagcgtggtggaaaattgatcggcacaaagaagattgtggatgatgcgctgaaacaatgtcctgatgtcacacactgcttggtttacagacgtaccggtgccgatgttccaatgaccaagggtcgtgattggtggtggcatgaggaggtcgagaaatggccatcttatattgctccagagccaatgaattcggaggatccattattcttactctacacctctggatcaactggcaaaccaaagggtgttatgcactcaaccgccggttatcttctaggtgccgcagctaccggaaaatatgtattcgatattcacgactcggataaatttttctgtggtggtgatgtcggatggattacaggtcacacctatgttgtttacgctcctcttcttttgggtgttgcaacagtagtattcgaaggaacgccagcatacccaaatttctccagatattgggatgtcattgagaagcacgaggttacacaattctatgttgcgcctactgcacttagattactgaagcgtgccggtgatgaacatgtcaaggcacaaatgaaacatttgagagtattgggatcagttggtgagccaattgctgccgaggtttggaagtggtattttgagactgttggaaaggaggaagctcaagttgttgatacttactggcaaaccgagactggttcccatgtcattgcccctctcgcaggtgttacccctacaaagcccggtagcgcatctcttccattttttggtattgagcctgcgattatcgatcctgtctccggagaagaaattcacggaaatgatgtagagggtgtattagcattcaaacaaccatggcccagtatggctcgtactgtttggggtgcacacaagagatatatggacacatatttgaatgtttacaagggatactacttcactggtgatggagcaggacgtgatcacgaaggttactactggatccgaggtcgtgttgatgatgttgtcaatgtcagcggtcatcgtctctctactgctgaaatcgaagccgctctgattgagcaccatgctgtcgccgaagccgcagttgttggtattaacgatgagctcaccggacaagcagtcaatgctttcgttgccctgaaggatggtaacgagatcagcgatgcattaaagaaagatcttatcttacaagtccgaaagagtattggtccatttgctgcaccaaaagcaatctttgttgttccagatttgccaaagactagaagtggtaagattatgcgtcgaattttgagaaagattctggcgggtgaagaggatcaattgggtgatatttccacgctctctgatccaagtgtagtcgagaagatcattaatacagtacacgacgcaagaaagaattaa

SEQ ID NO: 151073 - protein, 669 aa, Sclerotinia sclerotiorum 1980 UF-70
MSEGKVKPSTPVVAEAHDVDTFHPPQKMFAKHPSKPHLSGLDEYKKLYDESIKEPNKFWGRMARELLTWQKDFETVHSGSLAGGDNAWFLEGQLNASYNCVDRHAIKNPDKPAIIYEADETTDGRTLTYAELLREVCRTAYVLKQMGVKKGDTVAIYLPMIPEAVIAFLACSRIGAVHSVVFAGFSSDSLRDRVIDAQSKVVITSDEGKRGGKLIGTKKIVDDALKQCPDVTHCLVYRRTGADVPMTKGRDWWWHEEVEKWPSYIAPEPMNSEDPLFLLYTSGSTGKPKGVMHSTAGYLLGAAATGKYVFDIHDSDKFFCGGDVGWITGHTYVVYAPLLLGVATVVFEGTPAYPNFSRYWDVIEKHEVTQFYVAPTALRLLKRAGDEHVKAQMKHLRVLGSVGEPIAAEVWKWYFETVGKEEAQVVDTYWQTETGSHVIAPLAGVTPTKPGSASLPFFGIEPAIIDPVSGEEIHGNDVEGVLAFKQPWPSMARTVWGAHKRYMDTYLNVYKGYYFTGDGAGRDHEGYYWIRGRVDDVVNVSGHRLSTAEIEAALIEHHAVAEAAVVGINDELTGQAVNAFVALKDGNEISDALKKDLILQVRKSIGPFAAPKAIFVVPDLPKTRSGKIMRRILRKILAGEEDQLGDISTLSDPSVVEKIINTVHDARKN

SEQ ID NO: 151074 - DNA, 2046 bp, Nasonia vitripennis; identical to SEQ ID NO: 121966
  CDS (1)..(2046)

SEQ ID NO: 151075 - protein, 681 aa, Nasonia vitripennis; identical to SEQ ID NO: 121967

SEQ ID NO: 151076 - DNA, 1806 bp, Nematostella vectensis
  CDS (1)..(1806)
atggattgcgatatgaacgaggggcaacatcgctggtttgttggaggggagatcaacgtttcagagaattgtgttgatcaccacatgaggtctcaccctaatcgcactgcactgatctgggaaaaggatgagccaggggatgtggagcatgtctcctatatccagctgtatggcatggttaaccgaatggctaacatgttgaagtgccatggagtgaaaaagggtgacattgtgtgtctgtacatgccagtatcgccgcttgctgttgccgccatgcttgcatgtgcacggattggtgcacctcacagtgttgtgtttgcaggatttagtgctgatgccttagccagcaggattaatgacgcacaagcggagacagtaattacagcaaaccaggctgtccgtggtgggcgggcgatagacctcaagcgtgtggttgatgatgctgtgtccaaaagcccaggagtcaagcgtgtgtttgtaatgaagcgaacaggtgctcaagtgccaatgggcaagctggacattcctctggaagaagccatggctgaacagccagatgagtgcccgccagaaccaatggatagcgaggaccctctctttctactctacacatcaggcagcacaggccaacccaaagggatcgtacacacgcaggcagggtacctactttatgcaaaactcacccataagtactgcttcgactacaagcaaggcgatgtgttcggctgcgttgctgacatcggttggatcacagggcactcatacgttgtgtatggaccactggctaatggggccaccacagtcctgttcgagagcacccctacatatccggacccgggacgttattgggaaatggtcgagcggctacgcatcaatcagttctatggagctcccaccgcgatacggttactactgaagtctggaaactcatgggttgaaaagtatgatcgatcatctctgaaggtgttaggcactgttggcgagcctataaacgaggaagcctggcactggtacaatgacgtcgttggcgaaaagcgctgtactgttgtggacacgtggtggcaaacagagactggcggcatcctgatctcacctcgacctgccccggacaacagtccagttaaaccggaattccccatgaggcctttttttggtgtggacccggttttggtggacgaaaagggtaaagaacttaccggaaataacgtgacaggagccctgtgtttccggtcttctgtacccggcatgtgtcgaactatctacggccaccacgagcgcttcctcaacacttactaccgtccctaccccggttactactttaccggtgacggggctcttcgagataaagatggtcactacagaatcacgggaaggatggatgacgtcgtcaatgttagcggcaagagactgggcacggcggaagtggaggatgccatggataatcacagtgcagtggcagagacggcggttgtcggcttcccgcatcccatcaagggagaaggtatctatgcttatgccactttgaaggacgacgcacagatcgagcctgagcagttcagagaagaagtaaaaaaactcgttcgacaaaaaatcggcgcctttgctgtccccgaaatcatacaggtcgtaccaggacttcccaagacgaggtctggtaaaatcatgcgtcgcattttgcgtaaggtggctcaggacaagccagacgagttaggggacgtgtcgacactagccgacccctcggtggtggaggtcatagtgcgacaacatacagaggtgatggatagaatcaaaagcaaggtcaagtag

SEQ ID NO: 151077 - protein, 601 aa, Nematostella vectensis
MDCDMNEGQHRWFVGGEINVSENCVDHHMRSHPNRTALIWEKDEPGDVEHVSYIQLYGMVNRMANMLKCHGVKKGDIVCLYMPVSPLAVAAMLACARIGAPHSVVFAGFSADALASRINDAQAETVITANQAVRGGRAIDLKRVVDDAVSKSPGVKRVFVMKRTGAQVPMGKLDIPLEEAMAEQPDECPPEPMDSEDPLFLLYTSGSTGQPKGIVHTQAGYLLYAKLTHKYCFDYKQGDVFGCVADIGWITGHSYVVYGPLANGATTVLFESTPTYPDPGRYWEMVERLRINQFYGAPTAIRLLLKSGNSWVEKYDRSSLKVLGTVGEPINEEAWHWYNDVVGEKRCTVVDTWWQTETGGILISPRPAPDNSPVKPEFPMRPFFGVDPVLVDEKGKELTGNNVTGALCFRSSVPGMCRTIYGHHERFLNTYYRPYPGYYFTGDGALRDKDGHYRITGRMDDVVNVSGKRLGTAEVEDAMDNHSAVAETAVVGFPHPIKGEGIYAYATLKDDAQIEPEQFREEVKKLVRQKIGAFAVPEIIQVVPGLPKTRSGKIMRRILRKVAQDKPDELGDVSTLADPSVVEVIVRQHTEVMDRIKSKVK

SEQ ID NO: 151078 - DNA, 2073 bp, Nematostella vectensis
  CDS (1)..(2073)
atggcggctgcttctgaacacgagcgggaactagagggctggtacaaccctcccaaagaaatccaagatgaggcacatatcgcctcaatggatgcatacaaagctaggtacaagcaatccattgaagatcccgctggcttttggggagaagtcgcaagcgattttttctggaaggtcccgccaaaatccgaccactttctgaaatacaactttgacttggataacggaagtgtggatatcaaatggatgcaaggggccaagacgaatatttgctacaatgtcttggatagaaatgtgcatgataaaggtttaggtgatactgtggctttttattgggaggggaatgtaccaggggataccaagcagatcacctatggagagttactgaagcaagtctgcaaatttgctaatgtcttagagtcaaaaggtgttaagaaaggtgatcgcgtcgctatctacatgcccatgatcatggagcttgttattgcgatgcttgcctgcgcgcgcctgggtgctgttcactctattgtgtttggtgggttctctgcagaatctctagcggagcgtatactagattcaacatgtaaaattctcatcacagcagatgcgtcatatagaggtttgaagatgattaacctcaaagagattgcagatcatgctattattaagtgcagggaaaggtcattcaatgtagaggcatgtattgttgttcgtcatcttgggccagataagagagtaccaacagatccatccagctctccacccccaaagagaccttgccaccagctccagacatcatttgacagctccattgactgctggtggcatgaggttatggcggaggcaagtgatgagcatgatacagtgtgggtagatgccgaagatccactgttcatgctttatacaagtggatctactggtaaacctaaaggtgttctacacacccatggtggctacatgctttatactgccttgacattcagatactcatttgattaccaccctggagaggtgtactggtgcactgccgacattggctggatcacagggcatagctatataacttatggaccgatggctaacggcgccattagtgtattgtttgaaggcaccccgttttatccggattgtggacgcttctgggatattgtagataaatacaaggtctctaaattctacacagctccaactgctattagatccttaatgaaatttggcaaggaaattgtcaccagccacaacctggaatccctgaaagttctcggtactgttggagagccaatcaacccagaagcgtggctttggtactatcatgttgtcggccataacaagtgtgcgattgtagatacttactggcaaaccgaaacgggaggtcacgtaatcactcccttgcctggagcaactcgtacccgccccggagcagcgaccttcccgttttttggtgtcgagcccgctatcgttgacgagaaaggcaatgagcttgagggtccctgtgaggggttcctggtaatcaagcgaccatggccagggatggcacgtaccatctacggcaaccacaagcgatttgagaacgtctactttgacaagttccgcggttactacaccacgggtgatggttgcaaacgagacgagaatggttattactgggtgacgggcagaacggacgactgtatgaatgtcagcggtcacttgttgtctactgcgcagatcgagagcgcattggtggagcatgacgccgtcagcgaggccgcagtggtttcctgtccgcacaaggagaaaggtgaagggatctactgtttcgcgaccttaatggagaatgtcgagctggacgaaaagctgatcagggaactcaaacaaaaagttcgtctgaagatcggtccgttcgcctcgccagatgtcattcaaagcgcgcccgccttgccgaagacacgctcgggcaagatcatgagacgagtacttcgccaagtagcgaaaaacgaccgccaaacgggcgacctctccaccatctacgacccggccgtggtggatagtctgttcgaggccaggccgcacgtcccttttttacctgattaa

SEQ ID NO: 151079 - protein, 690 aa, Nematostella vectensis
MAAASEHERELEGWYNPPKEIQDEAHIASMDAYKARYKQSIEDPAGFWGEVASDFFWKVPPKSDHFLKYNFDLDNGSVDIKWMQGAKTNICYNVLDRNVHDKGLGDTVAFYWEGNVPGDTKQITYGELLKQVCKFANVLESKGVKKGDRVAIYMPMIMELVIAMLACARLGAVHSIVFGGFSAESLAERILDSTCKILITADASYRGLKMINLKEIADHAIIKCRERSFNVEACIVVRHLGPDKRVPTDPSSSPPPKRPCHQLQTSFDSSIDCWWHEVMAEASDEHDTVWVDAEDPLFMLYTSGSTGKPKGVLHTHGGYMLYTALTFRYSFDYHPGEVYWCTADIGWITGHSYITYGPMANGAISVLFEGTPFYPDCGRFWDIVDKYKVSKFYTAPTAIRSLMKFGKEIVTSHNLESLKVLGTVGEPINPEAWLWYYHVVGHNKCAIVDTYWQTETGGHVITPLPGATRTRPGAATFPFFGVEPAIVDEKGNELEGPCEGFLVIKRPWPGMARTIYGNHKRFENVYFDKFRGYYTTGDGCKRDENGYYWVTGRTDDCMNVSGHLLSTAQIESALVEHDAVSEAAVVSCPHKEKGEGIYCFATLMENVELDEKLIRELKQKVRLKIGPFASPDVIQSAPALPKTRSGKIMRRVLRQVAKNDRQTGDLSTIYDPAVVDSLFEARPHVPFLPD

SEQ ID NO: 151080 - DNA, 2055 bp, Vanderwaltozyma polyspora DSM 70294
  CDS (1)..(2055)
atgactacaaaagaacatactgtagtccacgaggctcataacgtcaatgctcgtcaagctccagaacatttctataaatctcaacctggtaaaggttacattaccagtatggatcaatattacaaaatgtataacgaatccattaataacccagatgcttttttctctaaaatggctaaagaatacctacattgggacagacctttcaccaaggttcaaactggttcaattgaaaaaggtgattctgcttggttcttaaatggtgaattgaatgctgcttataactgtgttgatagacatgctttcgaaaaccctgataaaaccgccattatctatgaagctgatgacgaaaaggaaaacagaatcattacctttggtgaattgttaaaacaagtctctgaagttgctggtgtattacaaagttggggtgtcaagaaaggtgatacagtcgctgtctacttgccaatgatcccagaagctgtcgtcgctatgttagctgtcgccagattgggtgctatacatactgtcgtttttgctggtttctctgccggttcactaaaggatcgtgtagttgacgctggttgtaaagttgtcatcacttgtgatgaaggtaagagaggtggtaaaactgtcaacactaagaaaatcgtcgatgaaggtttgaacggtgtcgattcagtttctcgtattttggttttccaaagaactggtactgaaggtatcccaatgagagctggcagagatttctggtggcatgaagaaaccaagaaacaaagaggttacttaccacctgtttcttgtaactctgaagatccattgttcttgttatacacttctggttctactggtgctccaaagggtattgttcacaccactggtggttacttgttaggtgccgctttaacaactagatatgttttcgatattcatcctgaagatgttctatttactgctggtgacgtcggttggattaccggtcacacttacgctttatacggtccattagctttaggtaccgctacaattatttttgaatcaactccagcttatccagactacggtagatactggagaattatcgaacgtcacagagccactcacttctacgttgctccaacggctttaagattaatcaaacgtgttggtgaagccgaaattccaaaatatgacacttcttccttacgcgtgttaggttctgtcggtgaaccaatcgctccagatttatgggaatggtaccacgacaagattggtaacaagaactgtgttatttgtgacactatgtggcaaactgaatctggttctcatttaattgccccattagccggtgctgttccaaccaaaccaggttcagctactgtcccattcttcggtgtcaatgcctgtattatcgacccagtcagcggtgttgaattagaaggcaatgatgttgaaggtgttttggctgttaagtctgcttggccatcaatggctagatccgtatgggacaaccatgacagatacattgatacctacttgaagccatacccaggttactatttcacaggtgacggtgctggtagagatcacgatggttactactggatcagaggtagagttgatgatgttgttaatgtttctggtcacagattgtctacagccgaaatcgaaacttctctagttgctaatgataatgtttctgaatctgccgtcgttggtattcatgatgatttaactggtcaagcagttgtcgcattcgtttctttgaagaactctgattatatacaagaaaatgccactgaaggtgatgctaaccatgtcaccccagatgccttacgtcgtgaattagtcttacatgtaagatctgaaattggtccatttgccgctccaaagactgttatcttagtcagagatttaccaaagaccagatctggtaagatcatgagaagaatcttaagaaaggttgcctctaacgaagctgatcaattaggtgatttaagtactattgctaatgcagaaattgtaccatctattatctctgctgtcgaaacccaatttttcaacgctaagaagaaataa

SEQ ID NO: 151081 - protein, 684 aa, Vanderwaltozyma polyspora DSM 70294
MTTKEHTVVHEAHNVNARQAPEHFYKSQPGKGYITSMDQYYKMYNESINNPDAFFSKMAKEYLHWDRPFTKVQTGSIEKGDSAWFLNGELNAAYNCVDRHAFENPDKTAIIYEADDEKENRIITFGELLKQVSEVAGVLQSWGVKKGDTVAVYLPMIPEAVVAMLAVARLGAIHTVVFAGFSAGSLKDRVVDAGCKVVITCDEGKRGGKTVNTKKIVDEGLNGVDSVSRILVFQRTGTEGIPMRAGRDFWWHEETKKQRGYLPPVSCNSEDPLFLLYTSGSTGAPKGIVHTTGGYLLGAALTTRYVFDIHPEDVLFTAGDVGWITGHTYALYGPLALGTATIIFESTPAYPDYGRYWRIIERHRATHFYVAPTALRLIKRVGEAEIPKYDTSSLRVLGSVGEPIAPDLWEWYHDKIGNKNCVICDTMWQTESGSHLIAPLAGAVPTKPGSATVPFFGVNACIIDPVSGVELEGNDVEGVLAVKSAWPSMARSVWDNHDRYIDTYLKPYPGYYFTGDGAGRDHDGYYWIRGRVDDVVNVSGHRLSTAEIETSLVANDNVSESAVVGIHDDLTGQAVVAFVSLKNSDYIQENATEGDANHVTPDALRRELVLHVRSEIGPFAAPKTVILVRDLPKTRSGKIMRRILRKVASNEADQLGDLSTIANAEIVPSIISAVETQFFNAKKK

SEQ ID NO: 151082 - DNA, 2079 bp, Vanderwaltozyma polyspora DSM 70294
  CDS (1)..(2079)
atgaaagataataccaataacaataacaacaactccaataaaaaagattatgaatacgaacatttaactagcacccccatcgtcatacagaaaccaatcgatgatagattacaaccttccctacaacactcctacaagccttacttatcaggtttcgaacattataaacaacagtatcaattatctatagatgatccagaatccttcttcggtacccatgctcgtaaccatttggactggtccattcctttcaacaaggtattcatcccagatgagaacggtaaaccaaatttcgtcaacaacaattggtttgtcaatggtcaattgaacgcttcctataactgtgtagacagacacgctttatcccacccaaataaaattgccttgatttatgaaagcgatgaacctggtaaaggctactctttaacttataaccaactgttggttcaagtatctaaagtcgctcaagttttaacttactcaatggacgtcaaaaagggcgataacgtcgcagtttatatgccaatgatacctgaagctatcatcactttgttagcaattgcaagagtcggtgccgttcattcagtggtctttgcaggtttctcctcaaactctttacgtgatagaattaacgacgctaattgtaaagccgttataactacagatgaatctattagaggtggaaaaatcatcgaaaccaagaaaattgtagatgacgctttaaaggaaactccatgcgtctcaaatgtattggtttataaaagaacagaaaataaaaatgttaattacgtccaaggaagagatttagactgggacgccgaattgaaaaaatacaaaaattatttcccttgtactccagttgatagtgaacatccgttattcttgttatacacttcaggctctaccggagctccaaaaggtgtacaacattcaactgcaggttaccttttaggtgctgcattgacaaccaaatacacatttgatgtccacccagaagatatattcttcacagctggtgatatcggttggatcacaggtcatacttatgtagtttatggtcctctattaaatggctgtaccactgtcatttttgaaggtactcctacttatccaaattgttctcgttactgggatatcatcgacaaatacaaagtcactcaattctacgtcgcaccaactgccttgagattattgaaaagagctggcgattcatatattgatggctataatttatcttctttacgtgctttgggttcagtaggtgagcctattgctcctgaaatttgggaatggtactcagaaaaaataggtaagaatgacattcctatttgtgacacttattggcaaactgaatctggttctcatctaattacaacttttgctggtggagccactccaatgaaaccaggttcggcttcattcccattctttggtgtagaacctgttttactagatgcaaacacaggaaaagaaatcaccgatcaagaccactgtgaaggtgtattagcaattaaaagaccttggccatcttttgcaagaacaatttggaaaaaccatgacagatacacagacacttatttgaagccttatccaggttactattttacaggagatggtgcggctagagacaaagatgggtacatttggattttaggccgtatcgatgatgttgtcaatgtctctggtcatcgtttatctactgcagaaatagaatctgcaattatcgaggatgcaacagttgcagagtgtgctgccgtaggctttgctgatgatttgacaggtcaagctgttgctgcatttgtggttttgaaaaataaatctagttggtctactgcttcagaagaagaactacaagagattaaaaagcatttgatattaactgttagaaaagatattggtccttttgctgctcctaagttgattgtattggttgatgatttaccaaagacaaggtcaggtaagattatgagacgtatcttgagaaagatcttagctggtgaagctgatcaattaggtgatgtctcaactttgtcaaatccaggtattgtcaaacatttaatcgattctgttaagatatag

SEQ ID NO: 151083 - protein, 692 aa, Vanderwaltozyma polyspora DSM 70294
MKDNTNNNNNNSNKKDYEYEHLTSTPIVIQKPIDDRLQPSLQHSYKPYLSGFEHYKQQYQLSIDDPESFFGTHARNHLDWSIPFNKVFIPDENGKPNFVNNNWFVNGQLNASYNCVDRHALSHPNKIALIYESDEPGKGYSLTYNQLLVQVSKVAQVLTYSMDVKKGDNVAVYMPMIPEAIITLLAIARVGAVHSVVFAGFSSNSLRDRINDANCKAVITTDESIRGGKIIETKKIVDDALKETPCVSNVLVYKRTENKNVNYVQGRDLDWDAELKKYKNYFPCTPVDSEHPLFLLYTSGSTGAPKGVQHSTAGYLLGAALTTKYTFDVHPEDIFFTAGDIGWITGHTYVVYGPLLNGCTTVIFEGTPTYPNCSRYWDIIDKYKVTQFYVAPTALRLLKRAGDSYIDGYNLSSLRALGSVGEPIAPEIWEWYSEKIGKNDIPICDTYWQTESGSHLITTFAGGATPMKPGSASFPFFGVEPVLLDANTGKEITDQDHCEGVLAIKRPWPSFARTIWKNHDRYTDTYLKPYPGYYFTGDGAARDKDGYIWILGRIDDVVNVSGHRLSTAEIESAIIEDATVAECAAVGFADDLTGQAVAAFVVLKNKSSWSTASEEELQEIKKHLILTVRKDIGPFAAPKLIVLVDDLPKTRSGKIMRRILRKILAGEADQLGDVSTLSNPGIVKHLIDSVKI

SEQ ID NO: 151084 - DNA, 2007 bp, Aedes aegypti
  CDS (1)..(2007)
atgccctcggaaccaaaggttttcaacccgcaccccgatgtcgccgacaaggcgtacatcaatagcatggaacagtaccaggaattttatcggcagtccatcgaaaatccggggcagttctggagcaatgtagcgaagcagttccactgggagactccttatgatccgaagaacttcttctcgtacaacttcgatatctctaagggtccgatcttcgtgaagtggatggaaggcgcctcgaccaatatctgctacaacttgctggaccgaaatgttaaaaatggcctgggtgatactgtggcctattactgggaaggaaatcacccggatgactacagccgcctcacgtaccgcaagctgctcgaagaggtgtgccgttttgccaacgtcctgaaggctcatggcgtccagaagggcgatcgcgtgtcgatctacatgcccatgacgatggagctgccggttgcgatgttggcctgtgctcggatcggtgccgtgcactcgattgtgtttgcaggtttctcatcggattcgttagctgagcggatgcacgattgccaagcgaaggtgctaatcaccgccgatggagcctggcgtggggagaaaatccttcatctgaaggatttgtgcgatcaggcgctgatcaaggccgatgaaatgggacaccatgttgagacctgtatcgttgtggcgcacattaatcgagtaactcccggtaaacctgactgggatggagtgttcgatactccatggacggacgatcgcgattattggtggcatcaagaaatggaagatgctgaaccggcctgctatcccgagtggatggcagcggaggatccgctgttcatgttgtacaccagtggatcaacgggcaaaccgaagggcgttctgcacactacagccggatatctgatgtacgcggcgacgaccttcaaaattgtgttcgactacaagccccatgacgtgtactggtgcactgctgatattggttggatcaccggccatacctacgtgctgtatggaccgctggcaaacggcgccacgtcggtgatgttcgagggtactccgttctttccggataacgatcgctactgggaagtggtggacaagtacaaggttacgcagttctacacggcaccgacggcgatacgatcgctgatgaagtacggcgacgagcctgtgatgaaacatgatctttcttcgttgagggtactcggaagtgtcggtgaaccgatcaaccccgaagcgtggatgtggtactacaaagtagtaggcaaggagaagtgtgctattgtggatacgttctggcagacggaaactgggggacatgtgataactccgctaccaggagctactccaatgaagccaggatcagcttctttcccattcttcggagtaaaaccaaccctgctggacgaaagtggcaacgaaatcaagggcgaaggagaaggttatctggttttctcgcagccatggcccggaatgatgcgaacactgttcaacaaccacccacgatatgagtccacgtatttctccaagttcaatggcttttactgcactggagatggtgctcgacgagatgccgacggatactactggatcacaggccgcgtggacgacatgctcaacgtttccggccatctgatgtctaccgctgaagtggaatccgtactaaccgagcattctcgcgtatcggaagctgctgttgtgtcacgacctcaccccgttaaaggcgagtgcctgtactgtttcatcacccccaaccagaacgaagccttcgacaagacgcttatcaacgaattgaagatattggttagggaacgcattggcccatttgcccagccggacgtaatccagcatgctccaggactcccaaagacgcgatccggcaagatcatgcgacgtgtactgcgaaaagttgcgatcaacgatcgggaggtcggagacacttcaacccttgccgacgaagcgatcattgagcagctcttcgccaaccgaccggtagcttaa

SEQ ID NO: 151085 - protein, 668 aa, Aedes aegypti; identical to SEQ ID NO: 126816

SEQ ID NO: 151086 - DNA, 1995 bp, Chlamydomonas reinhardtii
  CDS (1)..(1995)
atgactggcgaccatggccacccggaggccgaagtgttcccaccccctgactctattgttgcgaaggcccacgttcgtgggctagcgcaatataaggaaatgtacgagcgcagcatcacggactccgacgatttttgggcggagcaagccgaagcccttcactggaacaagggatggagcgcgccgttgtgccagtccaacatcaacgtggagaacgggcctgtgcacatttcctggtttgttggcgccgagaccaacatggcctacaactgcctggatcgccacattgaggcggggcatggcgaccgtgtggcgatattttgggagggcaatgacgagggcgaggagcgcgtgctgacgtactcggagctgaagtccatggtttgccgcatcgccaactatctcaagtcgctaggggtgaagcgtggctcggacgtaaccatgtacatgagcctcgtgcccgaactgccggcagccatgctggcgtgcgcgcgcattggagcggtacactcggtggtgtttggtggcttcagtgcagaggcgctgtcgggccgaatcctggactcgcagcctaacgtggtcatcacgtccagtggcaccatgcgcggtcccaagcccattgggctgaaggccatcgtggacgacgcgctcgacatctgtgaaaagcacggccacaccgtgcagcacgtgctgatgctggagcagctgcccctggcggaggtcggcgggtcgatgaagcccggccgcgatgtgacttggcgggaggcggtggactcgcagtcggatgagtgccccgtcgagtggctgccagctgaagcgcctctgttcaagctctacacttccgggtccacaggcaagcccaagggagtcctgcacaccacggctggctacatgctgggggcgttggtgaccaccaagtacgtgttcgacgtccagcccgccacggatgtgtactggtgcacggccgactgcggctggatcacaggtcacacgtacgttgcatatgggccgctgctgctgggcgccacccaggtgctgttcgagggcgtccccacctggcccgacgccggccgctgctggtccatcgtggataagtacaaggttaccattgtgtacactgcgccgacggccatccgcgccctccacgccaagggtgacgcgtacgtcacccggtactcgcgggcatcgctgcggctgctgggctccgtgggcgagccgatcaaccccgaggcctggcgctggtaccaccaagtggtgggcgacggcaggtgccctattatggacacctggtggcagacggagacaggcggtcacatgatcacgccgctaccgggcgccacgccgcttaaacccggcagtgccacgctgcccttcttcggcgtggagccggtggtgctggacgagaagggcaacgagttgcagggcccctgcgagggggtcctgtgcatcaagaagccatggccgtccatgatgcgcaccgtggctggagaccacgcccggttcgagcagacctacttctccgcgtacaagggctactacttcacaggagacggctgccggcgcgacgcagatggatactactggattacggggcgggtggacgacgttctcaacgtgagcggccaccgcatcggcactgccgaggtggaaagtgcgctggtggagcatccgtcgtgcgtggaggcagcggtggtgggcgttgagcacccgatcaaggggcagagcatctacgcctttgtgacactaatgaccggcgtggaacccggtgacgctcttcgcaaggagttgatctccactgtacgcaagatcattggtcccttcgccgcgccggatgttatccattgggctccggggctgcccaagacgcgcagcggcaagatcatgcggcgcgtgctgcgcaagatcgccgccaaggaggaggaccagctgggcgacaccagcacactggcggaccccagcgtggtgcaggtgctggtggagctgcgcggcaagtga

SEQ ID NO: 151087 - protein, 664 aa, Chlamydomonas reinhardtii
MTGDHGHPEAEVFPPPDSIVAKAHVRGLAQYKEMYERSITDSDDFWAEQAEALHWNKGWSAPLCQSNINVENGPVHISWFVGAETNMAYNCLDRHIEAGHGDRVAIFWEGNDEGEERVLTYSELKSMVCRIANYLKSLGVKRGSDVTMYMSLVPELPAAMLACARIGAVHSVVFGGFSAEALSGRILDSQPNVVITSSGTMRGPKPIGLKAIVDDALDICEKHGHTVQHVLMLEQLPLAEVGGSMKPGRDVTWREAVDSQSDECPVEWLPAEAPLFKLYTSGSTGKPKGVLHTTAGYMLGALVTTKYVFDVQPATDVYWCTADCGWITGHTYVAYGPLLLGATQVLFEGVPTWPDAGRCWSIVDKYKVTIVYTAPTAIRALHAKGDAYVTRYSRASLRLLGSVGEPINPEAWRWYHQVVGDGRCPIMDTWWQTETGGHMITPLPGATPLKPGSATLPFFGVEPVVLDEKGNELQGPCEGVLCIKKPWPSMMRTVAGDHARFEQTYFSAYKGYYFTGDGCRRDADGYYWITGRVDDVLNVSGHRIGTAEVESALVEHPSCVEAAVVGVEHPIKGQSIYAFVTLMTGVEPGDALRKELISTVRKIIGPFAAPDVIHWAPGLPKTRSGKIMRRVLRKIAAKEEDQLGDTSTLADPSVVQVLVELRGK

SEQ ID NO: 151088 - DNA, 2100 bp, Chlamydomonas reinhardtii
  CDS (1)..(2100)
atgcaaacaaagtctttcagccctcaacagcagcagcggcgtggggtgtgcggtaacgcccacgcccctcgcctgtcgcttcgccatgcaccgcggagctctcggtgcgcgccctgccgcgttgccgcgcccgaggcgcccacgactgtcagcgcgtcgacgctgaacacgagctttgtgcaggacaagcaacagtacgaggccctctacaagcgctccattgaggacccggccggcttctgggccgagatcgccgagcagttccactgggagaccaagtgggagcgcgaccacatgcgctacaacttcgacgtgcgggccggccccatctctgtggagtggttccgcggcgccaccaccaacatcgcctacaactgcctggacaggcacgtgcttgctggccgcggcgaccagacgtgcttcatctgggagggcaacgacgtgggccgcgagaagagcatgacgtacgccgaggcgctggacgaggtctgcaagctggccaactggctgcgggctgcgggcgtgaagaagggcgacgcggtggctgtgtacatgcccatgctgctggagctgccgctggccatgctggcctgcgcgcgcatcggcgccgtgcactcggtggtgtttggcggcttcagcgcggagagcctggcgcagcgcatggaggactgcaaggccaaggtgctgctgacggcctcgggcgtgatgcgcggccccaagtccatcgacctgaagaagattgcggacaaggcatgcaagctgagcgccgaggccggacacacggtggagcacgtgctggtgtacgagaacgacaacgccgtgcccgccgccgactgccccttcacgcccggccgcgaccgctggtggcagtcggaggtggcggcgcagcccaccacctgcgcgccggagtgggtggaggcggagcacccgctgttcctgctgtacacctcggggtccacgggcaagcccaagggcgtgctgcacagcacgggcggctacatggtgtacgccgccaccaccatgcggcacgtgttcgggctgcagcagggcgacgtgtactggtgcacagccgactgcggctggatcaccggccactcctacctggcgtacggccccctgctcaacggcaccacacagattgtgtttgagggcgtgcccacgcaccccacgcccgcccgctgctgggaggtggtggcggcgcacggcgtgacgcagttctacacggcgcccaccgccatccgctcgctcatgtcgtttggcgaccagtgggtgtcgcagtgcgacaccagcagcctcaagctgctgggctccgtgggcgagcccatcaaccccgaggcctggcgctggtaccacgaggtggtgggcaagggcaagtgccccatcgtggacacctggtggcagacggagacgggcggacacatgatcacgccgctgccgggcgcctggcccgagaagcccggcagcgccacgctgcccttcttcggcgtgcggccagtggtgctggacgagaagggcaacgagttgcagggcgaggcggagggcatcctggccatctcccagccctggccctccacgttgcgcaccgtgtacggcgaccacgagcgctaccagtccaactacttcggccccttccccggctactacttcaccggcgacggctgccggcgcgacgcggacggctactactggatcacgggccgggtggacgacgtgatcaacgtgagcgggcaccgcatcggcacggcggaggtggagagcgcgctggtggcgcaccccgcctgcgcggaggcggcggtggtgggctacgaccaccccatcaaggggcagggcatctacgcctacgtcaccctcatggctggcgtcgaggcgaccaaggagctgaagaaggagcttgtgggcagcgtgcgctccatcatcggcgccttcgccgcgcccgacgtcatccactgggctccggggctgcccaagacgcgcagcggcaagatcatgcggcgcgtgctgcgcaagatcgcgagcaaggaggaggaccagctgggcgacaccagcacactggcggacccgggcgtggtggccacactggtggagctgcgcggcaagtag

SEQ ID NO: 151089 - protein, 699 aa, Chlamydomonas reinhardtii
MQTKSFSPQQQQRRGVCGNAHAPRLSLRHAPRSSRCAPCRVAAPEAPTTVSASTLNTSFVQDKQQYEALYKRSIEDPAGFWAEIAEQFHWETKWERDHMRYNFDVRAGPISVEWFRGATTNIAYNCLDRHVLAGRGDQTCFIWEGNDVGREKSMTYAEALDEVCKLANWLRAAGVKKGDAVAVYMPMLLELPLAMLACARIGAVHSVVFGGFSAESLAQRMEDCKAKVLLTASGVMRGPKSIDLKKIADKACKLSAEAGHTVEHVLVYENDNAVPAADCPFTPGRDRWWQSEVAAQPTTCAPEWVEAEHPLFLLYTSGSTGKPKGVLHSTGGYMVYAATTMRHVFGLQQGDVYWCTADCGWITGHSYLAYGPLLNGTTQIVFEGVPTHPTPARCWEVVAAHGVTQFYTAPTAIRSLMSFGDQWVSQCDTSSLKLLGSVGEPINPEAWRWYHEVVGKGKCPIVDTWWQTETGGHMITPLPGAWPEKPGSATLPFFGVRPVVLDEKGNELQGEAEGILAISQPWPSTLRTVYGDHERYQSNYFGPFPGYYFTGDGCRRDADGYYWITGRVDDVINVSGHRIGTAEVESALVAHPACAEAAVVGYDHPIKGQGIYAYVTLMAGVEATKELKKELVGSVRSIIGAFAAPDVIHWAPGLPKTRSGKIMRRVLRKIASKEEDQLGDTSTLADPGVVATLVELRGK

SEQ ID NO: 151090 - DNA, 2004 bp, Chlamydomonas reinhardtii
  CDS (1)..(2004)
atgcagcgcctcgaggtgcttgcccggcagctgactgccggcgcagcagtggaggaccgcacgccgctgctcgcaaccaagaacgactatgacaccatgtacaagcgcagtattcaggaccccgagggcttctggggcgaaatggcgcttggctaccactgggaccgcaagtttcccgcgcgcggccacatggctgccaacacggacatacggcgcggccccgtgtccatccagttcttcgcgggcggcaccaccaacatgtcgtacaactgcctagaccgctgggtggcggcggggcgcggcgagcaggcggcactcatctgggagggcaacgacgagaacgagcgccgcaccgtcagttaccgggagctgctggccgaggtcaacaggctgtccaactggctcaagtcgcgcggcgtcaagaagggcgatgccgtgaccatctacctgcccatggtccccgagctccccgccgccatgctggcctgcgcgcgtgtgggcgcggtgcactcggtggtgtttgcgggcttcagcgccgacagcctggcgcagcgcatggtggactgcaacgccaaggtgcttctgaccgccacgggcgtcatgcgcggtaccaagcccgtgctgctcaagaccattgcggacgacgccgtcaagctggcagccaaggccgggcaggagaccagcagtgtgctgtgcctggaggtggccaacgcactggctgccgccgacacgccctggaaccccgtgcgggacgtgtggtggcacgcagccgtccccatgcagtctgcggagtgcgagcccacctggctggactccgaggaccgctccttcctgctgtacaccagcggcagcaccggcaagcccaagggcgtggtgcactgcgtgggcggctacatggtgggcgtgggcgtcagctgccgctacctgtacgacatgcggcccggcgacgtggtgttcaccaccgccgactgcggctggatcacgggccactcctacctggcctacggcccgctgctgtgcggctgcagctccgtgatcatgggcggcatacccacacaccccgacggcggccgcgcctggcgcatggtggagcggtacaaggtgcgccagttctacacggcccccacgctgcttcgctcgctgctgcagctgggcgacgcctggccgcggcagtcggacctgagttcgctgcgcgtgctggcgtcggcgggcgagcccatgaacgagcacgcctggcactggttccacgaggtggttggcagcagccgctgcccggtggtggacacgtggtggcagacggagacgggcaacgccatgctcattccgctgccctgcaaatggttccaggccaaggccggcagcgcaggtgtgcccttcttcggcgtatgccccgtggtgctggacccgaccaccggcaacgagatctgcaccacggaggcggagggcgtgctggctctgcgcggcgtgtggccgggcatgatgcgcacgctgcacggcgaccacgagcgctttgagagcgcctacttcgcgccctacaaggggtactacttcaccggcgacggttgccgccgcgacgccgacggccactactggatcaccggccgcgtggacgacgtgatcaacgtgagcgggcaccgcatcggcacggccgaggtggagagcgcgctgacggagcaccccgactgcgccgaggcggcggtcatcggcgtggaccacgcgctcaagggccaggccatctacgccttcgtgacgctgcgcggccacgtgcagaccagcgacgccatgcgcaagttgctcatggaccacgtgcgcaagagcatcggtcccttcgcggtgcccgaggtgatccattgggcgccggggctgcccaagacccgcagtggcaagataatgcgccgcgtgctgcgcaagattgcgtcaggcgaggagaaggagctgggagacatctccacactcgccgagccgggcgtggtggacatgcttatcaagctgcgcggcaagtaa

SEQ ID NO: 151091 - protein, 667 aa, Chlamydomonas reinhardtii
MQRLEVLARQLTAGAAVEDRTPLLATKNDYDTMYKRSIQDPEGFWGEMALGYHWDRKFPARGHMAANTDIRRGPVSIQFFAGGTTNMSYNCLDRWVAAGRGEQAALIWEGNDENERRTVSYRELLAEVNRLSNWLKSRGVKKGDAVTIYLPMVPELPAAMLACARVGAVHSVVFAGFSADSLAQRMVDCNAKVLLTATGVMRGTKPVLLKTIADDAVKLAAKAGQETSSVLCLEVANALAAADTPWNPVRDVWWHAAVPMQSAECEPTWLDSEDRSFLLYTSGSTGKPKGVVHCVGGYMVGVGVSCRYLYDMRPGDVVFTTADCGWITGHSYLAYGPLLCGCSSVIMGGIPTHPDGGRAWRMVERYKVRQFYTAPTLLRSLLQLGDAWPRQSDLSSLRVLASAGEPMNEHAWHWFHEVVGSSRCPVVDTWWQTETGNAMLIPLPCKWFQAKAGSAGVPFFGVCPVVLDPTTGNEICTTEAEGVLALRGVWPGMMRTLHGDHERFESAYFAPYKGYYFTGDGCRRDADGHYWITGRVDDVINVSGHRIGTAEVESALTEHPDCAEAAVIGVDHALKGQAIYAFVTLRGHVQTSDAMRKLLMDHVRKSIGPFAVPEVIHWAPGLPKTRSGKIMRRVLRKIASGEEKELGDISTLAEPGVVDMLIKLRGK

SEQ ID NO: 151092 - DNA, 2007 bp, Malassezia globosa CBS 7966
  CDS (1)..(2007)
atgtcagagaatgagtttatcaacatcccttcacgtgtgaatggcagcgataagactcgcccccgagcacatattgatgagactatgtacaatcaaatgcaccaccgctcgatccatgagaatgatcaattttgggccgaagaggcgaatcggatgatttcatggtatgtccccttcaagacggtccagtatggagactttgggcgcggcaacattggctggttcctggaaggtcagctgaatgcctcgtacaatcttgtggaccgctgggcatttgagcgccccgatgacattgcgctcatttgggaggcagatgagcctggcagtcacatttatatctcgtttagcgagctcctagaccgcgtgtgccaagtagcgggtgtgcttcactcgctaggcgtgcgaaagggtgacattgtcattatctacatgcccatgatccctgaggctgttattagcatgcttgcgtgtgcacggatcggtgctgtacattcagtggtgtttgccggcttcagttcggactcattgcgtgatcgtgtacaagacagtcgtacacgcgtagttatgacgtctgatgaaggccgacgtggtggccggacgattgcgaccaagtcgattgtcgatgccgcactaaaagaatgcagcagtgttgagcatgtcttggtcgcaaagcgcacgggggctgttgatgtgccatgggtggacggacgtgacaagtggctaagcgagcttgcagctcaacagcgcacatacttcccaccagtctcgatgaacagtgaggatccattatttgtcctctacacgtcaggttctacaggtaagcccaagggcattgtccatacaacagcaggctacctgctaggagcgggcctctctgtgaaacacgtgtttgacgtgcacccaggcgaccgctttggctgcatggccgatatcggctggattacgggacacacatacattgtgtatggtccgttgatgaatggcaccgctactttgatcttcgagtcgacaccaatgtacccgacaccctcacggtactgggaggtcgtcgacacccacaaactgacgcagttctatacggctccgacgtccatccgtatgctgcgccgcatgggtcctgagcatgtgcagaactacgatttaagcacgctgcgtgtgcttggaacggtcggcgaacccattaatcctgaggcatggcactggtacaatgaagtagtgggccgtggccactgtgctattgtcgacacatactggatgacggaaggtggctcacacatgatcacatcgttgccaggcgcgatcaagagcaagccgggtgcagcatcgaaaccgttctggggcttgaagcctgttttgctcgattctcagacgggacaagaattgcagggcgtagataccgaaggtgtgttggccatgagtaggccgtggccatcactcgcccgcacgatccttaacgaccacagtcgcttccttgacacgtacatgcgtccataccctggttacttctttacaggtgacagtgcgtaccgagacaaggatggctacatttggatccgcggccgtgtcgacgatgtgatcaatgtgtctggacaccgcttgtcgacgtcggaaatcgagtcggccttggctgagcaccctggcgtggcagaatccgccgccgttggtgcgcctgacgaactgactggccagaccattgcggtctttgtcgctctaaagcctgactatgtgtatgactcactcgaggacctgacaaaagaattgagtatccaagtgcgtcgagcgatcggccccttcgctacaccaaaacgcattctgtgtgtaagggacttgcccaaaacccgcagtggcaaaatcgtgcgccgcgttttgcgcaagattgtatgcaatgaagctgatcagctaggcgacttgtcgacactaagcgatccatccgttctggaccatttgttggtacgtgcagacataggtgctacagcaccatgcatgacatctcgatattgtgactga

SEQ ID NO: 151093 - protein, 668 aa, Malassezia globosa CBS 7966
MSENEFINIPSRVNGSDKTRPRAHIDETMYNQMHHRSIHENDQFWAEEANRMISWYVPFKTVQYGDFGRGNIGWFLEGQLNASYNLVDRWAFERPDDIALIWEADEPGSHIYISFSELLDRVCQVAGVLHSLGVRKGDIVIIYMPMIPEAVISMLACARIGAVHSVVFAGFSSDSLRDRVQDSRTRVVMTSDEGRRGGRTIATKSIVDAALKECSSVEHVLVAKRTGAVDVPWVDGRDKWLSELAAQQRTYFPPVSMNSEDPLFVLYTSGSTGKPKGIVHTTAGYLLGAGLSVKHVFDVHPGDRFGCMADIGWITGHTYIVYGPLMNGTATLIFESTPMYPTPSRYWEVVDTHKLTQFYTAPTSIRMLRRMGPEHVQNYDLSTLRVLGTVGEPINPEAWHWYNEVVGRGHCAIVDTYWMTEGGSHMITSLPGAIKSKPGAASKPFWGLKPVLLDSQTGQELQGVDTEGVLAMSRPWPSLARTILNDHSRFLDTYMRPYPGYFFTGDSAYRDKDGYIWIRGRVDDVINVSGHRLSTSEIESALAEHPGVAESAAVGAPDELTGQTIAVFVALKPDYVYDSLEDLTKELSIQVRRAIGPFATPKRILCVRDLPKTRSGKIVRRVLRKIVCNEADQLGDLSTLSDPSVLDHLLVRADIGATAPCMTSRYCD

SEQ ID NO: 151094 - DNA, 1929 bp, Physcomitrella patens subsp. patens
  CDS (1)..(1929)
atgtacaagcaatcgattcaggatccttcgagattctgggggaagattgcgagccagttctattggcatcgcatgtgggacacttctaagcccgtcttccgctccaactttgacatccgtcaagggcccatcttcaacgagtggttcaagggggggttcacgaacatctgctacaatgcgctagacaagcacgtcaacgaaggccggggcgagcaggttgcaatgctgtgggaaggcaacgacgtcggccacgaaatgcgtctcacctacagcgacgtgcttcagaagacgtgccagctcgccaattaccttcgcaagcggggagtgaagaagggcgaccgcgtgtgcatctacatgcctatggtgcccgagcttcccatcgccatgctcgcttgcgccagaatcggagccatccattctgtcatattcgggggcttcagtgcagagtcgctggcaggccggattttggactgcaagtccgacgtgctgctctcctgctcggctgtgcagcgtggggcgaaggttttgaacttgaaggtcattgtcgacgaggcgctgcagctttgcctggagaaagagagcttccagccaggaactgtcttgatttacgacaacaagaatgctgtaccgaggagcaaggtgaagtgggttgcagggcgagatttgtggtggcaagacgaggtgcggtcgtgcagcaccgttgcgcccgttgaatggatggaggctgaggatcctctcttcctcttgtacactagtggctccaccggcaagcctaagggagttctgcacacaatcggtggctacatggtgtatgcggcgacctcattcgaatatgtcttcgactaccaacccggtgacatcttctggtgtacagcagactgcggatggatcaccggccacacgtacatttgctatggtcccttgctgaacggcgccacgcaagttgtctttgaaggtgtgccaacgtacccaagccccagcagatggtgggagattattgagaaatacaaagtgtcgatcttctacaccgcgccgactgccattcggtccttggaagcgctcggcgacaaacacgtgacgaagcataatctgtccagccttcgagttctgggcacggttggagaagccatcaacgcaaaggcatggcactggtaccaccgcgtggtcgggcagggtaggtgcccaatcgtcgacacatggtggcagacagaaaccggaggaatcatgatcacgcccttgccgggcgcttggtctctcaagccaggctccgcaacgctgccattcttcggagtgcagccggttgtgttggatcaggacggcaaggaacaagatggtccatgctcaggatacctttgcatcaagggagcgtggccaggaatggcccgcaccttgtatggcgaccacaagaggttcgctgagacgtacttcacgacatggcccgggttgtatgtcaccggcgatggctgccaacgcgaagccaacggctacatcaccctcacgggccgtgtggacgatgtcgtgaacgtcagtggccataggatcagtattggtgaagtggaatcagcactcacttctcacaaattgtgcgctgagacagctgctgttgccttcgaccacgatgttaagggacaagggatctacgcgttcgtgaccctggtggagggcgctaaaccatcggaacagctcaagaatgagatcaaggctgctgtcagaaaagagattggatcttttgcggttccagacgtgatccagtgggctcctggactaccgaagacacgcagtgggaagattatgcgccggattctgcgaaagattgcagcgaatcagtttgatgagctgggtgatgtgagctcgctggcagacccggctgtggtggagcagctcgaccaccccgagcatttttgtgaagcaaaatccgctgatgggtga

SEQ ID NO: 151095 - protein, 642 aa, Physcomitrella patens subsp. patens
MYKQSIQDPSRFWGKIASQFYWHRMWDTSKPVFRSNFDIRQGPIFNEWFKGGFTNICYNALDKHVNEGRGEQVAMLWEGNDVGHEMRLTYSDVLQKTCQLANYLRKRGVKKGDRVCIYMPMVPELPIAMLACARIGAIHSVIFGGFSAESLAGRILDCKSDVLLSCSAVQRGAKVLNLKVIVDEALQLCLEKESFQPGTVLIYDNKNAVPRSKVKWVAGRDLWWQDEVRSCSTVAPVEWMEAEDPLFLLYTSGSTGKPKGVLHTIGGYMVYAATSFEYVFDYQPGDIFWCTADCGWITGHTYICYGPLLNGATQVVFEGVPTYPSPSRWWEIIEKYKVSIFYTAPTAIRSLEALGDKHVTKHNLSSLRVLGTVGEAINAKAWHWYHRVVGQGRCPIVDTWWQTETGGIMITPLPGAWSLKPGSATLPFFGVQPVVLDQDGKEQDGPCSGYLCIKGAWPGMARTLYGDHKRFAETYFTTWPGLYVTGDGCQREANGYITLTGRVDDVVNVSGHRISIGEVESALTSHKLCAETAAVAFDHDVKGQGIYAFVTLVEGAKPSEQLKNEIKAAVRKEIGSFAVPDVIQWAPGLPKTRSGKIMRRILRKIAANQFDELGDVSSLADPAVVEQLDHPEHFCEAKSADG

SEQ ID NO: 151096 - DNA, 1905 bp, Physcomitrella patens subsp. patens
  CDS (1)..(1905)
atgtacaagcgatccgtggaggatcccgacgggttctggggcgacatcgcatccacattcttttggaagaaaaaatggccgacaacagaaggaaaattgtattccgaaaacattgatgtccgaactgggcgcgttgccgtcgagtggttcaagggcgggcaaaccaatatctgctacaacgccctcgacaggcacgtcgaagctggctttggagacaaggtggccttcttctgggaagggaatgacaccggcgtggatgctacactgacttacaaagaagtgctcgaacgtgtttgccagcttgcaaactacttgcgtagccaaggtgtgaagaaaggagatgcagtggcaatctacatgcctatgctggccgagctgcctatcgccatgctcgcgtgtgcaagaattggagccgttcattcagtagtgtttgcagggttctctgcggagtcgctgtcacagcgcattctggactgcaaaccaaacattattttgaccagtagtgcagtgaagcgtgccgccaaggttatcaaactgaaggacatcgttgacgatgcgttgaaaactgcagcagagaacggtcactcagttggtttgtgtttgacgtatgataacaactcagcattgaagagagaagacactgcatggcaagaaggccgtgatgtctggtggcaggatgtggtgccatctcattcaaaagaatgtgaagtggagtgggtcgatgcagaggatactttgttcctgttatacacaagtggaagcactgggaagcccaagggcgtgctgcatacaacaggagggtacatggtctacgctgcaaccaccttcaagtatgcgttcaactatcacgaggacgacgtctactggtgtacagcagactgtggatggattactggtcacagttacctaacatacggtcctctactcaatggtgcttccatggttgtttttgaaggggtccccaactacccagatgcagggcgctgctgggaaattgtggacaagtataacgtgaccattttttacacagccccaactgcaattcgttcattgatgcggtcaggtgacgagcctgtaaaacggcactcgcgtaagtcactacgagtacttggcagtgtcggagaacccattaatccaagcgcatggaagtggtactacgaagtagttggcgataagcgctgtcctattgttgacacatggtggcaaacagagacagggggtttcatgatcactccgcttccaggcgcttggtgtcttaaacctggatctgctaccttgcctttctttggaatccagcctgccgttgtagacgaaaatgggcacgcacagactggggaatgcagtggctacctgtgcatcaaggcagcatggccgggaatgatgagaactctgcagggagaccacgatcgatacgaaactacgtattttgctcctttcaagggatactacttcagtggagatggatgccgcagggataaagacggattctactggttgacaggacgagttgatgatgtgatcaatgttagtggacaccgcataggcacagccgaggttgaatctgcgctagtatcgcatcctcagtgcgctgaagctgcagtcgtcgggttcgatcacgaggtgaaaggccaaggtatctttgctttcgttacccttctagaattcgtcgagtatagtgatgagcttcgcacagcgctcgtcaacgctgttcgttcacagattggagcgttcgccgcaccagatgtaattcattgggctccaggactacccaaaacgaggagtggaaaaatcatgcgcagaatattgcggaagattgctagcaatcaattggacgagcttggtgatatcagcacattggctgatacaagtgtggtggatcagctcattagtctccgtggcaagtaa

SEQ ID NO: 151097 - protein, 634 aa, Physcomitrella patens subsp. patens
MYKRSVEDPDGFWGDIASTFFWKKKWPTTEGKLYSENIDVRTGRVAVEWFKGGQTNICYNALDRHVEAGFGDKVAFFWEGNDTGVDATLTYKEVLERVCQLANYLRSQGVKKGDAVAIYMPMLAELPIAMLACARIGAVHSVVFAGFSAESLSQRILDCKPNIILTSSAVKRAAKVIKLKDIVDDALKTAAENGHSVGLCLTYDNNSALKREDTAWQEGRDVWWQDVVPSHSKECEVEWVDAEDTLFLLYTSGSTGKPKGVLHTTGGYMVYAATTFKYAFNYHEDDVYWCTADCGWITGHSYLTYGPLLNGASMVVFEGVPNYPDAGRCWEIVDKYNVTIFYTAPTAIRSLMRSGDEPVKRHSRKSLRVLGSVGEPINPSAWKWYYEVVGDKRCPIVDTWWQTETGGFMITPLPGAWCLKPGSATLPFFGIQPAVVDENGHAQTGECSGYLCIKAAWPGMMRTLQGDHDRYETTYFAPFKGYYFSGDGCRRDKDGFYWLTGRVDDVINVSGHRIGTAEVESALVSHPQCAEAAVVGFDHEVKGQGIFAFVTLLEFVEYSDELRTALVNAVRSQIGAFAAPDVIHWAPGLPKTRSGKIMRRILRKIASNQLDELGDISTLADTSVVDQLISLRGK

SEQ ID NO: 151098 - DNA, 1905 bp, Physcomitrella patens subsp. patens
  CDS (1)..(1905)
atgtacaagcgatctgtggagaaccccgatggcttctggggtgacattgcatcgacatttttctggaagaagagatggcccgtcaaggatggcaaagtgcataccgagaatattgatgttcgcaacgggcgcgttgctgttgagtggttcaagggtggacaaaccaacatctgttacaatgccatcgacaggcatgtagaagcaggcctcggtgacaaggttgctttctactgggaaggtaacgacctcggtgtggatgcttctctgacatacaaggaagtactggaaaaagtttgccagcttgcaaactatttgcgtagtcaaggtgtgaagaaaggcgacgcagtggcaatctacatgcctatgctggcagaactgccaatcgccatgcttgcctgtgctcgaattggagctgttcattctgttgtctttgccggattctccgcagaatctttatatcagcgtattctggattgcaagccaaacgttattttgacgagcagtgcggtgaaacgtggcgccaagattatcaaactcaaggatattgttgatgatgcattatcacgtgcatcagcggatggtcacactgtaggtatgtgcctgacatatgacaatagttctgcattgaagagagaggagaccgcgtggacagaaggccgtgattcgtggtggcaggatatcgtgccatcatatgcaaaagaatgtgatgtggagtgggttgacgcagaagatacgctgtttttgttatacaccagtggaagcactgggaagcccaagggcgtgctgcatacaacaggaggttacatggtatatgcggctacaaccttcaagtatgcatttaattaccacgatgatgacgtctactggtgcacagcagactgtgggtggattactggtcacagctacctgacatatggccctcttctcaacggtgctagcatggttgtctttgaaggggtccccaactatccagatgcaggtcgctgctgggacatagtagacaaatataacgtttccatcttctatactgccccaactgcaattcgttcattgatgcggtcgggtgacgagcccgttttacggcactctcgtaagtcactgcgagtgcttgggactgtgggagagccgatcaatcccagtgcgtggaagtggtaccatgaagtcgttggcgacaaactctgccctatagttgatacatggtggcaaacagagacggggggtttcatgattaccccgcaaccaggcgcttgggctcttaaacctggatctgctaccttacccttctttggtgtccagcctgctgtagtagacgataatgctcaagaacagtctggagaatgtagtggttacttgtgtatcaaggcggcctggcctggcatgatgagaactctacaaggagaccacgaccgatatgaaaccacatattttgctccttttaaaggattctacttcagtggtgatggatgccgcagagataaagatggttactattggttgacaggacgagtcgacgatgtcatcaatgttagtgggcaccgcattggtacagccgaggtagagtctgctcttgtttcgcatccccagtgcgctgaagcggcagttgttgggttcgatcacgaggtgaaaggtcaaggtatttacgcatttgtgacacttctagaaggcgtagagtacagcaatgatcttcgcaaagctctcatcaactccgttagatcacagattggagcgttcgcagcacctgatgtagtccattgggctccaggactgcccaagacaaggagtgggaaaatcatgcgcagaatattgcgaaagattgcgagcaacgaattggatcaagtgggggatatcagcaccttggcagattccagcgtggttgatcagctcataagtctccgaaacaagtaa

SEQ ID NO: 151099 - protein, 634 aa, Physcomitrella patens subsp. patens
MYKRSVENPDGFWGDIASTFFWKKRWPVKDGKVHTENIDVRNGRVAVEWFKGGQTNICYNAIDRHVEAGLGDKVAFYWEGNDLGVDASLTYKEVLEKVCQLANYLRSQGVKKGDAVAIYMPMLAELPIAMLACARIGAVHSVVFAGFSAESLYQRILDCKPNVILTSSAVKRGAKIIKLKDIVDDALSRASADGHTVGMCLTYDNSSALKREETAWTEGRDSWWQDIVPSYAKECDVEWVDAEDTLFLLYTSGSTGKPKGVLHTTGGYMVYAATTFKYAFNYHDDDVYWCTADCGWITGHSYLTYGPLLNGASMVVFEGVPNYPDAGRCWDIVDKYNVSIFYTAPTAIRSLMRSGDEPVLRHSRKSLRVLGTVGEPINPSAWKWYHEVVGDKLCPIVDTWWQTETGGFMITPQPGAWALKPGSATLPFFGVQPAVVDDNAQEQSGECSGYLCIKAAWPGMMRTLQGDHDRYETTYFAPFKGFYFSGDGCRRDKDGYYWLTGRVDDVINVSGHRIGTAEVESALVSHPQCAEAAVVGFDHEVKGQGIYAFVTLLEGVEYSNDLRKALINSVRSQIGAFAAPDVVHWAPGLPKTRSGKIMRRILRKIASNELDQVGDISTLADSSVVDQLISLRNK

SEQ ID NO: 151100 - DNA, 2013 bp, Phaeosphaeria nodorum SN15; identical to SEQ ID NO: 126811
  CDS (1)..(2013)

SEQ ID NO: 151101 - protein, 670 aa, Phaeosphaeria nodorum SN15; identical to SEQ ID NO: 126812

SEQ ID NO: 151102 - DNA, 2013 bp, Aspergillus oryzae RIB40; identical to SEQ ID NO: 122120
  CDS (1)..(2013)

SEQ ID NO: 151103 - protein, 670 aa, Aspergillus oryzae RIB40; identical to SEQ ID NO: 122121

SEQ ID NO: 151104 - DNA, 1986 bp, Coprinopsis cinerea okayama7#130
  CDS (1)..(1986)
atgtccgaaggtccaatccgagtcgctccccaccccatcgccaagcgcgtcaagcatggctgcaagacgccccatgtctcccatattgacgattaccgaagccagcaccgggaaaccattggccacgaatccgacaagtggtgggcaaagaaagctcatgagcttctttactgggatcgaccattccatactgtccgctcgggcagcttcgagaatggcgacattgcttggttccctgagggtggtttgaacgcctcctataactgcgttgaccgctgggcgttcaaacatccggaaaagaccgcgattatctacgaagcagatgaacctggcgagggaagggagatctcttacgcggaactcctacgggaagtctgcagcatcgcaaacgtgctcaagtcgttcggcgtcaagaagggcgacaccgtctccgtctacctccccatgacctggcaagccatcgccgccttcctcgcgtgtgcccgcatcggcgccatccactccgtcgtctttgctggcttctcggccgaagcattgcgtgatcgtatgcaagattgcaaatcgcgtgtgctcatcacgtccgatgaagggcggcgcggtgggaaggcgattgctaccaaggccatcgcggatgcggccctcaaggagtgcccggcggttgagaaggtgttggtgttgaagaggacgggtaacccggttccgtggactgagggtcgggatgtgtggtggcacgaggcggtcgccagggtgccgaggtactgccctcccgaggtcatggcatccgaggaccctctcttcatcctctacacttctggctcgactggcaaacccaagggtgtcgtgcacacgactggtggatatctactctgcgccgcgttgactgtcaaatacgtcttcgatgtccaccccgacgacaggttcgcttgcatggccgacgttggctggatcacgggccacacttacatcgtctacggtcctctcgctattggcgttaccaccaccgtgttcgagtccactcccgtataccccactccttcacgatactgggagaccgtcgagaagtacaagctcacccagttctactcggcccctaccgctatccgactcttgcgccgcctcggacacgagcacgtcaacaagcacgatttgagcagtttgcgtgtgttgggaagcgttggagagcccatcaaccccgaggcttggcactggtacaacgagcacgtcggaaagaccgagtgtgctatcgttgataccttctggcaaactgagactggttccatcgtcgttactcctttccccggtgctatcgagaccaagcctggtgccgcgactgtgcccttcttcggtattgagcccgccatcttggagcctaccactggaaaggtgctcgagggcaatgatgtcgagggtgttctcactatcgctcatccctggccttctatcgctcgaaccatctacggagaccatcagcgctacctcgagacttacatgaagccttatcccggctacttctacaccggtgatggcgctgctcgtgatgaggacggctacatctggatcaagggtcgtgttgatgatgtcattaacgtttctggccatcgtttgtccaccgccgaaatcgaatccgctctcatcacccacactggagttgctgagaccgccgtcatcggtaccgccgacgaactgaccggccaggccgtctacgccttcgtcactctcaagcctgagttcaagttcgaccccgagaacgaggctggcctctccaaggagctcatcctccaagtccgcaagatcatcggtccctttgctgcgcccaagcggatctatatcgtcagtgacctccccaagactcgctccggcaagatcatgcgacgtatcctccgcaagatcgtcgctggcgaggctgaccagctcggtgacctcagcaccctcgccgacccgggcatcgtcgaagtcatcaaggagaaggtcgcctctgctgcgtaa

SEQ ID NO: 151105 - protein, 661 aa, Coprinopsis cinerea okayama7#130
MSEGPIRVAPHPIAKRVKHGCKTPHVSHIDDYRSQHRETIGHESDKWWAKKAHELLYWDRPFHTVRSGSFENGDIAWFPEGGLNASYNCVDRWAFKHPEKTAIIYEADEPGEGREISYAELLREVCSIANVLKSFGVKKGDTVSVYLPMTWQAIAAFLACARIGAIHSVVFAGFSAEALRDRMQDCKSRVLITSDEGRRGGKAIATKAIADAALKECPAVEKVLVLKRTGNPVPWTEGRDVWWHEAVARVPRYCPPEVMASEDPLFILYTSGSTGKPKGVVHTTGGYLLCAALTVKYVFDVHPDDRFACMADVGWITGHTYIVYGPLAIGVTTTVFESTPVYPTPSRYWETVEKYKLTQFYSAPTAIRLLRRLGHEHVNKHDLSSLRVLGSVGEPINPEAWHWYNEHVGKTECAIVDTFWQTETGSIVVTPFPGAIETKPGAATVPFFGIEPAILEPTTGKVLEGNDVEGVLTIAHPWPSIARTIYGDHQRYLETYMKPYPGYFYTGDGAARDEDGYIWIKGRVDDVINVSGHRLSTAEIESALITHTGVAETAVIGTADELTGQAVYAFVTLKPEFKFDPENEAGLSKELILQVRKIIGPFAAPKRIYIVSDLPKTRSGKIMRRILRKIVAGEADQLGDLSTLADPGIVEVIKEKVASAA

SEQ ID NO: 151106 - DNA, 2007 bp, Culex quinquefasciatus
  CDS (1)..(2007)
atgccctctgaaccgaaactgtttaacccgcacccggatgtggccgaaaaggcgtacatcaacagcatggaccagtaccgggagtactaccgccagtcggtggagaatcccgcccagttctggagcaatgtggccaagcagttccactgggagaccccgtacgacccgcagaacttcatgtcgtacaactttgacatctccaaggggccgatcttcgtcaagtggatggagggcgcctcgaccaacatcagctacaacctgctcgatcggaacgtccggaacggccttggcgacacggtggcctactactgggaaggcaaccacccggacgactacagccggctgacgtaccgcaagctgctcgaggaggtatgccggttcgcgaacgtgctcaaatcgcacggcgtccagaagggtgaccgcgtgtcgatctacatgcccatggtcatggaacttccggtggcgatgctcgcctgtgcccgcatcggcgccgtccactccattgtgtttgccggcttttcgtcggactcgctggccgagcggatgcacgactgtcaggccaaggtgctgatcacggccgatggggcttggcgtggcgagaagatcttgcacctgaaaaacatctgcgatgaggcgatgacgaaggctgaggagatgggacaccgagttggtacgtgcgttgtggtgtcgcacatcaaccgggtgactccgggaaattccgcctgggatggggagtttgataccccctggacggacgatcgcgacttttggtggcaccaggagatggaagaagccgacacgtcttgctatccggagtggatggcggccgaggatccgctgtttatgctgtacaccagtggatcaacgggcaagcccaagggtgtgcttcacaccacggctgggtatcttctgtacgccgccacgacctttaagatcgtttttgactacaagccgcacgacgtttactggtgcaccgccgatattggttggatcaccggccacacgtacgtgctgtacggaccgctggccaacggtgccacctcggtcatgttcgagggtagtccattcttcccggagaacgatcgctactgggaagttgtggacaagtacaaggtcacgcagttctacacggcaccgacggcgatccgatcgctgatgaagtacggcgatgagccggtcttgaagcatgatctgtcgacgctgagagtcctcggaagtgttggtgaaccaatcaacccggaggcatggatgtggtactacaaggtggtcggcaaggaaaagtgctcgatcgtggacaccttctggcagacggagaccggcggacacgtgatcaccccattgccgggagcaaccccaatgaaaccaggatctgctagcttcccattctttggcgtgaaaccaaccctgctggacgaaagtggtaacgaggtcaagggagaaggtgagggttacctcgtgttttctcaaccatggcccggcatgatgaggaccttgttcaacaaccatccccgctacgagtcaacgtatttctccaagtttaacggattttactgcaccggagacggtgctcgacgtgacgccgatggatactactgggttaccggtcgcgtcgacgacatgctgaacgtttccggccatctcatgtcgacggccgaggtcgagtccgtactgacggagcacacgcgggtgtcggaagccgccgtcgtgtcccgaccacaccccgtcaagggtgaatgtctctactgcttcatcacgcccaaccagaacgaagtgtttgacaaaaccctgatcaacgaactgaaggttctcgtccgggaacggattggtccgttcgcccagccggacgtgatccagcacgcgccgggacttccgaagacacgctccggcaagattatgcgacgagtgctgcgcaaggtggcggtcaacgatcgcgaaatcggcgacacttcgaccctggcggacgaagcgatcatcgagcagttgtttgccaaccggccggtagcttaa

SEQ ID NO: 151107 - protein, 668 aa, Culex quinquefasciatus
MPSEPKLFNPHPDVAEKAYINSMDQYREYYRQSVENPAQFWSNVAKQFHWETPYDPQNFMSYNFDISKGPIFVKWMEGASTNISYNLLDRNVRNGLGDTVAYYWEGNHPDDYSRLTYRKLLEEVCRFANVLKSHGVQKGDRVSIYMPMVMELPVAMLACARIGAVHSIVFAGFSSDSLAERMHDCQAKVLITADGAWRGEKILHLKNICDEAMTKAEEMGHRVGTCVVVSHINRVTPGNSAWDGEFDTPWTDDRDFWWHQEMEEADTSCYPEWMAAEDPLFMLYTSGSTGKPKGVLHTTAGYLLYAATTFKIVFDYKPHDVYWCTADIGWITGHTYVLYGPLANGATSVMFEGSPFFPENDRYWEVVDKYKVTQFYTAPTAIRSLMKYGDEPVLKHDLSTLRVLGSVGEPINPEAWMWYYKVVGKEKCSIVDTFWQTETGGHVITPLPGATPMKPGSASFPFFGVKPTLLDESGNEVKGEGEGYLVFSQPWPGMMRTLFNNHPRYESTYFSKFNGFYCTGDGARRDADGYYWVTGRVDDMLNVSGHLMSTAEVESVLTEHTRVSEAAVVSRPHPVKGECLYCFITPNQNEVFDKTLINELKVLVRERIGPFAQPDVIQHAPGLPKTRSGKIMRRVLRKVAVNDREIGDTSTLADEAIIEQLFANRPVA

SEQ ID NO: 151108 - DNA, 1983 bp, Laccaria bicolor S238N-H82
  CDS (1)..(1983)
atgaccgaagaacagaaacctcttattcaccccgtcgctcctcgtttgaaatcaggtcctaaaactcctcatgttgggccgcacatacatgcgtaccgcgacgcccacaaggaaactgtggggcatgagtcggataaatggtgggcgcataaagctagagaaatgctgtactgggaccgcccattccacacagtcagatcagggggcttccaaactggagatatcgtgtggttcccagagggtggactgaacgcatcgtacaactgcgtagatcgatgggctttcaagcatcctgacaagaccgccatcatctacgaagcggatgagcccggagagggaagggaaatcacttacgccgagcttctccgcgaagttagcagcatcgccaatgttctcaaatcgtttggtctcaagaaaggcgataccgtctccgtttaccttcctatgacgtggcaggcagtcgcagtcttcctcgcctgcgcgcgtatcggcgccgtccactcggttgtatttgccggcttctctgctgaatctttgcgcgatcgcgttcaagattgtagctcacgcgttgtcatcacctcagatgagggcaggaggggtggcaaaccaatcgcaaccaaggcgattgtcgatgctgcgctgagggagtgccctcttgttgagcatgtgctagttctgaaaaggacgggaggtcaggtcggttggacggaagggcgcgacaagtggtaccacgaggagatcgcaaaggtgccaaactactgcccacctgagatcatggcgtctgaggacccattgttcatcctctatacatccggatctaccggcaaaccaaagggtgtcgtccacaccacaggagggtatcttctttgtgcagccctcactgtcaaatacgtctttgatgtccaccccgatgacaagttcgggtgcatggctgacatcggttggatcactggtcacacatatattgtgtacggacctctcgccaatggagttactaccacggtgtttgaatccacccccgtataccccaccccatcccgctattggcagacagttgaaaagcacaaactcactcaattctacactgcgcccactgccatccgtcttctgcgacgccttggcgctcaccatgtcgagaaccacgacctcagcagcctgcgcgtccttggcagcgtgggcgagcccatcaacccagaggcgtgggattggtacaacgaacacgtcggtaagaggcagtgcgcggttgtggataccttctggcaaacggagactgggtcgatcgtcgtcacaccgttccctggtgctatcgagaccaagcccggctccgcgactgtccccttcttcggcattgagcctgccattcttgatcccattacaggcaaggagttggaaggtaataacgttgaaggtgttcttgtcctcaagacgccgtggccatccattgcccgtactatctacaaagaccataaacgctacctcgaaacctacatgaatccataccctggtaccttttatactggagatgcagcggcgcgtgatgagcacggatacatctggatcaagggcagagttgacgacgttatcaacgtagctggccatcgtttgtctactgccgagattgagtcggcgcttatcatgcacaagggagttgctgaaactgctgtcatcggaaccactgacgaagtaactggacaagccgtttccgccttcgttaccttgaaacctgaatacgcatacgatcccaacgacgaatccggcttggtcaaggagctcgtgctccaagtgcgcaaggtaattggaccgttcgcggctccgaagaaggtttatatcgtgagcgacctgcccaagacgcgttccggaaagatcatgcggaggattatgaggaaggttgtcgcgggagagggtgaccagcttggtgatcttagcactgtcgctgagcctgctacggtggaggtcattaagaagagggtggcaggattgtaa

SEQ ID NO: 151109 - protein, 660 aa, Laccaria bicolor S238N-H82
MTEEQKPLIHPVAPRLKSGPKTPHVGPHIHAYRDAHKETVGHESDKWWAHKAREMLYWDRPFHTVRSGGFQTGDIVWFPEGGLNASYNCVDRWAFKHPDKTAIIYEADEPGEGREITYAELLREVSSIANVLKSFGLKKGDTVSVYLPMTWQAVAVFLACARIGAVHSVVFAGFSAESLRDRVQDCSSRVVITSDEGRRGGKPIATKAIVDAALRECPLVEHVLVLKRTGGQVGWTEGRDKWYHEEIAKVPNYCPPEIMASEDPLFILYTSGSTGKPKGVVHTTGGYLLCAALTVKYVFDVHPDDKFGCMADIGWITGHTYIVYGPLANGVTTTVFESTPVYPTPSRYWQTVEKHKLTQFYTAPTAIRLLRRLGAHHVENHDLSSLRVLGSVGEPINPEAWDWYNEHVGKRQCAVVDTFWQTETGSIVVTPFPGAIETKPGSATVPFFGIEPAILDPITGKELEGNNVEGVLVLKTPWPSIARTIYKDHKRYLETYMNPYPGTFYTGDAAARDEHGYIWIKGRVDDVINVAGHRLSTAEIESALIMHKGVAETAVIGTTDEVTGQAVSAFVTLKPEYAYDPNDESGLVKELVLQVRKVIGPFAAPKKVYIVSDLPKTRSGKIMRRIMRKVVAGEGDQLGDLSTVAEPATVEVIKKRVAGL

SEQ ID NO: 151110 - DNA, 2061 bp, Brugia malayi
  CDS (1)..(2061)
  misc_feature (777)..(777): y is t or c
  misc_feature (1402)..(1402): s is g or c
  misc_feature (1707)..(1707): r is g or a
  misc_feature (1807)..(1807): r is g or a
atgtcggatgctcggatcaaatttgagtttcctcaaatgtctgctgtaaaagaggacgaggaatggtttgtccctccggcacctatccttagtggtgctcatgtcacaggaattgattcttaccgggaaatgtataacaactccatcaataatgccgatgaattttggagaacagtagctaaagagctttacttcgaagagacgtccaagaaggggctggaatggaatttcgattgtcgtaagggggatatttatgtgcgctttatggaaggtgcaaggacgaacattgcatataattgcgtggaacaaaacattaagaaaggatatggctctcgcacggcgttgttgtgggaaggtaatgagcctggtgattgttgttctattacatttcaagatctgtttgacaaagtcgtcgttttttctgctatcctgcgatctcatggagttaagaagggcgatgttgtggtgatttatttaccgatgatacttgaattaccgatagcaatgttatcatgtgctagaatcggtgctgttcacgcggtagtgtttgctggatttagtgctgatgctttggcagctcgaatacgtcaaacagaatcccgtattctgatcactgcagatggatattatcgaggcaagaagcttgtaacactaaaaatgatagctgacgatgctcttgctgaatgcaatgtgtcgggtagaccggtggaaaaagtcattgttgtgcaacatttaaaacgtgttcggaaaccggacagtactgcttccatcgacgtyaaattagatccaaaacgggatgttatatgggataaagaaatggaacggtgcaaaggaatgaattctgagatagaatggaacgatgcagaagatcctctctttattctttacacttctggttcaacgggtcgaccaaaaggaatcgtgcatactactgctggttacatgacgtatacctatgctactgtcaaatttgtttttgatgctgatccagaaagggatatatattggtgcacagctgattgtggctggattactggacactcgtatcttgtgtatgggccacttcttaatggtttgacatgtgttatatatgagggcgtaccgagttatccaacaccatcacggatgtggcagattgtagagaagtacaaagttacaaccttatatactgcaccaacagcggtgcgtgctttgatggcttttggcgatcaatatgttacaccgtacaatcgttcatcgctacgtttgctgggatcagttggtgaaccaattaatccagtagcatggaagtggctgcataaggttgttggtgaaagtcgctgtgttgttcttgatacttactggcagacagaaacaggaggacatacgattacgccattaccggcagcaattccctgcaaasctggtagtgcaacacttcccttttttggagtagaaccggttattattgatgaggaaggtcgagaaatcgaaggagctggtaaaggaactttgtgtttcaagcgagcttggcccggtataagtagaagcattttgggtgatcatgaccgatttatgagcacatatttttcgccgtacccgggctacttttttactggtgatggagcacgtcgagatgctgatggttactactggattacagggcgcattgatgatcttatgaatgtatcaggtcatttactgtctactgctgaaattgagtctgcrctagtttcggataacgatgtagtggaagcagctgtagttgcggcaccgcatgacatcaaaggcagctttccatatgcattcatcacattacgattgggcrtaaaacttacagaaagaaaaattgaggatctgaaacttttggttcgaaaaaaaattggtgcgattgctgtaccagacgttatacaagtagctcctggactacctaaaacacgatcaggaaaggtaacacgtcgtatattacggaaaatcgctgaaggtgataaggctgcagatttaggcgacactactacacttattgatgaaacggttattgctcacttgtggagtggtcgatcagaaacacggactggttga

SEQ ID NO: 151111 - protein, 686 aa, Brugia malayi
  misc_feature (468)..(468): The Xaa at location 468 stands for Ala, or Pro.
  misc_feature (603)..(603): The Xaa at location 603 stands for Ile, or Val.
MSDARIKFEFPQMSAVKEDEEWFVPPAPILSGAHVTGIDSYREMYNNSINNADEFWRTVAKELYFEETSKKGLEWNFDCRKGDIYVRFMEGARTNIAYNCVEQNIKKGYGSRTALLWEGNEPGDCCSITFQDLFDKVVVFSAILRSHGVKKGDVVVIYLPMILELPIAMLSCARIGAVHAVVFAGFSADALAARIRQTESRILITADGYYRGKKLVTLKMIADDALAECNVSGRPVEKVIVVQHLKRVRKPDSTASIDVKLDPKRDVIWDKEMERCKGMNSEIEWNDAEDPLFILYTSGSTGRPKGIVHTTAGYMTYTYATVKFVFDADPERDIYWCTADCGWITGHSYLVYGPLLNGLTCVIYEGVPSYPTPSRMWQIVEKYKVTTLYTAPTAVRALMAFGDQYVTPYNRSSLRLLGSVGEPINPVAWKWLHKVVGESRCVVLDTYWQTETGGHTITPLPAAIPCKXGSATLPFFGVEPVIIDEEGREIEGAGKGTLCFKRAWPGISRSILGDHDRFMSTYFSPYPGYFFTGDGARRDADGYYWITGRIDDLMNVSGHLLSTAEIESALVSDNDVVEAAVVAAPHDIKGSFPYAFITLRLGXKLTERKIEDLKLLVRKKIGAIAVPDVIQVAPGLPKTRSGKVTRRILRKIAEGDKAADLGDTTTLIDETVIAHLWSGRSETRTG

SEQ ID NO: 151112 - DNA, 2007 bp, Pyrenophora tritici-repentis Pt-1C-BFP
  CDS (1)..(2007)
atgtctgaaggaaacgtgaagcccccggttgtggccgaagcgcacgaagtcgacacattccacgttcccaaggcgttttacgagaagcacccgcattcaaggcctcacctcgaaaacctcgaagagtaccagaagctgtacaaagagtccattaccgatccaaagactttctggggcagattagcgcgcgaactgctcacgtgggaacgcgacttccagaccgtacactcgggtagctttgagcatggcgataatgcgtggttcttggaaggcagactgaatgccagctacaactgtgttgatcgtcatgccttcaaggaccctaacaagccggccatcatttacgaggccgacgacgagggcgatggccgcatcatcacatacggagagctactccgccaggtctccaagctagcctacacactcaaagaaatgggcgtaagaaagggtgacacagtcgctctttacttgcccatgattccagaggccgtcatctcctttttggcatgcacgcgcatcggtgctgtccactcagtcgtcttcgccggcttttcgtctgattcactacgcgaccgcatcaacgacgccgagtgcaaggttgtcatcaccaccgacgagggcaagcgcggaggcaagaccatcagcaccaagaagattgttgatgatgctctgaaacaatgtcccggcatcagccactgcttggtttacaagcgcactggcgccgaagtcccctggaccaagggacgtgactggtggtggcacgaggaggtcgagaagtaccccaactacattgcaccagagcctatgaactcagaagaccctcttttcttgctctacacatcgggttcgactggtaagcccaagggtgtcatgcacacaacaggtggttacctccttggagcagcagcaactggaaagtacgtcttcgatatccacgacaatgatgtctttttctgcggtggtgatgtaggttggatcacaggacacacatacgttgtatacgctcctttgctgcttggtgttgctaccgttgtgtttgaaggtacccctgcttaccccaacttctcgcgctactgggatatcgtggacaagtacaatgtcagccagttctacgtagcgcccactgcactgcggctactcaagcgtgcaggcaatgagcacgtcaaacacaagatgaagaacctaagaatactcggatccgttggcgagccgattgctgcagaagtgtggaagtggtatttcgagactgtcggcaaggaggaggcacatgttgttgatacgtactggcaaactgagacgggctcgcacgtgattacacccctgggtggtatcacccctaccaagcctgggtccgcatctcttccctttttcggtattgagccggcgattatcgaccccgtctccggcgaggagattcacggtaacgatgttgagggtgtattggcgttcaagcaaccttggccaagcatggcacgcacagtctggggagcacacaagcgatacatggagacatatctgacggtatacaaggggtactacttcactggagacggtgccgcacgtgaccacgagggctattactggattcgaggacgcgtcgatgacgttgtcaacgtttctgggcacaggctgtcgactgctgagattgaggcggcacttattgaacaccaccaggtggctgaggcggcagtagtgggaatccatgacgaactgacaggccaagcggtcaacgcctttgtggcgctcaaggacggcacagagtcaagtgaccaagtgaagaaggacttggtaatgcaagtgcgcaagtcgattggtccgtttgccgcaccaaaggcaatttttgtagtgccagatctgcccaagacgcgatccggcaagattatgcgacgtataatgcgcaagattctagctggagaggaggaccaactgggcgacatcacaacgctttcggatccgtcggtagtcgacaagatcatcgacatagtgcaccagtcgaagaaaaaatag

SEQ ID NO: 151113 - protein, 668 aa, Pyrenophora tritici-repentis Pt-1C-BFP
MSEGNVKPPVVAEAHEVDTFHVPKAFYEKHPHSRPHLENLEEYQKLYKESITDPKTFWGRLARELLTWERDFQTVHSGSFEHGDNAWFLEGRLNASYNCVDRHAFKDPNKPAIIYEADDEGDGRIITYGELLRQVSKLAYTLKEMGVRKGDTVALYLPMIPEAVISFLACTRIGAVHSVVFAGFSSDSLRDRINDAECKVVITTDEGKRGGKTISTKKIVDDALKQCPGISHCLVYKRTGAEVPWTKGRDWWWHEEVEKYPNYIAPEPMNSEDPLFLLYTSGSTGKPKGVMHTTGGYLLGAAATGKYVFDIHDNDVFFCGGDVGWITGHTYVVYAPLLLGVATVVFEGTPAYPNFSRYWDIVDKYNVSQFYVAPTALRLLKRAGNEHVKHKMKNLRILGSVGEPIAAEVWKWYFETVGKEEAHVVDTYWQTETGSHVITPLGGITPTKPGSASLPFFGIEPAIIDPVSGEEIHGNDVEGVLAFKQPWPSMARTVWGAHKRYMETYLTVYKGYYFTGDGAARDHEGYYWIRGRVDDVVNVSGHRLSTAEIEAALIEHHQVAEAAVVGIHDELTGQAVNAFVALKDGTESSDQVKKDLVMQVRKSIGPFAAPKAIFVVPDLPKTRSGKIMRRIMRKILAGEEDQLGDITTLSDPSVVDKIIDIVHQSKKK

SEQ ID NO: 151114 - DNA, 2013 bp, Drosophila ananassae
  CDS (1)..(2013)
atgccagcggaaaaatcaatatacgatcctaatccggccatcagccaaaatgcgtacatatccagcttcgaggagtacaagaagttctaccaggagtccttggacgatccggcggagttctggtcccgcgtggccaagcagttccactgggagacgcccgccgaccctcagaagtttctccaatacaacttcaacatctccaagggacccatttccatcaaatggatggagggagcctcgactaatctgtgctacaatctcctggatcgcaatgtccggaacggattgggtgaccagattgcctactactgggagggcaaccaccccgacgactactcccgcggcctcacctaccgaaagctgctcgaggaggtctgccggttcgccaatgtgctgaaggaccatggcatccggaagggcgatcgcgtgtccatctacatgcccatgatcctggagctgcccattgccatgctggcctgtgcccgtatcggtgccgtgcactcgattgtctttgccggattctcgccggactccttggcggagcggatgttcgactgcaaggccaagttgctcatcacggcggacggagcttggcgtggtgagaagcccctgtacctgaaggcgctctgcgacacggccctggagaaggtcgaggagatgggccactccgtggagaagtgcattgtggtgtcgcatctgaagcgcgtgactccctgccaggcggatcatgtcgaggaggatatcccatggaccgacgatcgggactactggtggcacgaggagatggaggataaggagccggcctgctatcccgagtggatggacgccgaggatccgctgttcatgctctacaccagtggctccactggcaagcccaagggcgtgctccacaccaccgccggctacttgctctacgcggccaccacattcaagattgtctttgattacaagccgggcgatatctactggtgcaccgccgatgtgggctggatcactggacacacctacgtggtctacggacctctggccaatggagccacttcggtgattttcgagggtactcccttctatcccggcaatgaccgctactggagcgttatcgacaagtacaaggtgactcagttctacacggctcccacggccatccgagccctgatgaagttcggcgaaggaccagtgctcaagcataatctaagtggtctcaaagttttgggcagcgtcggtgaacccatcaatccggaagcctggctctggtattatcgtaacattggcaaggagcagtgctccattgtggacactttctggcagacggaaactggaggtcatgtcataacacctctaccaggagccactcccatgaaacctggctcagcttcattccccttctttggtgtgaaacccactctgctggatgagtgcggcattgagatcaagggcgagggtgagggctacttggtgttctcccagccttggcccggcatgatgcgtaccttgtacaacaaccatgaacgcttcgaggacacctacttctccaagttccctggctactactgcactggcgatggcgcccgtcgcgatgctgatggctatctctggatcactggccgtgtggatgacatgttaaacgtctctgggcatctgatgtccaccgctgaggtcgaatctgtcctgacagaacatccccgcgtggctgaatccgccgtggtttcccgtccacatccagtcaagggcgagtgcctctactgcttcatcactcccaatgagaacgaagttttcgatcagaaactaatctccgatcttaaaaagatggtgcgcgaacgcatcggaccctttgccatgccggatgtcattcagaatgcccccggcttgcccaagacccgctccggaaagattatgcggcgagtgctgcgcaagatcgccgtaaacgatcgcaatgtgggcgacacctcgaccctggccgacgagcagattgtggagcagctattcgccaaccgacccgttgaggccaagtaa

SEQ ID NO: 151115 - protein, 670 aa, Drosophila ananassae
MPAEKSIYDPNPAISQNAYISSFEEYKKFYQESLDDPAEFWSRVAKQFHWETPADPQKFLQYNFNISKGPISIKWMEGASTNLCYNLLDRNVRNGLGDQIAYYWEGNHPDDYSRGLTYRKLLEEVCRFANVLKDHGIRKGDRVSIYMPMILELPIAMLACARIGAVHSIVFAGFSPDSLAERMFDCKAKLLITADGAWRGEKPLYLKALCDTALEKVEEMGHSVEKCIVVSHLKRVTPCQADHVEEDIPWTDDRDYWWHEEMEDKEPACYPEWMDAEDPLFMLYTSGSTGKPKGVLHTTAGYLLYAATTFKIVFDYKPGDIYWCTADVGWITGHTYVVYGPLANGATSVIFEGTPFYPGNDRYWSVIDKYKVTQFYTAPTAIRALMKFGEGPVLKHNLSGLKVLGSVGEPINPEAWLWYYRNIGKEQCSIVDTFWQTETGGHVITPLPGATPMKPGSASFPFFGVKPTLLDECGIEIKGEGEGYLVFSQPWPGMMRTLYNNHERFEDTYFSKFPGYYCTGDGARRDADGYLWITGRVDDMLNVSGHLMSTAEVESVLTEHPRVAESAVVSRPHPVKGECLYCFITPNENEVFDQKLISDLKKMVRERIGPFAMPDVIQNAPGLPKTRSGKIMRRVLRKIAVNDRNVGDTSTLADEQIVEQLFANRPVEAK

SEQ ID NO: 151116 - DNA, 2013 bp, Drosophila erecta
  CDS (1)..(2013)
atgccagccgaaaaatcaatatatgatcccaatccggccatcagccaaaatgcctacatatccagcttcgaggagtaccagaagttctaccaggagtcgctggacaatccggccgagttttggtctcgcgtggccaagcagttccactgggaaacgcccgccgacccagagaagtttctcaagtataacttcaacatctccaagggacccatttcgatcaaatggatggagggtgcctccaccaatctgtgctacaatctactagatcgcaacgttaggaacggtctgggcgaccagatagcctactactgggagggcaaccaccccgatgattattcccggggtcttacctatcgcaagttgctggaggaggtgtgtcgcttcgccaatgtgctgaaggatcatggaattcgaaagggcgatcgtgtgtccatttacatgcccatgatactggagctaccgatcgcgatgctggcctgcgcccgcattggagccgtgcactcgatcgttttcgccgggttctcaccggactcgctggcggagcggatgtttgattgcaaggccaagctgctgattacggcggatggagcctggcgtggagagaaacccctgtacctgaaggcactgtgcgacacggccttggagaaggtcgaggagatggggcactccgtggagaagtgcattgtggtgtctcacttaaagcgcgtgactccgtgccagctggatcatgtcgaggaggaaatcccgtggaccgatgaccgcgactactggtggcacgaggagatggaggacaaggagccagcctgctaccccgagtggatggacgccgaggatccgctgttcatgctctacaccagtggctccactggcaagcccaagggagtgctccacacgaccgccggatatctgttgtatgcggctacgaccttcaagatcgtatttgactataagccaggggatatctactggtgcaccgctgatgttggctggatcacgggacacacctacgtggtgtacggaccgttggccaatggtgccacttcagtgattttcgagggcacaccattcttccctggaaacgatcggtactggagcgtcattgacaagtataaggtcacccagttctacacagctccgacggcgattcgtgccctcatgaaattcggggagggtccagttctgaaacacaacctgagcggactgaaagttttgggcagcgtgggtgagcccatcaacccggaggcctggctttggtactacaagtacattgggaaggagcagtgctccattgtagacaccttttggcaaacggaaaccggtggtcatgtcattacacccctgcctggagcgacccccatgaagccgggatcggcttcgttccccttctttggtgtgaagcccactttgctggatgagtgcggaattgaaattaagggagagggcgagggctacttggtcttctcgcaaccttggccgggaatgatgcgcaccttgtataacaaccatgaacgcttcgaggacacttacttctcaaagttcccaggtttctactgcactggcgatggagcccgtcgcgatgctgatggctatttgtggatcactggtcgtgtggacgacatgttgaacgtgtccggtcatctgatgtccaccgccgaagtagagtcggtgctcacagagcatcctcgcgtggctgagtccgccgtggtttcccgtccgcatcccgtcaaaggcgagtgtctctactgcttcattacgcccaacgaaaacgaggttttcgataagaagcttatttccgaccttaagaagatggtgcgtgatcgcatcggaccttttgccatgccggatgtcattcaaaacgctcccggactgcccaaaacccgctccggcaagattatgcgtcgtgtgctgcgcaagatcgcggttaacgatcgcaacgtgggcgacacatctaccttggccgatgagcaaattgtggagcaactgttcgccaaccggccagtggaggccaagtag

SEQ ID NO: 151117 - protein, 670 aa, Drosophila erecta
MPAEKSIYDPNPAISQNAYISSFEEYQKFYQESLDNPAEFWSRVAKQFHWETPADPEKFLKYNFNISKGPISIKWMEGASTNLCYNLLDRNVRNGLGDQIAYYWEGNHPDDYSRGLTYRKLLEEVCRFANVLKDHGIRKGDRVSIYMPMILELPIAMLACARIGAVHSIVFAGFSPDSLAERMFDCKAKLLITADGAWRGEKPLYLKALCDTALEKVEEMGHSVEKCIVVSHLKRVTPCQLDHVEEEIPWTDDRDYWWHEEMEDKEPACYPEWMDAEDPLFMLYTSGSTGKPKGVLHTTAGYLLYAATTFKIVFDYKPGDIYWCTADVGWITGHTYVVYGPLANGATSVIFEGTPFFPGNDRYWSVIDKYKVTQFYTAPTAIRALMKFGEGPVLKHNLSGLKVLGSVGEPINPEAWLWYYKYIGKEQCSIVDTFWQTETGGHVITPLPGATPMKPGSASFPFFGVKPTLLDECGIEIKGEGEGYLVFSQPWPGMMRTLYNNHERFEDTYFSKFPGFYCTGDGARRDADGYLWITGRVDDMLNVSGHLMSTAEVESVLTEHPRVAESAVVSRPHPVKGECLYCFITPNENEVFDKKLISDLKKMVRDRIGPFAMPDVIQNAPGLPKTRSGKIMRRVLRKIAVNDRNVGDTSTLADEQIVEQLFANRPVEAK

SEQ ID NO: 151118 - DNA, 2013 bp, Drosophila grimshawi
  CDS (1)..(2013)
atgccagcggaaaaatcaatattcaatccgaatccggcaattagccgcaatgcttacatatccagttttgaggagtacacgaaattctatcaggaatccttggacaatccagcggagttttggtcgcgtgtcgctaaacaattccactgggaaacgcccgcagatcccacgaaattcatgcaatacaatttcaatatctccaaaggaccaatctcaattaaatggatggacggcgcctcgaccaacatctgctacaatctcctagatcggaatgtgcgcaacggactcggagatcagatagcttactactgggagggcaatcacccggatgattattcacgtggactcacctaccgcaaactgctcgaagaggtttgtcgcttcgccaacgtgctgaaggatcatggagtgcagaagggcgatcgcgtctccatctatatgcccatgatcctggagctgcccattgcgatgctggcctgcgctcgcatcggcgccgtccattcgattgtgtttgcgggcttctcgcccgattctttggcggagcggatgttcgattgcaaggcgaaactgctgattacggccgatggggcttggcggggcgagaaaccgctgtacctgaaggccctgtgcgatacggcactggaaaaggtcgaggagatgggccactcggtggagaagtgcattgtggtgtcgcatctgaagcgtgtgacaccctgccaggataatcatgtggagcaggacattccatggaccgatgatcgcgactactggtggcacgaggagatggaggacaaggagcccgcctgctatcccgaatggatggatgccgaggatccattgttcatgctctacacgagtggatccaccggcaagcccaaaggtgtgctccacaccacagctggctatcttctgtatgcggcgaccacattcaagattgtgtttgactacaagcccggtgacatctactggtgcacggccgatgtcggctggatcaccggacacacctacgttgtctatgggccactggccaatggcgccacttcggttatcttcgagggcactccattctttccgggcaatgatcgctactggagcgtcatcgacaagtataaggtcacccaattttatacggctcccacagcgattcgggcgctcatgaaatttggcgatgctccggtgctcaagcacaatctttccggactcaaggttttgggcagcgttggtgagccaattaatccggaggcttggctgtggtattaccgcatcattggcaaggagcagtgctccattgtggacacattctggcaaacggagactggtggacatgtcattacgcccctaccaggtgccacgcccatgaagccgggcgctgcttcgtttccgttctttggcgtcaaggccacgctgctggacgagtgcggcattgagatcaagggcgagggcgagggctacttggtgttctcgcagccctggccgggcatgatgcgcactctgtacaacaatcatgagcgcttcgaggatacatatttctccaagttcccgggctactattgcaccggagacggtgcccgtcgcgatgctgatggttatttgtggataactggccgcgtggatgacatgttgaacgtgtccggtcatctgatgtcaactgccgaggtggagtctgttctcacggagcatccacgtgtcgccgaatcggctgtggtctctagaccccatcccattaaaggcgagtgcctctactgcttcatcacgcccaatgagaatgagcccttcgatcaaaaactaattgccgacctcaagaagatggtgcgcgaacgcatcggaccctttgcccagccggatgtcatccaaaatgcacccggattgcccaagacgcgctccggcaagataatgcgtcgtgtgctgcgcaagattgctgtcaacgatcgcaatgtgggcgacacatccacactggccgacgagcagattgtggagcagctgttcgccaatcgtcccgtagagaccaagtaa

SEQ ID NO: 151119 - protein, 670 aa, Drosophila grimshawi
MPAEKSIFNPNPAISRNAYISSFEEYTKFYQESLDNPAEFWSRVAKQFHWETPADPTKFMQYNFNISKGPISIKWMDGASTNICYNLLDRNVRNGLGDQIAYYWEGNHPDDYSRGLTYRKLLEEVCRFANVLKDHGVQKGDRVSIYMPMILELPIAMLACARIGAVHSIVFAGFSPDSLAERMFDCKAKLLITADGAWRGEKPLYLKALCDTALEKVEEMGHSVEKCIVVSHLKRVTPCQDNHVEQDIPWTDDRDYWWHEEMEDKEPACYPEWMDAEDPLFMLYTSGSTGKPKGVLHTTAGYLLYAATTFKIVFDYKPGDIYWCTADVGWITGHTYVVYGPLANGATSVIFEGTPFFPGNDRYWSVIDKYKVTQFYTAPTAIRALMKFGDAPVLKHNLSGLKVLGSVGEPINPEAWLWYYRIIGKEQCSIVDTFWQTETGGHVITPLPGATPMKPGAASFPFFGVKATLLDECGIEIKGEGEGYLVFSQPWPGMMRTLYNNHERFEDTYFSKFPGYYCTGDGARRDADGYLWITGRVDDMLNVSGHLMSTAEVESVLTEHPRVAESAVVSRPHPIKGECLYCFITPNENEPFDQKLIADLKKMVRERIGPFAQPDVIQNAPGLPKTRSGKIMRRVLRKIAVNDRNVGDTSTLADEQIVEQLFANRPVETK

SEQ ID NO: 151120 - DNA, 2013 bp, Drosophila mojavensis
  CDS (1)..(2013)
atgccaacggaaaaatcaatattcaatccgaatccggcgattagccgtaatgcctacatatccagctttgaagagtacacgaaattctacaaggagtccttggacaatcccgctgagttttggtctcgcgtagcgaaacaatttcactgggagacgccagcggatccctccaaattcatgcaatacaatttcaatatctccaaaggacccatctccatcaaatggatggagggcgcctcgaccaatatttgctacaatctgctcgatcgaaatgttcgcaacggcctaggcgatcaaatagcctactattgggagggcaatcacccggatgactattcgcgtggtctcacctaccgcaagctgctggaggaggtgtgccgcttcgccaatgtgctgaaggatcatggcattcagaagggtgatcgcgtctccatttatatgcccatgattctggagctgcccattgcgatgttggcttgtgctcgcatcggtgccgtgcactcgattgtgtttgccggattctcgtcggattccttggcggaacgcatgttcgattgcaaggccaagctgctgatcacggccgatggggcttggcgtggcgagaagccgctctacctgaaggctttgtgcgacacggcgttggagaaggtggaggagatgggccactccgtggagaagtgcattgtggtgtcgcatctgaagcgcgtgacgccctgccaggacaatcatgtggaccaggacataccgtggaccgatgatcgcgactactggtggcacgaggagatggaggataaggagcccgcctgctatccagagtggatggatgccgaggatcccttattcatgctctacacgagcggctccacgggcaagcccaagggcgtgctccataccacggctggctacctgctctatgcggctaccacgttcaagatcgtctttgactacaagcccggcgacatctactggtgcactgccgacgtgggctggatcactggacacacctacgtggtctacggaccactggccaatggcgccacctccattatcttcgagggcacgcccttcttcccgggcaacgatcgctactggagcgtcattgacaagtacaaggtcacccagttctatacggcgcccacggccatacgcgcgctcatgaagttcggcgaggcgccagtgctcaagcataatctgactggactcaaggtcttgggcagcgttggtgagcccatcaatccagaggcttggctttggtactatcgctacattggcaaggagcagtgctccattgtggataccttctggcagacggaaactggtggacatgtcataacgcctctacctggagccacgcccatgaaaccaggctctgcgtcttttccgttctttggcgtcaagccgactctgctggatgagtgcggcatcgagattaagggcgagggcgagggttacctggtattctcgcagccctggccgggcatgatgcgcacgctgtacaacaatcatgagcgtttcgaggacacctacttctccaagttcccaggctactattgcactggcgatggtgcacgtcgtgatgccgatggctacttgtggatcactggtcgcgtggacgacatgttgaatgtgtctggccatctgatgtccacggccgaggtggagtctgtgctcacggagcatccgcgtgttgccgaatcggctgtggtgtctcgcccccatccggtcaagggcgaatgcctctactgctttatcacgcccaatgaaaacgagacgttcgatcaaaaactgatcgccgatctgaagaagatggtacgcgaacggatcggacccttcgccatgccagatgttatacaaaatgcgccaggcttgcccaagacacgttccggcaagattatgcgccgtgtgctgcgcaagatcgccgtcaacgatcgcaacgtgggcgacacgtccacgctggccgacgagcagattgtggagcagctgttcgccaatcggcccgtagaggccaagtag

SEQ ID NO: 151121 - protein, 670 aa, Drosophila mojavensis
MPTEKSIFNPNPAISRNAYISSFEEYTKFYKESLDNPAEFWSRVAKQFHWETPADPSKFMQYNFNISKGPISIKWMEGASTNICYNLLDRNVRNGLGDQIAYYWEGNHPDDYSRGLTYRKLLEEVCRFANVLKDHGIQKGDRVSIYMPMILELPIAMLACARIGAVHSIVFAGFSSDSLAERMFDCKAKLLITADGAWRGEKPLYLKALCDTALEKVEEMGHSVEKCIVVSHLKRVTPCQDNHVDQDIPWTDDRDYWWHEEMEDKEPACYPEWMDAEDPLFMLYTSGSTGKPKGVLHTTAGYLLYAATTFKIVFDYKPGDIYWCTADVGWITGHTYVVYGPLANGATSIIFEGTPFFPGNDRYWSVIDKYKVTQFYTAPTAIRALMKFGEAPVLKHNLTGLKVLGSVGEPINPEAWLWYYRYIGKEQCSIVDTFWQTETGGHVITPLPGATPMKPGSASFPFFGVKPTLLDECGIEIKGEGEGYLVFSQPWPGMMRTLYNNHERFEDTYFSKFPGYYCTGDGARRDADGYLWITGRVDDMLNVSGHLMSTAEVESVLTEHPRVAESAVVSRPHPVKGECLYCFITPNENETFDQKLIADLKKMVRERIGPFAMPDVIQNAPGLPKTRSGKIMRRVLRKIAVNDRNVGDTSTLADEQIVEQLFANRPVEAK

SEQ ID NO: 151122 - DNA, 2013 bp, Drosophila persimilis
  CDS (1)..(2013)
atgccagcggaaaaatcaatatacgatccgaatccggccatcagccaaaacgcttacatatccagcttcgaggagtacaagaagttctaccaggagtccctcgacaatcctgcagagttctggtcccgtgtggccaagcagttccactgggagacgcccgccgatcaggaaaagtttctgcaatacaacttcaacatctccaagggacccatttacattaagtggatggagggtgcctcgaccaatatctgctacaatctcctcgatcgcaacgtccgcaacggattgggcgaccagatcgcctactattgggagggcaaccaccccgacgactactcgcgcgggctcacctaccgcaaactgttggaggaggtctgccgcttcgcgaacgtgctgaaggaccatggcatcaggaagggcgatcgcgtgtccatctatatgcccatgatcttggagctgcccattgccatgctggcctgcgcccgcatcggggcggtgcactcgattgtgttcgccggcttctcgccggactccctggcggagcggatgttcgactgcaaggccaagctgctgatcacggccgacggggcctggcgcggggagaagccgctgtacctgaaggccctttgcgacacggcgctggagaaggtcgaggagttgggccactccgtggagaagtgcattgtggtgtcgcacctcaagcgggtgacgccctgccaggataaccatgtggaggaggagataccatggaccgatgatcgcgactactggtggcacgaggagatggaggacaaggagccggcttgctatcccgagtggatggacgccgaggatccgctcttcatgctctacacaagcggctccaccggcaagcccaagggtgttctccacaccaccgccggctatctgctgtatgcagccaccactttcaagatcgtcttcgactataagccgggcgatatctactggtgcactgctgacgtgggctggatcactggacacacctacgtggtgtacgggcccctggccaacggtgccacttcagttattttcgagggcactcccttctttcccggaaacgatcggtactggagtgtcattgacaagtacaaggtcacgcagttctataccgcccccacggccattcgtgctctgatgaagttcggcgagggaccggtcctcaagcacaacttaagtggtctcaaagttttgggcagcgttggggagcctatcaatccggaggcctggctctggtactatcgatacattggcaaagagcagtgctcaattgtggacaccttctggcagacggaaactggcggtcatgtcatcacacctctgccaggtgccacgcccatgaagccgggatcagcttcgttcccattctttggtgtcaagcccattctgctggatgagtgcggcattgagatcaaaggcgagggcgagggctacttggtgttctctcagccctggccaggcatgatgcgcactctgtacaacaatcacgagcgcttcgaggacacctacttctcgaaattccctggcttctattgcactggtgatggtgctcgtcgcgatgctgatgattatctatggatcactggtcgtgtcgacgacatgttgaacgtgtcgggacatctcatgtccactgccgaggtggagtccgtgctcaccgagcatccacgcgtggccgagtccgctgtagtttcgcgtccgcatccggtgaagggcgaatgcctttactgtttcatcacgcccaatgagaacgaacccttcgatcagaagcttatctcggatctgaaaaagatggtgcgcgagcgcattgggccgtttgcccagcccgatgttatccagaatgcccctggcttgcccaagacccgctccggcaaaataatgcgccgtgtgctccgcaagattgccgtaaacgatcgcaacgtgggcgacacttcgaccctggctgatgagcagattgtggagcagctgtttgccaatcgacccgtggaggccaagtag

SEQ ID NO: 151123 - protein, 670 aa, Drosophila persimilis
MPAEKSIYDPNPAISQNAYISSFEEYKKFYQESLDNPAEFWSRVAKQFHWETPADQEKFLQYNFNISKGPIYIKWMEGASTNICYNLLDRNVRNGLGDQIAYYWEGNHPDDYSRGLTYRKLLEEVCRFANVLKDHGIRKGDRVSIYMPMILELPIAMLACARIGAVHSIVFAGFSPDSLAERMFDCKAKLLITADGAWRGEKPLYLKALCDTALEKVEELGHSVEKCIVVSHLKRVTPCQDNHVEEEIPWTDDRDYWWHEEMEDKEPACYPEWMDAEDPLFMLYTSGSTGKPKGVLHTTAGYLLYAATTFKIVFDYKPGDIYWCTADVGWITGHTYVVYGPLANGATSVIFEGTPFFPGNDRYWSVIDKYKVTQFYTAPTAIRALMKFGEGPVLKHNLSGLKVLGSVGEPINPEAWLWYYRYIGKEQCSIVDTFWQTETGGHVITPLPGATPMKPGSASFPFFGVKPILLDECGIEIKGEGEGYLVFSQPWPGMMRTLYNNHERFEDTYFSKFPGFYCTGDGARRDADDYLWITGRVDDMLNVSGHLMSTAEVESVLTEHPRVAESAVVSRPHPVKGECLYCFITPNENEPFDQKLISDLKKMVRERIGPFAQPDVIQNAPGLPKTRSGKIMRRVLRKIAVNDRNVGDTSTLADEQIVEQLFANRPVEAK

SEQ ID NO: 151124 - DNA, 2013 bp, Drosophila sechellia
  CDS (1)..(2013)
atgccagcggaaaaatcaatatacgatcccaacccggccatcagccaaaatgcctacatatccagcttcgaggagtaccagaagttctaccaggagtcgctggacaatccggccgagttctggtcccgcgtggccaagcagttccactgggaaacgcccgcagatccggagaagttcctcaagtacaacttcaacatctcgaagggacccatttcgatcaaatggatggagggtgcctccactaatctgtgctacaatctcctagatcgcaacgtaaggaacggcctgggcgaccagatagcctactactgggagggcaaccaccccgacgattattcccggggtctcacctatcgcaagttgctggaggaggtgtgccgcttcgccaacgtgctgaaggatcatggcattcgaaagggcgatcgtgtatccatttacatgcccatgattctggagctgcccatcgcgatgctggcctgcgcccgcatcggagccgtgcactcgatcgttttcgccggattctcaccggactcgctggcggagcggatgttcgattgcaaggccaagctgctgattacggcggatggaggctggcgtggagagaaacccctgtacctgaaggctctgtgcgacacggccttggagaaggtcgaggagatgggacactccgtggagaagtgcatcgtggtgtcgcacttgaagcgcgtgactccgtgccagccgggtcatgtcgaggaggaaatcccatggaccgatgaccgcgattactggtggcacgaggagatggaggacaaggagccagcctgctatcccgagtggatggacgccgaggatccgctgttcatgctctacaccagtggctccactggcaagcccaagggagtgctccacacgaccgccggatatctgctgtatgcggctacgaccttcaagatcgtatttgactataagccaggggatatctactggtgcaccgccgatgttggctggatcacgggccacacctacgtcgtgtacggaccattggccaatggggccacttcagtgattttcgagggcacaccattcttccctggaaacgatcggtactggagtgtcattgacaaatataaggtaacgcagttctacacagctcccacggcgattcgtgccctcatgaagttcggagaggatcccgttctgaagcacaacctgagcggactcaaagttttgggcagcgtgggtgagcccatcaacccggaggcctggctctggtattacaagtacattggaaaggagcagtgctccattgtggacaccttttggcaaacggaaaccggtggtcatgtcattacacctctgcctggagcgactcccatgaagccgggatctgcttcattccccttctttggagtgaagcccactttgctggatgagtgcggcattgaaattaagggggagggagagggctacttggtcttctcgcaaccttggccgggaatgatgcgcaccttgtataacaaccatgaacgtttcgaggacacttacttctccaagttcccagggtactactgcactggcgatggagcccgtcgcgatgctgatggctatttgtggatcactggccgtgtggacgacatgttaaacgtgtccggtcatctaatgtccaccgccgaggttgagtcggttctcacagagcatcctcgcgtggctgagtccgccgtggtttcccgtccgcatcccgtcaagggcgagtgtctctactgcttcattacgccgaacgagaacgagttattcgaccagaaactaatttcggacctgaagaagatggtgcgagaacgtatcggaccttttgctatgccggatgtcattcaaaatgctcccggactgcctaaaactcgttccggcaagattatgcgtcgtgtgctgcgcaagatcgcggttaacgatcgcaacgtgggcgacacatctaccttggccgatgagcaaattgtggagcaactgttcgccaaccggccagtggaggccaagtag

SEQ ID NO: 151125 - protein, 670 aa, Drosophila sechellia
MPAEKSIYDPNPAISQNAYISSFEEYQKFYQESLDNPAEFWSRVAKQFHWETPADPEKFLKYNFNISKGPISIKWMEGASTNLCYNLLDRNVRNGLGDQIAYYWEGNHPDDYSRGLTYRKLLEEVCRFANVLKDHGIRKGDRVSIYMPMILELPIAMLACARIGAVHSIVFAGFSPDSLAERMFDCKAKLLITADGGWRGEKPLYLKALCDTALEKVEEMGHSVEKCIVVSHLKRVTPCQPGHVEEEIPWTDDRDYWWHEEMEDKEPACYPEWMDAEDPLFMLYTSGSTGKPKGVLHTTAGYLLYAATTFKIVFDYKPGDIYWCTADVGWITGHTYVVYGPLANGATSVIFEGTPFFPGNDRYWSVIDKYKVTQFYTAPTAIRALMKFGEDPVLKHNLSGLKVLGSVGEPINPEAWLWYYKYIGKEQCSIVDTFWQTETGGHVITPLPGATPMKPGSASFPFFGVKPTLLDECGIEIKGEGEGYLVFSQPWPGMMRTLYNNHERFEDTYFSKFPGYYCTGDGARRDADGYLWITGRVDDMLNVSGHLMSTAEVESVLTEHPRVAESAVVSRPHPVKGECLYCFITPNENELFDQKLISDLKKMVRERIGPFAMPDVIQNAPGLPKTRSGKIMRRVLRKIAVNDRNVGDTSTLADEQIVEQLFANRPVEAK

SEQ ID NO: 151126 - DNA, 2013 bp, Drosophila virilis
  CDS (1)..(2013)
atgccaactgaaaaatcaatattcaatccaaatccggcaatcagccgcaatgcctacatatccagcttcgatgagtacaagaaattctatcaggagtccttggacaatccgaccgagttttggtcgcgcgttgcgaaacaatttcactgggaaacgccagcggatccctcaaaattcatgcaatacaatttcaacatctccaaaggacccgtttcgatcaaatggatggagggcgcctcgaccaacatatgctacaaccttctcgatcgaaatgtacgcaacggcctgggcgatcagatagcgttctactgggagggcaaccaccccgatgactattcgcgcggtctcacctatcgcaagctgctggaggaggtctgccggttcgccaacgtgctaaaggatcatggcatcaagaagggcgatcgcgtctcgatctatatgcccatgatcctggagctgcccattgccatgctggcctgctcacgcattggcgccgtgcactcgattgtctttgcgggcttctcgccggattctctggcggagcgcatgttcgattgcaaggccaagctgctgattacggccgatggcgcttggcgtggcgagaagccgctctacctgaaagccctgtgcgacacggccctggagaaggtcgacgagatgggtcactccgtggagaaatgcattgtggtgtcacatctgaagcgcgttacgccctgccaggagaatcatgtggagcaggatataccgtggaccgatgatcgcgactactggtggcacgaggagatggaggacaaggagccggcctgctatcccgaatggatggacgccgaggatccattgtttatgctctacacgagcggctccacgggcaagcccaagggcgtgctccacaccacggccggctacctgctctatgcggccaccacattcaagattgtgtttgactaccatcccggtgacatctactggtgcaccgccgatgtcggctggatcactggacacacctatgtggtctacggtccattggccaacggcgccacttcagttattttcgagggcacgcccttctatcccggcaacgatcgctactggagcgtcattgacaagtacaaggtcacccagttctatacggcgcccacggctatacgtgcgctcatgaagtttggcgaggcgccggtgctcaagcacaatctgagcggtctcaaggttttaggcagcgttggtgagcccattaatccggaggcctggctctggtactatcgcaacattggcaaggagcagtgctccattgtggacacgttttggcaaacggaaactggcggtcatgtcataacgcctctgcccggcgccacgcccatgaaaccaggctctgctacgtttcccttctttggcgtcaagcctttgctgctggatgagtgcggaattgagatcaagggcgagggcgagggctacctggtgttctcgcagccctggccgggcatgatgcgcacgctgtacaacaatcatgagcgcttcgaggacacatacttctccaagtttcccggctactattgcactggagacggagctcgtcgcgatgctgatgggtatttgtggatcactggccgcgtggatgatatgttgaatgtgtcgggtcatctgatgtccaccgccgaggtggagtctgtgctcacggagcatccacgtgtcgccgaatcggctgtggtatcccggccgcatccggtcaagggcgaatgtctctattgcttcataacgcccaatgagaatgaggcgttcgaccagaagctaatcgccgaccttaagaagatggtgcgcgaacgcattggccccttcgccatgccagatgttatacaaaatgcgcccggcttgcccaagacgcgctccggcaagataatgcgtcgggtgttgcgcaagattgccgtcaacgatcgaaatgtgggcgacacctccacgctggccgatgagcagattgtggagcagctgttcgccaatcgtcccgtggaggccaagtaa

SEQ ID NO: 151127 - protein, 670 aa, Drosophila virilis
MPTEKSIFNPNPAISRNAYISSFDEYKKFYQESLDNPTEFWSRVAKQFHWETPADPSKFMQYNFNISKGPVSIKWMEGASTNICYNLLDRNVRNGLGDQIAFYWEGNHPDDYSRGLTYRKLLEEVCRFANVLKDHGIKKGDRVSIYMPMILELPIAMLACSRIGAVHSIVFAGFSPDSLAERMFDCKAKLLITADGAWRGEKPLYLKALCDTALEKVDEMGHSVEKCIVVSHLKRVTPCQENHVEQDIPWTDDRDYWWHEEMEDKEPACYPEWMDAEDPLFMLYTSGSTGKPKGVLHTTAGYLLYAATTFKIVFDYHPGDIYWCTADVGWITGHTYVVYGPLANGATSVIFEGTPFYPGNDRYWSVIDKYKVTQFYTAPTAIRALMKFGEAPVLKHNLSGLKVLGSVGEPINPEAWLWYYRNIGKEQCSIVDTFWQTETGGHVITPLPGATPMKPGSATFPFFGVKPLLLDECGIEIKGEGEGYLVFSQPWPGMMRTLYNNHERFEDTYFSKFPGYYCTGDGARRDADGYLWITGRVDDMLNVSGHLMSTAEVESVLTEHPRVAESAVVSRPHPVKGECLYCFITPNENEAFDQKLIADLKKMVRERIGPFAMPDVIQNAPGLPKTRSGKIMRRVLRKIAVNDRNVGDTSTLADEQIVEQLFANRPVEAK

SEQ ID NO: 151128 - DNA, 2013 bp, Drosophila willistoni
  CDS (1)..(2013)
atgccagcagaaaaatcaatatacgaaccaaatccagccattagtcaaaaggcttacatatccagttttgatgaatataagaaattctatcaggaatcattggataatccttcggacttttggtcacgtgtggccaaacaattccattgggaaacaccagctgatcctgacaagtttttgcaatataatttcaatatttccaaaggacccatttcaattaaatggatggcaggagcctctaccaatatctgttataatctgttagatcgtaatgtacgtaatggattgggcgaccaaatagcctattattgggagggcaaccaccccgatgattattcgcgcggtcttacctaccgcaaactgttggaggaggtctgccgctttgccaatgtcttgaaagatcatggcattaagaagggtgaccgcgtttcgatatacatgcccatgatattggagttgcccattgccatgttggcctgtgcccgtattggagccgtacattccattgtctttgctggtttctcgcccgattcgctggccgagcgtctggtcgattgcaaggccaagctgttgatcaccgccgatggggcttggcggggcgagaagcccctctatctgaaggcactctgcgatacggccctggagaaggccgaggagttgggccattcggtggagaaatgcattgtggtgtcgcatttgaagcgggttacaccctgccaaccggatcatgtcgaggaagagataccctggaccgatgatcgtgactattggtggcatgaggaaatggaggacaaagagccagcctgctatcccgaatggatggacgccgaggatccattattcatgctctatacgagtggttcgactggcaaacccaagggtgtcctccatacgacagcgggctatctactgtatgcggcgaccacattcaagattgtcttcgattacaagcctggggatatctattggtgtacagccgatgtcggctggattaccgggcatacctatgtggtgtatggcccattggcaaatggtgccacttcggttattttcgagggcactccattctttcctggtaatgatcgctactggagcgtcattgacaaatacaaggtcactcagttctatacggctccaacggccattcgggccttgatgaagtttggcgaaggacccgtcctgaagcataatttgagtggtctcaaagtccttggcagcgttggtgagcccatcaatccagaggcttggctctggtattatcgctatattggaaaagagcagtgctccatagttgatacattttggcaaaccgaaaccggtggtcatgtcataactccactgcccggtgccacacccatgaaaccaggatcggcttcgtttcccttctttggcgtgaaacccattctgcttgatgaatgcggcattgagattaagggcgaaggagagggctatttggttttctcgcagccctggcccggcatgatgcgcactctgtacaacaatcatgaacgcttcgaggacacctatttctccaaattccccggctactattgcaccggtgacggggcccgtcgcgatgcggatggctatttgtggatcactggacgtgtcgatgatatgttaaatgtttctggtcatctgatgtcaacagctgaggtggaatcggttctcaccgaacatccacgtgtcgccgaatcggctgtggtctcccgcccgcatccggttaaaggggaatgcctctattgcttcattacgcccaatgagaatgagaaattcgatcagaaactaatagcggacctcaagaaaatggtacgtgaacgtattggaccatttgccatgccagatgttatacaaaatgctcccggtttgcccaagacacgatctggtaaaataatgcgtcgtgtgttgcgtaaaatagccgtaaacgatcgcaatgtgggcgacacttcgaccctggcggatgagcaaattgtcgaacagctgtttgccaatcgtcccattgaggccaagtag

SEQ ID NO: 151129 - protein, 670 aa, Drosophila willistoni
MPAEKSIYEPNPAISQKAYISSFDEYKKFYQESLDNPSDFWSRVAKQFHWETPADPDKFLQYNFNISKGPISIKWMAGASTNICYNLLDRNVRNGLGDQIAYYWEGNHPDDYSRGLTYRKLLEEVCRFANVLKDHGIKKGDRVSIYMPMILELPIAMLACARIGAVHSIVFAGFSPDSLAERLVDCKAKLLITADGAWRGEKPLYLKALCDTALEKAEELGHSVEKCIVVSHLKRVTPCQPDHVEEEIPWTDDRDYWWHEEMEDKEPACYPEWMDAEDPLFMLYTSGSTGKPKGVLHTTAGYLLYAATTFKIVFDYKPGDIYWCTADVGWITGHTYVVYGPLANGATSVIFEGTPFFPGNDRYWSVIDKYKVTQFYTAPTAIRALMKFGEGPVLKHNLSGLKVLGSVGEPINPEAWLWYYRYIGKEQCSIVDTFWQTETGGHVITPLPGATPMKPGSASFPFFGVKPILLDECGIEIKGEGEGYLVFSQPWPGMMRTLYNNHERFEDTYFSKFPGYYCTGDGARRDADGYLWITGRVDDMLNVSGHLMSTAEVESVLTEHPRVAESAVVSRPHPVKGECLYCFITPNENEKFDQKLIADLKKMVRERIGPFAMPDVIQNAPGLPKTRSGKIMRRVLRKIAVNDRNVGDTSTLADEQIVEQLFANRPIEAK

SEQ ID NO: 151130 - DNA, 1788 bp, Drosophila yakuba
  CDS (1)..(1788)
atggagggtgcctccaccaatctgtgctacaatctactggatcgcaacgtgaggaacggtctgggcgaccagatagcctactactgggagggcaaccaccccgacgattattcccggggtctcacctatcgcaagttgctggaggaggtgtgccggttcgccaatgtgctgaaggatcatggaattcgaaagggcgatcgtgtgtccatctacatgcccatgattctggagctgcccatcgcgatgctggcctgcgcccgcattggagccgtgcactcgatcgtcttcgccggattttcaccggactcactggcggagcggatgttcgattgcaaggccaagctgctgattacggcggatggagcttggcgtggagagaaagccctgtacctgaaggcgctgtgcgacacggccttagagaaggtcgaggagatgggtcactccgtggagaagtgcattgtggtgtcgcacttgaagcgcgtgactccgtgccagccggatcatgtcgaggaggaaattccgtggaccgatgaccgcgattactggtggcatgaggagatggaggacaaggagccggcctgctatcccgagtggatggatgccgaggatccgctgttcatgctctacaccagtggctccactggcaagcccaagggagtgcttcacacgaccgccggatatctgctgtatgcggccacaaccttcaagatcgtctttgactataagccaggggatatctactggtgcaccgccgatgttggctggatcacaggacacacctacgtggtgtacggaccgttggccaatggtgccacttcagtgattttcgagggcacaccattcttccctggaaacgatcggtactggagtgtcattgacaaatataaggtcacccagttctacacagctcctacggcgattcgcgctctcatgaagttcggcgagggtcccgttctgaagcacaacctgagcggactcaaagttttgggcagcgtgggtgagcccataaacccggaggcctggctgtggtattacaagcacattggaaaggaacagtgctccattgtggacaccttttggcaaacggaaacaggtggacatgtcattacacccctgcctggagcgactcccatgaagccgggatctgcttcattccccttctttggcgtcaagcccactttgctggatgagtgcggaatcgaaattaagggagagggcgagggctacttggtcttctcgcagccttggccgggaatgatgcgcaccttgtacaacaaccatgaacgcttcgaggacacttacttctccaagttcccaggtttctactgcactggcgatggagcccgtcgcgatgctgatggctatctgtggatcactggtcgtgtggacgacatgttaaacgtgtccggtcatctgatgtccaccgccgaagtagagtcggttctcacagagcatcctcgcgtggctgagtccgccgtggtttcccgtccgcatcccgtcaaaggcgagtgtctctactgcttcattacgcccaacgagaacgaggtctttgatcaaaagcttatttctgaccttaagaagatggtgcgagaacgcatcggcccttttgccatgccggatgtcattcaaaacgctcccggactgcccaaaacccgttccggcaagattatgcgccgtgtgctgcgcaagatcgcggtaaacgatcgcaacgtgggcgacacatctaccttggccgatgagcaaatcgtggagcaactgttcgccaaccggccagtggaggccaagtag

SEQ ID NO: 151131 - protein, 595 aa, Drosophila yakuba
MEGASTNLCYNLLDRNVRNGLGDQIAYYWEGNHPDDYSRGLTYRKLLEEVCRFANVLKDHGIRKGDRVSIYMPMILELPIAMLACARIGAVHSIVFAGFSPDSLAERMFDCKAKLLITADGAWRGEKALYLKALCDTALEKVEEMGHSVEKCIVVSHLKRVTPCQPDHVEEEIPWTDDRDYWWHEEMEDKEPACYPEWMDAEDPLFMLYTSGSTGKPKGVLHTTAGYLLYAATTFKIVFDYKPGDIYWCTADVGWITGHTYVVYGPLANGATSVIFEGTPFFPGNDRYWSVIDKYKVTQFYTAPTAIRALMKFGEGPVLKHNLSGLKVLGSVGEPINPEAWLWYYKHIGKEQCSIVDTFWQTETGGHVITPLPGATPMKPGSASFPFFGVKPTLLDECGIEIKGEGEGYLVFSQPWPGMMRTLYNNHERFEDTYFSKFPGFYCTGDGARRDADGYLWITGRVDDMLNVSGHLMSTAEVESVLTEHPRVAESAVVSRPHPVKGECLYCFITPNENEVFDQKLISDLKKMVRERIGPFAMPDVIQNAPGLPKTRSGKIMRRVLRKIAVNDRNVGDTSTLADEQIVEQLFANRPVEAK

SEQ ID NO: 151132 - DNA, 2043 bp, Trichoplax adhaerens
  CDS (1)..(2043)
atggtagacattgcagatattgaaaaatcagccttgggaccggtttatcctccaagtccaagagttgttgctgaagctcatgttaagagcatggaggaatatcgtaagatgtatgataggagtatcaacgatccagttgctttttggggcgatatagctaaacaattctattggaaaggtgcaccagaaggcagagtattcgattacaactttagtaaaagtaacggcagaattttcatcaagtttatggagggtatcaaaaccaacgtctgttataatgttattgatcgcaatattgaaaatggccttggtgataacgttgctttctactgggaaggaaacgaaccaggtgacgactctaaggttacctatagtgagctaaaacgccgagtttgccaatttgccaacgttctaaaggctaaaggtgtcaagaaaggtgaccacgttgctatctatatgcccatgatacttgaactaccaatagctgtcttggcatgtgcaagaattggtgcaccacactctgttgtgtttggtggattttcagcggaatcactagttgatagaatactggattcgaaatgttgtctccttgtcactgcagacggtttatacagagggaagaaattaatagaactgaagagtattgctgatcaggctttccaaattctgaaagataggaattactcgttaaaatgctgcatagttgtcagacatttgttagaggatttagacaaaaaaggacctcaggaaccaccaaaacgaccatcaaatatcggatggaatgaagaattagattgttggtggcatgaagaagttgccaatgtttcagatgaatgcgaacctgagtggctcgatgccgaagatcctttatttcttttatatactagtggatcgactggcaaacctaagggagttgttcatactcaagccggttaccttttatatgctgcgacaacatttaaatattcatttgattatcatcatggagatgtctacttctgtactgctgatgttggttggattactggacatagttacgtcgtttatggccctctcgctaacggtgccccaagtattgtgtttgaaggattgcccgtatacccagatgctggtcgctactgggatattgtagacaagtataaagtttctaaattttatactgctccaacagcaattcgttccctcatgagatttggtcctgattatgtgaaaaagtacagtcgtaagacattaaaggtgcttggatctgtgggagaacctcttaatccggaagcttggcgtttctattatgaagttattggtaatggagaatgctctatttctgatacgttttggcagaccgaaacaggtgggcatgttcttaccccacttccaggttgtacacccatgaagcctggatctgtgtgtttcccattctttggtatcaagccggtcgttttaaatgaagatggcaatgaagtacaagggcagagtgaaggatatctggctattagccaggcatggccaagtaccatgcgtacagtttacggtgaccatgagcgctatgaaaatacatattttggaaaatttgatggatattattgcactggcgatggttgctttagagataaggatggatatttttggattactggacgtattgatgattgtattaatgtatctggtcacttaacaagcactgctcaagttgaaagtgcattaatcgagcacgatctcgtagcagaagctgctgtggtttcttatccacacgaaatcaaaggtcaatgcttatacgcatttctaaccctaataaagggagctgaatttagtgatgaagtagtcgttcaacttaagcaacaagtacgacaaaagattgggtctatcgctgtaccggattacattcaagatgcccctggattacctaaaactcgttcgggaaagattatgcgccgcgttttgagaaagattgctcgtaatgatcaccaattgggtgatatttctacaatggcagattcgtcaatcattgaaactctattccagttgcgcccggcttctctgaagtga

SEQ ID NO: 151133 - protein, 680 aa, Trichoplax adhaerens
MVDIADIEKSALGPVYPPSPRVVAEAHVKSMEEYRKMYDRSINDPVAFWGDIAKQFYWKGAPEGRVFDYNFSKSNGRIFIKFMEGIKTNVCYNVIDRNIENGLGDNVAFYWEGNEPGDDSKVTYSELKRRVCQFANVLKAKGVKKGDHVAIYMPMILELPIAVLACARIGAPHSVVFGGFSAESLVDRILDSKCCLLVTADGLYRGKKLIELKSIADQAFQILKDRNYSLKCCIVVRHLLEDLDKKGPQEPPKRPSNIGWNEELDCWWHEEVANVSDECEPEWLDAEDPLFLLYTSGSTGKPKGVVHTQAGYLLYAATTFKYSFDYHHGDVYFCTADVGWITGHSYVVYGPLANGAPSIVFEGLPVYPDAGRYWDIVDKYKVSKFYTAPTAIRSLMRFGPDYVKKYSRKTLKVLGSVGEPLNPEAWRFYYEVIGNGECSISDTFWQTETGGHVLTPLPGCTPMKPGSVCFPFFGIKPVVLNEDGNEVQGQSEGYLAISQAWPSTMRTVYGDHERYENTYFGKFDGYYCTGDGCFRDKDGYFWITGRIDDCINVSGHLTSTAQVESALIEHDLVAEAAVVSYPHEIKGQCLYAFLTLIKGAEFSDEVVVQLKQQVRQKIGSIAVPDYIQDAPGLPKTRSGKIMRRVLRKIARNDHQLGDISTMADSSIIETLFQLRPASLK

SEQ ID NO: 151134 - DNA, 2025 bp, Ciona intestinalis
  CDS (1)..(2025)
atgaatctgatattaaggctgcatcgcagtgcaaaattttgcaaaactttgccttcaatacacactagcagctatgtgttgaaaaatggcgtcccactaacaactgctatgccagaatctgctaaatttaaaggagtgaagacttatgaagatttgtacaaattttcggtcaacaattcggacgatttttggggggaactcgccaaaactcgtttggactggtataagccattttcacaggtgtcagactgtgatatgaattctggtaacattaaatggtttgatggcggaaaattaaatgtcagtgttaactgtgttgaccgtcacgctgcaaaacacccagataaggtggctttaatatgggaaaaagatgagcctggcaacactgaaaaagtcacatactcacagcttttggcgatggtttgtaaaatttcaaattgcttgaaagacagtggagtaaagcgcggtgacagggtggcaatctatatgcctgtatcccctattgctgtggctgctatgctagcttgtacacgcataggtgctgtgcatagtgttgtctttgctgggttcagtgcagatgctttagctcagagaatacaagacgcaggagtggaaactatactcactacagatcaaggtgtaagaggtggaaaagttattgagctgaaaaaaactgtcgatgccgcagtgcaaaaatgcccatccgttaaaagagtctttgtttcgaaaagaaccggcgaaaacgccccgaaaactaatttggatattgacttagacgctgcaatgaaaacagcttcggaaaattttaccccagaggttatggatagtgaagatttactgtttatgctctacacatctggtagtaccggaaaacctaagggaatagtgcatactcaagctgggtacttactctatgcaagcatgactcaaaagtatgtgttcgattatcatgatggggacattttcggctgtgttgctgatatagggtggataacaggccatagttatgtggtttatggcccactgtctaatggggcaactactgtattatttgaaagtatacccacatatccagaccctggcaggtattgggaaatggtcgaacgactgaaaattaaccagttttatggggcacctacagctataaggttactgttacgctatggggattcatttgtgaaaaaatatgaccggtcttctttaaaagttttgggtagtgtgggcgaacctatcaaccatgaagcttgggagtggtatcataatgttgtgggggatggaaaatgtgatgtagtagatacatggtggcaaactgaaacagggggcattgctgtaacacctagaccctctggacctaatgataagattataccggcagcgcctatgagggcattctttggaattcagccggcaattttaggctcagagcaagaggacttgcagggggtaaatgaaggcgctttatgtattaaaaatccatggcctggaatggctaggactatttacggtgaccatgaaaggtttatggatacctattatcggccgtttccgggacattatttttccggagacggggcgaagcgggacgaagagggattcattcacatcacggggagaatggatgacgtccttaacatcagtggacatcgactcggaacagcggaagttgaggatgttttagatgaacatccggatgtagctgaagctgctgtcgtaggggtacctcatgctgtgaaaggagaagaagcgttcgcgttcgtgaccgtgaaagaaaacttctcacgtgatcatgaaacgctagtgaaagagcttcagggattggtccgtgagcgtattgcatcatttgctgtcccatcacagatgctggttacggagggtcttccgaaaacgaggtctgggaaaattatgaggaggattcttcgaaaagttgcggctggtcaagttgatgaccttggagatataagcacccttgctgaccctactgtggtgcaatctttgtctattagaaggaggaatatggacaagtaa

SEQ ID NO: 151135 - protein, 674 aa, Ciona intestinalis
MNLILRLHRSAKFCKTLPSIHTSSYVLKNGVPLTTAMPESAKFKGVKTYEDLYKFSVNNSDDFWGELAKTRLDWYKPFSQVSDCDMNSGNIKWFDGGKLNVSVNCVDRHAAKHPDKVALIWEKDEPGNTEKVTYSQLLAMVCKISNCLKDSGVKRGDRVAIYMPVSPIAVAAMLACTRIGAVHSVVFAGFSADALAQRIQDAGVETILTTDQGVRGGKVIELKKTVDAAVQKCPSVKRVFVSKRTGENAPKTNLDIDLDAAMKTASENFTPEVMDSEDLLFMLYTSGSTGKPKGIVHTQAGYLLYASMTQKYVFDYHDGDIFGCVADIGWITGHSYVVYGPLSNGATTVLFESIPTYPDPGRYWEMVERLKINQFYGAPTAIRLLLRYGDSFVKKYDRSSLKVLGSVGEPINHEAWEWYHNVVGDGKCDVVDTWWQTETGGIAVTPRPSGPNDKIIPAAPMRAFFGIQPAILGSEQEDLQGVNEGALCIKNPWPGMARTIYGDHERFMDTYYRPFPGHYFSGDGAKRDEEGFIHITGRMDDVLNISGHRLGTAEVEDVLDEHPDVAEAAVVGVPHAVKGEEAFAFVTVKENFSRDHETLVKELQGLVRERIASFAVPSQMLVTEGLPKTRSGKIMRRILRKVAAGQVDDLGDISTLADPTVVQSLSIRRRNMDK

SEQ ID NO: 151136 - DNA, 2022 bp, Ciona intestinalis
  CDS (1)..(2022)
atggccgataaaatagaaaaatatcttcccccaacttcaataagtgaagtttcccacgttaaaacgatggaccaatacaaggaaatgtacaagcaaagtgttgaagaaccggggaagttttggggcaagattgcagaaaccttctattttaaaaagcagcacgaaggtgaattttttgactacaatctggatatacgaaaaggggaagtttacattcgatgtttatctgatgcaacaaccaatatctgctataattgtcttgatagaaatgtgaagagtgggcatggtgatacaattgcattttattgggaaggcaatgatccaatggacagtaccagcatcacatacaagaagttactggatgaggtgtgcaagttttcaaatgtactgaaatccctgggtgtaaagaagggtgacagagtagccatctacatgcccatgatacttgagcttgtggtggcaatgcttgcttgtgcaaggataggagctgtacattcaattgtgtttggaggcttttcagctgaagcactgagcagtagaatacttgatgcaaaatgtgatgtccttgttacagcagatggtgtgtaccggggcacaaagttaattgatttaaaatcaattgctgatgaagctttagaactttgtactaaagatggacattctgtatctgcatgtgtggtggtgaaacatataactgcaaatagttattgtgatgataagactgaacgtccagcaatgagaccttactctggtttcaagatgagttggaacaaagctgtggatcgttcatgggaagatttgatgcaatccgcatccaatgaatgtgagcctgaatggatgaacagtgaagatcctttgtttattctttatacaagcggatcaactggtattcctaagggtgttctacaccatgttagtgggtacatgttgtatgcggcaacgacacacaaatatacattcgattaccactgtggtgaggtctacttctgcaccgcagacataggatggataactggccacacttatattacatacggtccattacttaactgtgctacttcagtgatgtttgaaggtacccccctctttccagacgccagcagatactgggcaatcgtagataaatataaagtttctaagttctacacagctccaacggctatcaggtctcttatgaaatatggagaagaaccaatcagaaaatacagccgatcttcactgaaggttcttggcacagttggtgaacccatcaacccagaagcttggttgttctaccacaaagttattggaaatgaaagttgtagtattgtggacactttctggcaaactgaaactggcggccatgtattgacccccttcccaggatgcacaccaaccaaacctggttccgcaaccttcccattctttggcattgtacctgccatattatcagatgaaggggtggaaattgaaggacctggggagggttatttggtattcaagcagccatggccaggtatgatgcgaacagtgtttggtgatcataaacgttttgaacgaacatatttcaccaagttccccgggtattatgtacctggtgatggatgtaagagagatgaggatggctatatttggatcactggaagaattgatgacatgattaatgtatcaggccacctactaagcactgcagaagttgaatcgtcattgatagaacatccacaagtagctgaagctgccgtggtatcaaaaccacacagtgtgaagggagaatgtctttattgttttgtcacagtactacaggggtcagagttcaacaaagaattggtcaaagaattaaaagaaaaagtccgccaccacattggagcattcagcacaccagattacatacagaatgcaccgggccttcctaaaactagatctgggaaaatcatgcgtcgggtattacgtaacgttgctaagggcaaccgtgacctgggtgacgtatcgacgatggctgatgcctcagttgttgaagttcttttccaaaacagagttgaataa

SEQ ID NO: 151137 - protein, 673 aa, Ciona intestinalis
MADKIEKYLPPTSISEVSHVKTMDQYKEMYKQSVEEPGKFWGKIAETFYFKKQHEGEFFDYNLDIRKGEVYIRCLSDATTNICYNCLDRNVKSGHGDTIAFYWEGNDPMDSTSITYKKLLDEVCKFSNVLKSLGVKKGDRVAIYMPMILELVVAMLACARIGAVHSIVFGGFSAEALSSRILDAKCDVLVTADGVYRGTKLIDLKSIADEALELCTKDGHSVSACVVVKHITANSYCDDKTERPAMRPYSGFKMSWNKAVDRSWEDLMQSASNECEPEWMNSEDPLFILYTSGSTGIPKGVLHHVSGYMLYAATTHKYTFDYHCGEVYFCTADIGWITGHTYITYGPLLNCATSVMFEGTPLFPDASRYWAIVDKYKVSKFYTAPTAIRSLMKYGEEPIRKYSRSSLKVLGTVGEPINPEAWLFYHKVIGNESCSIVDTFWQTETGGHVLTPFPGCTPTKPGSATFPFFGIVPAILSDEGVEIEGPGEGYLVFKQPWPGMMRTVFGDHKRFERTYFTKFPGYYVPGDGCKRDEDGYIWITGRIDDMINVSGHLLSTAEVESSLIEHPQVAEAAVVSKPHSVKGECLYCFVTVLQGSEFNKELVKELKEKVRHHIGAFSTPDYIQNAPGLPKTRSGKIMRRVLRNVAKGNRDLGDVSTMADASVVEVLFQNRVE

SEQ ID NO: 151138 - DNA, 2007 bp, Penicillium marneffei ATCC 18224
  CDS (1)..(2007)
atgtcggaaggagatgtcatgcctcctaagggcccagtggtcgcagaggcccatgaagtagacaccttccatgtcccccaggctttccacaagaagcaccctaccaggccacatctgagttttggagaatacaagaagctctatgaagaatcaattcgacagcccgacgtcttctgggctcgaatggcacgcgagctccttacctttgaaaaagacttccacaccacacacgtcggctccttcgagcacggagacaacgcctggtttttgggcggcaagctgaacgcttctttcaactgtgttgatcgccatgccatcaagaacccggacaaagtggccattatctacgaggccgatgagcccagtgagggccgcagcatcacatacggagagttgctccgcgaggtatccagagttgcttgggtgctcaagtcgcaaggtgttcgcaagggtgacaccgttgccatttatcttcctatgattcccgaggcgctcgttgctttcttggcttgcgcgcgtattggtgccgtccactccgtggttttcgctggattttcatccgattcattgcgtgaccgcgttctcgatgcaaactccaagtttgtcattactgccgatgagggcaagcgtggtggaaagattattggcacaaagaagatcgtcgacgaggctttgaagcagtgccccgacgtcacaaatgttcttgtctttaagcgcaccggcgccgatgtcccatggaccaagggtcgtgacttgtggtggcacgaggaggtcgagaaataccccaactacattgctcctgagactgtggactccgaggatcctcttttccttctatatacgtccggttctaccggtaagcccaagggtgtcatgcacacaactgccggttatttgcttggcgctgccatgactggcaaatatgtctttgacatccacgacgatgatcgctatttctgcggtggtgatgtgggttggattactggccacacctatgtcgtctacgctcctttgcttttgggtgtggcaactgtcgtgttcgagagtactcctgcctaccctaacttctcgcgttactgggatgttattgagaagcacaaagttactcaattctacgttgctcccactgcacttcgtctgctcaagcgtgctggagatgagcatattcatcacaagatggagcaccttcgtgtgctcggatctgttggtgaacctattgccgctgaggtttggaagtggtactttgagagtgtcggtaaggaggaagctcacattgtcgatacttactggcaaaccgaaaccggatcaaacatcatcactccattgggtggtgttactcctaccaagcctggcagtgcatctcttccattctttggcatcgagcccgctattattgaccctgtatctggcgctgagattaccggaaacgacgttgagggtgttttggctattaaacaaccatggcccagcatggctcgtaccgtctggggtgctcacaagcgttacatggacacatacctgaatgtgtacaagggctactacttcactggcgatggagctggccgtgaccacgaaggatactactggatccgtggccgtgttgacgatgtcgtcaatgtttccggtcacaggctttcaactgctgagattgaagctgctctccttgagcatcctatggtcgcggaagccgccgtcgttggtgttgctgatgagctcaccggacaagctgtaaatgcctttgtctcgctcaagagtggcaatgaatctaccgagcaagtccgcaaagacctcatcatgcaagtacggaagtcaattggacctttcgctgctcccaaacaaatcatccccgttgatgaccttcccaagactcgcagtggcaaaatcatgcgtcgtattctccgcaagattcttagtggcgaggaggatagccttggcgatacttctacgctctcggatcctagcgtcgtggacaagatcaccgaagcagtcaaagctctgcgcaagtaa

SEQ ID NO: 151139 - protein, 668 aa, Penicillium marneffei ATCC 18224
MSEGDVMPPKGPVVAEAHEVDTFHVPQAFHKKHPTRPHLSFGEYKKLYEESIRQPDVFWARMARELLTFEKDFHTTHVGSFEHGDNAWFLGGKLNASFNCVDRHAIKNPDKVAIIYEADEPSEGRSITYGELLREVSRVAWVLKSQGVRKGDTVAIYLPMIPEALVAFLACARIGAVHSVVFAGFSSDSLRDRVLDANSKFVITADEGKRGGKIIGTKKIVDEALKQCPDVTNVLVFKRTGADVPWTKGRDLWWHEEVEKYPNYIAPETVDSEDPLFLLYTSGSTGKPKGVMHTTAGYLLGAAMTGKYVFDIHDDDRYFCGGDVGWITGHTYVVYAPLLLGVATVVFESTPAYPNFSRYWDVIEKHKVTQFYVAPTALRLLKRAGDEHIHHKMEHLRVLGSVGEPIAAEVWKWYFESVGKEEAHIVDTYWQTETGSNIITPLGGVTPTKPGSASLPFFGIEPAIIDPVSGAEITGNDVEGVLAIKQPWPSMARTVWGAHKRYMDTYLNVYKGYYFTGDGAGRDHEGYYWIRGRVDDVVNVSGHRLSTAEIEAALLEHPMVAEAAVVGVADELTGQAVNAFVSLKSGNESTEQVRKDLIMQVRKSIGPFAAPKQIIPVDDLPKTRSGKIMRRILRKILSGEEDSLGDTSTLSDPSVVDKITEAVKALRK

SEQ ID NO: 151140 - DNA, 1899 bp, Hydra magnipapillata
  CDS (1)..(1899)
atggagggctacaacgccctgtgtgcggaggctgagaaagattttgaaggtttctggtcccgactggccaaagccaatgtggtttggaacaagccattcacacgcacactcgacgaatccaatgcacctttctacaaatggtttgacgatggcgagctgaacgcctctgccaactgccttgacaagcacatcggcacgcccacagaaaacaaagtggccgtgatcttcgaagccgatgacggcaaagtcaccaagaccacctacaaagagctgcttgcccgagtcagtcaatttgccaacgccttgaaggccgatggcatcaagaaaggcgaccgcgtactggtctacatgcccatgacgctggagggcgtgatcgccatgcaagcctgcgcccgtatcggcgccacccacagtgtggtgttcggcggcttctctgcgaaagcattgcaggagcgcatcattgacgcaggcgcggtggctgtcatcaccagcaactaccagatgcgcggcggcaaagagttgcctctgaaatccattgtggacgagggcattgccatgggtggctgcgagtccatcaagacggtgtatgtgtaccagcgcacccagaccgcatgcaacatggtggcagggcgcgacaagacctttgatgaagcactggccggccagagcactgactgcgcccccgtgcctgtaggcgctgagcaccccttgttcatcctttacacctcgggttcaaccggcaagcccaagggtgtgcagcactccaccggcggctacctgctgtgggccaagctcaccatggactggacgtttgacctgaagccggaagatgtgttctggtgcacggccgatatcggctggattactggccacacctacgtggcctacggccccttggccgctggcgccacccagatcatttttgaaggcgtgccaactttcccgaatgcaggtcgcttctggcaaatgattgagcgccacaagtgcaccatcttctacacagcgcccacggcaatccgttcgttgatcaaggctgcagaggctgatgccgctgtgcatccggatcgttctgacctgtcgtccttgcgcattctgggatcagtgggtgagcccatcaaccccgaagcctggatgtggtactacaaaaacgtgggtcacgaaaagtgcccgattgtggataccttctggcaaaccgaaaccggtggccacatgatgagccccatgccaggtgccacacctttggtgcccggtagttgcactttgcctttgcccggcatcatggcggccatcgtggatgaaagcggcaacgaaatgcccaatggatccggtggcattctggtggtgaagcgcccatggccctcgatgatccgcacgatctggaacgatcctgagcgtttcaaaaagagctactttcctgacgagctcaaaggctattacttggccggcgacggcgcagtgcgtagcgcggaccgcgggtacttccgtattaccggtcgtatcgacgacgttctcaacgtgtccggtcaccgtatgggtaccatggaaattgagtctgcgttggttgccaaatccgatctggttgccgaggccgcggtggtgggccgtcctgatgacctgacgggtgaagccatttgcgccttcgtggtgctcaagcgctcccgtcctgaaggcgacgaggccaaggcgattgccaaagagttgcgtgattgggttgccaaggaaatcggcccgattgccaagcccaaggacatccgcttcggcgagaacttgcctaaaacccgttccggcaagatcatgcgccgattgctgcgttcgctggccaagggcgagtccatcacgcaggacaccagcacgctggaaaacccggcgattctggatcagttgggtcaagcctactga

SEQ ID NO: 151141 - protein, 632 aa, Hydra magnipapillata
MEGYNALCAEAEKDFEGFWSRLAKANVVWNKPFTRTLDESNAPFYKWFDDGELNASANCLDKHIGTPTENKVAVIFEADDGKVTKTTYKELLARVSQFANALKADGIKKGDRVLVYMPMTLEGVIAMQACARIGATHSVVFGGFSAKALQERIIDAGAVAVITSNYQMRGGKELPLKSIVDEGIAMGGCESIKTVYVYQRTQTACNMVAGRDKTFDEALAGQSTDCAPVPVGAEHPLFILYTSGSTGKPKGVQHSTGGYLLWAKLTMDWTFDLKPEDVFWCTADIGWITGHTYVAYGPLAAGATQIIFEGVPTFPNAGRFWQMIERHKCTIFYTAPTAIRSLIKAAEADAAVHPDRSDLSSLRILGSVGEPINPEAWMWYYKNVGHEKCPIVDTFWQTETGGHMMSPMPGATPLVPGSCTLPLPGIMAAIVDESGNEMPNGSGGILVVKRPWPSMIRTIWNDPERFKKSYFPDELKGYYLAGDGAVRSADRGYFRITGRIDDVLNVSGHRMGTMEIESALVAKSDLVAEAAVVGRPDDLTGEAICAFVVLKRSRPEGDEAKAIAKELRDWVAKEIGPIAKPKDIRFGENLPKTRSGKIMRRLLRSLAKGESITQDTSTLENPAILDQLGQAY

SEQ ID NO: 151142 - DNA, 1992 bp, Schizosaccharomyces japonicus yFS275
  CDS (1)..(1992)
atgacaaaagttactactactgccgttgagcaaatgattatccaacccccctcccgcttctacgaggactcctcgctccccaagcccaacatctcgtcgctggacgagtacaaggcgatgtacgagcagtccatcaagaaccccaacaagttttggggagacatggcccgcgaagtgattgactgggaccgtgacttttccacagtgctccagggaagtctgcaggctgcagactttgcatggttcgccgacggaatgctctcgccctgctacaacgtgcttgaccgccatgccattgcaagacccgatgccacggccatcatctacgaggccgacgagcccaaccaaggccgccacatcacctaccgccagctgcttgctgatgtgtgtcagtgtgccggagctttggcttctcttggtgtcggcaagggcgatcgtgtggccatctacatgcccatgatcccggctgtcgttgtcgccatgctggccaccattcgtcttggtgccgtccacaccgttgtctttgctggtttctccgcagagtcgctcgccgaccgtgtgaacgatgccggctgcaaggtggtcatcacctccgatgtcagttaccgtggcagcaaggtgatccccttgaagaacattgtcgacaaggccgttcccaactgtccctcggtcaccaacgtcctcgttttccaacgctctgccgctcctacggcctctatggtcgacggacgtgatatttggtggcaggacatcgtccccaagttcccccgttacattcccaatgtcagcgtgtccgccgagcatccccttttcctcctttacacttctggcagtaccggtaagcccaagggtgtcgtccacaccacggccggttaccttctcggtgcccacgccacctgtaaatacgtctttgaccttcaccctaccgaccgcatgggctgtgccggcgatgtcggctggattaccggccacacttacattgtgtacggtcccctcatgatgggtgctgccactcttgtgttcgagagtacccccgcctatcccgactttactcgttactggagcaccgttgagcgtcacaagttgacgcaatggtacgtcgcacccactgccatccgtttgctccagcgtgccggcgagtccttcgtcaagcacgacacctcctctctccgtgtcctcggcagtgtcggtgagcctattgctcctgaaaactttatgtggtaccatgatgttgttggtaagaagagctgtgctgttgctgacacctactggcaaacggaaacgggttcgcacattgtcgctcccatcagtaccgttacccccaccaagcccggttccgccacgcttcccttcttcggcatcgacttggccattgttgatcctttgactggtaaggagttggagggcaatgatgtcgagggtgtcttggctgtcaagcagccctggcccagtgcagccagaaccgtctggcgcggtcatgaccgttacattgacacttacctcaagccctaccctggcttctacttcaccggcgatggtgccgctcgcgatagcgatggctacatctggatccgcggccgtgtcgatgatgttgtgaacatctccggtcatcgtttgagtacgtccgagattgaggctgccttgatgacgcacgctgctgttgctgaggccgctgttgtcggtgtgcctgatgagttgacgggtcaagccgtcaacgccttcatcttgctcaaggacggcttcgaggtgaatgccgagttagagaaggagctcatcttgaccgttcgtacccaaattggaccttttgccagtcccaagaagcttatcttcagtgacctccccaagactcgcagtggaaagatcatgcgtcgtatcctgcgtaaggttcttgctggcgaagaggatcaattgggtgacgttagcactttggccgatcccaaggttgtccacgacatcattcacgctgtccaccgtgcccacggtagagcgtaa

SEQ ID NO: 151143 - protein, 663 aa, Schizosaccharomyces japonicus yFS275
MTKVTTTAVEQMIIQPPSRFYEDSSLPKPNISSLDEYKAMYEQSIKNPNKFWGDMAREVIDWDRDFSTVLQGSLQAADFAWFADGMLSPCYNVLDRHAIARPDATAIIYEADEPNQGRHITYRQLLADVCQCAGALASLGVGKGDRVAIYMPMIPAVVVAMLATIRLGAVHTVVFAGFSAESLADRVNDAGCKVVITSDVSYRGSKVIPLKNIVDKAVPNCPSVTNVLVFQRSAAPTASMVDGRDIWWQDIVPKFPRYIPNVSVSAEHPLFLLYTSGSTGKPKGVVHTTAGYLLGAHATCKYVFDLHPTDRMGCAGDVGWITGHTYIVYGPLMMGAATLVFESTPAYPDFTRYWSTVERHKLTQWYVAPTAIRLLQRAGESFVKHDTSSLRVLGSVGEPIAPENFMWYHDVVGKKSCAVADTYWQTETGSHIVAPISTVTPTKPGSATLPFFGIDLAIVDPLTGKELEGNDVEGVLAVKQPWPSAARTVWRGHDRYIDTYLKPYPGFYFTGDGAARDSDGYIWIRGRVDDVVNISGHRLSTSEIEAALMTHAAVAEAAVVGVPDELTGQAVNAFILLKDGFEVNAELEKELILTVRTQIGPFASPKKLIFSDLPKTRSGKIMRRILRKVLAGEEDQLGDVSTLADPKVVHDIIHAVHRAHGRA

SEQ ID NO: 151144 - DNA, 2127 bp, Vitis vinifera
  CDS (1)..(2127)
atggcgacgtctccggcatcttcatcgccgcagcggaagattctcaagacctcgaatcacctccgccacgtggattcaatgtcggttaagccttccggcgctggcaaggtgtcgcagttgaacgctgtcatactgggcgaagcgctcgcttccgaggcgcatgatctcgtctttcccagtcgtgacttctcctcacaagctctcgtctcctctcccgaaaagtatgaggagatgtacaaaaggtcagttgaggatccagctggattttggtccgacattgcttccgatttctactggaaagagaaatggagccagccagtctgctctgagaatcttgacgtcaggaatggaaatatcaagattgagtggttcaagggaggaagaaccaacatttgctacaactgcttggatcgaaacattgaaagtggaaatggtggcaaagttgcaatctactgggaaggaaatgagcctggttttgatgcttctttaacgtatgcccagctactggacaaagtgtgtcagcttgcaaattacttgaaagatatgggtgttagaaagggtgatgctgtagtgatctatttacccatgttaatggaactcccaatcgcaatgcttgcatgtgctcgcattggtgctgtacactcggtagtatttgcaggattttcctcagagtctcttgctcagagaatcgtagattgcaaaccaaaagtcgtgataacttcaaatgctgttaaaagaggtcctaaggttatttccctcaaagacatagttgacgctgcccttgttgagtcagccaaaaatgggatctctgtagatgcatgcttaacctatgaaaatcaatctgcgatgaagagggaaactactaaatggcaggaaggaagagacatttggtggcaggatgttgttcctaaatatccaactacttgtgatgtggagtgggttgatgcagaagatccactttttctgctctatacaagtgggagcacgggaaagcccaagggtgttctgcacacaactggaggatatatgatatatactgcgacaacattcaaatatgcatttgactacaagccgtctgatgtatactggtgtacagctgactgtggttggattacaggacacagctatgttacttttggacctatgcttaatggggcgactgttattgtttttgaaggggctccaaattatccagattctggacgttgttgggacattgtagacaaatacaaggtgacgatattctatactgcccccactttggtgcgctccctcatgcgtgatggtgatgagtatgtcactcgttattcacgcaaatctttacgggttcttggaagtgtaggcgagccgatcaatccaagcgcatggaggtggtttttcaatgttgttggagactcaaggtgtcctatatctgacacttggtggcaaacagagacgggtggcttcatgattactcctttaccaggtgcctggccccagaaaccaggttctgctacttttcctttctttggtgttcagcctgttatagtggatgagaagggcattgagattgaaggtgagtgtaatgggtatctgtgtgtgaaaagctcatggcctggggcattcagaactctttatggtgatcatgatagatatgaaacaacctacttcaaggcatttcctggctattactttagtggtgatggctgcagcagggacaaggatggatattactggctgactggaagagtagatgatgtcatcaatgtcagtggacatcgaattggcacagcagaggtggaatctgcacttgtctcgcatccgaaatgtgctgaagctgctgtagttggtgttgagcatgaggtaaaagggcagggcatatatgcatttgttactctagtagagggtgttccttacagtgaagaacttcggaaaagccttatcatgactgtgcgaagccagataggagcatttgctgcacctgacagaatccattgggcccctggccttccaaaaacaaggagtggaaagataatgaggaggattctgaggaagattgcttccaggcagttaaatgaacttggtgacacaagtacactagcagatccgaatgtggttgatgagcttattaaacttgctgattcataa

SEQ ID NO: 151145 - protein, 708 aa, Vitis vinifera
MATSPASSSPQRKILKTSNHLRHVDSMSVKPSGAGKVSQLNAVILGEALASEAHDLVFPSRDFSSQALVSSPEKYEEMYKRSVEDPAGFWSDIASDFYWKEKWSQPVCSENLDVRNGNIKIEWFKGGRTNICYNCLDRNIESGNGGKVAIYWEGNEPGFDASLTYAQLLDKVCQLANYLKDMGVRKGDAVVIYLPMLMELPIAMLACARIGAVHSVVFAGFSSESLAQRIVDCKPKVVITSNAVKRGPKVISLKDIVDAALVESAKNGISVDACLTYENQSAMKRETTKWQEGRDIWWQDVVPKYPTTCDVEWVDAEDPLFLLYTSGSTGKPKGVLHTTGGYMIYTATTFKYAFDYKPSDVYWCTADCGWITGHSYVTFGPMLNGATVIVFEGAPNYPDSGRCWDIVDKYKVTIFYTAPTLVRSLMRDGDEYVTRYSRKSLRVLGSVGEPINPSAWRWFFNVVGDSRCPISDTWWQTETGGFMITPLPGAWPQKPGSATFPFFGVQPVIVDEKGIEIEGECNGYLCVKSSWPGAFRTLYGDHDRYETTYFKAFPGYYFSGDGCSRDKDGYYWLTGRVDDVINVSGHRIGTAEVESALVSHPKCAEAAVVGVEHEVKGQGIYAFVTLVEGVPYSEELRKSLIMTVRSQIGAFAAPDRIHWAPGLPKTRSGKIMRRILRKIASRQLNELGDTSTLADPNVVDELIKLADS

SEQ ID NO: 151146 - DNA, 2055 bp, Populus trichocarpa
  CDS (1)..(2055)
atggcgacggataataagctgaggcacgtgacatcaatgctggagttgccgtctggagccggcaagttttctgccctccacgccgttatattaggagaagcacttgcttctgaagagaacgatcttatctttcctagcgatgatttcgctcgtcaagctcatgtttcctctcctcaacagtacttggagatgtacaaaaggtccgttgaagatccggctggtttttggtccgatattgcttctcagttctattggaaaaagaaatgggatcaacctgcttgctctgagaattttgactttcgcaaaggcaatatcagtattcagtggttcaagggaggcttgaccaacatttgctacaactgtttagacagaaatattgaatcaggaaatgctgataagattgccatttattgggaaggcaatgatcctggtttggaagacagtttaacctactcccagctcctcgacagagtttgccagctatcaaattacttgaaagatgttggtgttaagaagggcgatgctgttgttatttatttaccaatgctcatggagctccccattgccatgctcgcttgtgcccgtattggtgctgttcactcggttgtatttgcaggattttcttcagaatctcttgctcagagaatcgtagactgcaaaccaaaagttgtgattacttgtaatgctgtcaaaagaggtgccaaggctatacaccttaaagacattgttgatgccgcccttgctgaatctgcaaaaaatggaatatctgtagatgtatgcctaacttatgaaaacgaaaatgccatgaagagggaaggcactaaatggcaggagggaagagatgtctggtggcaggactttgtccccaagtatcctactacttgtgaggtggagtgggttgatgcagaggatcccctttttctgctatatactagtggaagcacaggaaagccaaagggagttcttcatacaacgggaggatacatggtttactctgcaacaacattcaagtatgcttttgattacaaaccatctgacgtctactggtgcacagctgattgtggttggatcaccgggcatagctatgtgacttacggacccatgcttaatggagcatctgttgtcgtatttgaagggactccaacttatcctgatgctgggcgatgttgggatattgttgacaaatttaaggtgacaatattctacactgcccctaccctgtttgttactcgctattcacgcaagtccttacgcgtccttggaagtgtaggcgagcccattaacccaagtgcatggaggtggtttttcaatgtagttggagactcacggtgccctatatctgacacttggtggcaaactgaaactggtggtttcatgattactccactaccaggtgcctggccacagaagcctggttctgctactttccctttctttggtgttcagcctgtcattgttgatgagaagggtgttgagattgaaggagagtgcagtgggtatttgtgtttaaaaagctcatggcctggtgcattccgaactctttatggggatcatgaacgatatgaaaccacgtacttcaagccatttgctggctattattttactggtgacggctgtagcagggacaaagatggataccactggctaaccggaagagttgatgatgtcatcaatgtgagtggtcatcgtattggaactgctgaagttgaatctgctcttgtttcacatccaaaatgtgcagaagctgctgtggttggtgttgagcatgaggttaaaggacaggggatttatgccttcgttacccttgtggaaggtgaaccttacagcgaagaacttcggaaaagtcttatactcacagtgcggaagcagataggagcatttgcagcacctgataaaattcactgggctcctggccttccaaagacaaggagtggaaagataatgaggagaattttgaggaaaattgcttccaagcagttagatgaactcggagacaccagcacacttgcggaaccacatgtggtggagcaactcatagaacttgctgattgctga

SEQ ID NO: 151147 - protein, 684 aa, Populus trichocarpa
MATDNKLRHVTSMLELPSGAGKFSALHAVILGEALASEENDLIFPSDDFARQAHVSSPQQYLEMYKRSVEDPAGFWSDIASQFYWKKKWDQPACSENFDFRKGNISIQWFKGGLTNICYNCLDRNIESGNADKIAIYWEGNDPGLEDSLTYSQLLDRVCQLSNYLKDVGVKKGDAVVIYLPMLMELPIAMLACARIGAVHSVVFAGFSSESLAQRIVDCKPKVVITCNAVKRGAKAIHLKDIVDAALAESAKNGISVDVCLTYENENAMKREGTKWQEGRDVWWQDFVPKYPTTCEVEWVDAEDPLFLLYTSGSTGKPKGVLHTTGGYMVYSATTFKYAFDYKPSDVYWCTADCGWITGHSYVTYGPMLNGASVVVFEGTPTYPDAGRCWDIVDKFKVTIFYTAPTLFVTRYSRKSLRVLGSVGEPINPSAWRWFFNVVGDSRCPISDTWWQTETGGFMITPLPGAWPQKPGSATFPFFGVQPVIVDEKGVEIEGECSGYLCLKSSWPGAFRTLYGDHERYETTYFKPFAGYYFTGDGCSRDKDGYHWLTGRVDDVINVSGHRIGTAEVESALVSHPKCAEAAVVGVEHEVKGQGIYAFVTLVEGEPYSEELRKSLILTVRKQIGAFAAPDKIHWAPGLPKTRSGKIMRRILRKIASKQLDELGDTSTLAEPHVVEQLIELADC

SEQ ID NO: 151148 - DNA, 2007 bp, Talaromyces stipitatus ATCC 10500
  CDS (1)..(2007)
atgtctgaaggcgatgttacgcctccaaaggcccctgtggtcgcagaggcccatgaagtcgacacgttccacgtcccctcagcttttcacaaaaaacacccgaccaggcctcacctgagttttggagaatacaagaagctctaccaggagtccattcggcacccagacatcttctgggctcgcatggctcgtgagctcctcacattcgaacaagacttccacaccacccatgtcggttctttcgagcagggagacaacgcttggttcttgggaggcaagttgaacgcttctttcaactgtgtcgaccgccatgcaatcaagaatccagacaaagtcgccatcatctacgaggcagatgagcccaccgagggtcgcaccatcacatactccgaattgctccgtgaggtctcgaaagtggcgtgggtgctcaagtcgcaaggtgttcgcaaaggtgataccgttgctatctaccttcctatgattccagaggcacttgttgcgttcttggcttgcgcccgtattggtgccgtgcactctgtggtgttcgcgggcttttcttccgattccttgcgtgaccgtgttctcgatgccaactccaagtttgtcattactgccgacgagggtaagcgtggtggaaagattattggtacaaagaagatcgtggacgaggccttgaagcagtgccccgacgtcaagaacgttcttgtcttcaaacgcaccggtgccgatgttccatggaccaaaggtcgcgacttgtggtggcacgacgaggtcgagaaataccccaactacattgctcccgaagctgttgactctgaggaccctctcttcctcctgtacacgtccggttctacgggtaagcccaagggtgtcatgcacacaactgccggttacttgctcggtgctgccatgactggaaagtacgtatttgacattcacgacgacgatcgctttttctgcggcggtgacgtcggttggattactggacatacctacgtcgtctatgctcctttgctgcttggtgtggcaactgtcgtcttcgagagcactcctgcctatcccaacttctctcgttactgggatgtcattgagaagcacagtgtcactcagttctatgttgcccccactgcacttcgccttctgaagcgcgctggtgatgagcacatccaccacaaaatgcagcaccttcgtgtccttggatcagtcggtgagcccattgctgcagaggtctggaagtggtactttgagagcgttggtaaggaggaagctcacattgtcgatacttactggcaaaccgaaaccgggtcaaacatcatcactcccttgggtggcgttactcctaccaagcctggtagtgcgtctcttccattctttggcatcgagcccgctattattgatcctgtctctggcgctgagattactgggaacgacgttgagggtgttttggctatcaaacaaccatggcccagtatggctcgcaccgtctggggtgctcataagcgatacatggatacatacctgaatgtgtacaagggctactacttcactggtgatggtgctggccgtgatcacgaaggatactactggattcgtggacgtgttgacgatgtcgtcaatgtttccggacacagactttcaactgctgagatcgaagctgcccttctcgagcatcccatggtcgccgaagccgccgtcgttggtattgcagatgagctcactggacaagccgtgaatgcctttgtctctctcaagagcggcaatgaatctaccgaacaagtccgcaaagacctcatcatgcaagtgcgcaagtcaattggacctttcgctgctcccaagacaattatccccgtcgatgatcttcccaagacccgcagtggcaagatcatgcgccgtatcttgcgtaagattctcagtggtgaggaggacagcttgggtgatacatctacgctctcggaccccagcgtcgtggacaagatcacggaagcagtcaaagctttacgcaagtaa

SEQ ID NO: 151149 - protein, 668 aa, Talaromyces stipitatus ATCC 10500
MSEGDVTPPKAPVVAEAHEVDTFHVPSAFHKKHPTRPHLSFGEYKKLYQESIRHPDIFWARMARELLTFEQDFHTTHVGSFEQGDNAWFLGGKLNASFNCVDRHAIKNPDKVAIIYEADEPTEGRTITYSELLREVSKVAWVLKSQGVRKGDTVAIYLPMIPEALVAFLACARIGAVHSVVFAGFSSDSLRDRVLDANSKFVITADEGKRGGKIIGTKKIVDEALKQCPDVKNVLVFKRTGADVPWTKGRDLWWHDEVEKYPNYIAPEAVDSEDPLFLLYTSGSTGKPKGVMHTTAGYLLGAAMTGKYVFDIHDDDRFFCGGDVGWITGHTYVVYAPLLLGVATVVFESTPAYPNFSRYWDVIEKHSVTQFYVAPTALRLLKRAGDEHIHHKMQHLRVLGSVGEPIAAEVWKWYFESVGKEEAHIVDTYWQTETGSNIITPLGGVTPTKPGSASLPFFGIEPAIIDPVSGAEITGNDVEGVLAIKQPWPSMARTVWGAHKRYMDTYLNVYKGYYFTGDGAGRDHEGYYWIRGRVDDVVNVSGHRLSTAEIEAALLEHPMVAEAAVVGIADELTGQAVNAFVSLKSGNESTEQVRKDLIMQVRKSIGPFAAPKTIIPVDDLPKTRSGKIMRRILRKILSGEEDSLGDTSTLSDPSVVDKITEAVKALRK

SEQ ID NO: 151150 - DNA, 2133 bp, Aspergillus flavus NRRL3357
  CDS (1)..(2133)
atgctgaccttcctttccggaaccagaaaccctctctttcctcttaatcctcttcttaagactgtcgtgtctcgacgtctctcgtctagctcaagcatctccctgacgcgcaaacgaatcatggctgacggcaacgtgatgccccctaagccctctgtggtgctggaagcccacgaggtcgatactttccatgtccccaaggctttctacgagaagcacccaactggcactcacttgaaagacctggatgaatataagaagctctatgacgaatcaattcgcagtcctcaaaccttctgggcccgcatggcccgtgaactcctttccttcgacaaagactttcaaactacccacactggttctctggagaacggcgacagtgcctggttcgtggaaggccgcttaaatgctgcctacaactgcgtggaccgtcatgctctcaagaaccccgacaaggttgcgatcatttacgaggctgatgagccgaatgagggccgtactattacctacggggagctgcttcgtgaagtatctcgagttgcctgggtgcttaaacagcaaggtgtcaagaaaggtgatactgtagctatctatcttcctatgattccggaggccgttgtagccttcttggcctgttcccgcattggtgccatccactccgtggtgtttgcaggattctcgtcagactcgctccgtgaccgtgttatcgacgccggatctaaagtggtcatcaccaccgacgagggcaagcgtggcggcaaggtgattggcaccaagcgtattgttgacgaggctttgaagcagtgccccgacgttacaagcgtgttggtctacaagcgcaccggtactgaggtcccctggacccaaggtcgtgatgtctggtggcacgaggaggtggagaagtaccccaattacttccctcccgagtccgtgagctccgaagaccccctgttcctgctttacacttctggttcgacaggaaagcccaagggtgttatgcacaccaccgctggatatctcctgggtgccgctatgaccggcaagtatgtctttgatatccacgacgacgatcgctttttctgtggtggtgacgtcggttggatcactggtcatacctatgttgtgtatgctcctttgctcctgggatgctccaccgtcgtctttgagagtaccccagcgtaccccaacttttctcgctactgggatgttattgagaaacaccaggtgactcagttctacgtcgctcctacagcattgcggttgttgaagcgcgctggagacgagcacattcaccacaagatggctcacctgcgtatcctgggctccgtcggtgagcctatcgctgcagaggtttggaagtggtatttcgagaaggtcggaaaggaagaggcacacatttgcgatacctactggcagaccgaaactggttcgaacgtcatcacacctttgggtggaattacccctacgaaacccggtagtgcctcgttgccgttcttcggtattgagcctgccatcattgaccctgtctccggagaggaaatctcgggcaatgacgtggaaggtgtgcttgccttcaagcagccctggcctagcatggcccgcactgtgtggggtgcccacaagcgttacatggatacctatctgaatgtttataagggctactacttcactggagatggagcaggacgtgaccacgacggatactactggatccgcggccgtgttgacgacgtagttaacgtatccggtcaccggctgtccaccgctgagattgaagctgccctgcttgaacaccatatggttgctgaagctgccgtggtcggtattgctgacgaactcactggccaagcggtcaatgcatttgtgtctctgaaggagggcaatgagacaaatgagcaggtccgtaaagaccttgtcatgcaggttcgcaagtcgattggaccattcgccgctcccaaggccgtctttgtcgttgatgacctccctaagactcgcagcggtaagatcatgcgacgtatcctgcggaagatcctgagcggtgaggaggacagtctgggtgatacttctaccctgtccgatccctcggtagtcgacaagatcatcgaaaccgttcacaccgcccggggcaaatag

SEQ ID NO: 151151 - protein, 710 aa, Aspergillus flavus NRRL3357
MLTFLSGTRNPLFPLNPLLKTVVSRRLSSSSSISLTRKRIMADGNVMPPKPSVVLEAHEVDTFHVPKAFYEKHPTGTHLKDLDEYKKLYDESIRSPQTFWARMARELLSFDKDFQTTHTGSLENGDSAWFVEGRLNAAYNCVDRHALKNPDKVAIIYEADEPNEGRTITYGELLREVSRVAWVLKQQGVKKGDTVAIYLPMIPEAVVAFLACSRIGAIHSVVFAGFSSDSLRDRVIDAGSKVVITTDEGKRGGKVIGTKRIVDEALKQCPDVTSVLVYKRTGTEVPWTQGRDVWWHEEVEKYPNYFPPESVSSEDPLFLLYTSGSTGKPKGVMHTTAGYLLGAAMTGKYVFDIHDDDRFFCGGDVGWITGHTYVVYAPLLLGCSTVVFESTPAYPNFSRYWDVIEKHQVTQFYVAPTALRLLKRAGDEHIHHKMAHLRILGSVGEPIAAEVWKWYFEKVGKEEAHICDTYWQTETGSNVITPLGGITPTKPGSASLPFFGIEPAIIDPVSGEEISGNDVEGVLAFKQPWPSMARTVWGAHKRYMDTYLNVYKGYYFTGDGAGRDHDGYYWIRGRVDDVVNVSGHRLSTAEIEAALLEHHMVAEAAVVGIADELTGQAVNAFVSLKEGNETNEQVRKDLVMQVRKSIGPFAAPKAVFVVDDLPKTRSGKIMRRILRKILSGEEDSLGDTSTLSDPSVVDKIIETVHTARGK

SEQ ID NO: 151152 - DNA, 2016 bp, Candida dubliniensis CD36
  CDS (1)..(2016): transl_table=12
atgccaacagaacaaactcataatatcgttcatgaagccaatggggttaaattaagacaaacccctaaagaattctttgaaagacaaccaaacaaaggtcatatccatgatgtcaatcaatacaaacaaatgtatgaagaatctattaaagatcctcaaggatttttcggtccattggctaaagaattattatcttgggatcatgatttccatactgtcaaatcgggtactttacaaaatggtgatgccgcttggtttttaggtggtgaattgaatgcttgttataattgtgttgatagacatgcatttgctaatccaaataaaccagctcttatttgtgaagctgatgaagataaagattcttttgtattgacttacggtgatttgttaagagaagtttcaaaagtggctggagttttacaatcttggggggtcaagaaaggtgatacggttgcagtttatttaccaatgaatgctcaagccattattgccatgttggctattgctagattaggagctgctcattccgtcatttttgctggattctctgctggttctattaaagatagagtcaatgatgccagttgtaaagctcttatcacttgtgatgaaggtaaaagaggtggtagaaccactaacattaagaaattatgtgatgaagctttaattgattgtccaactgttgaaaaagttttggtttataaaagaactaataaccctgaaattaaattaactgaaggtagagattattattgggatgttgaaactgccaaattcccagggtatttaccaccagtttcagtcaattctgaagatcctttgttcttattatatacttctggttctactggtactccaaagggagttgtccattctactgctggttatttattaggagctgctctttctactaaatatatttttgatatccatccagaagatattttatttactgctggtgatgttggttggattactggtcacacttatgccttgtatggaccattgttattaggtgttccaacaattatttttgaaggtactccagcttatcccgattatggaagattctggcatattgttgaaaaacacaaggctactcatttctatgttgctccaactgctttaagattattacgtaaagctggtgaacaagaaattgctaaatatgatttgagttcattaagaactttaggttctgttggtgaaccaatttctccagatatttgggaatggtataatgaatttgttggtaaaaatcaatgtcatatttctgatacttattggcaaactgaatctggttcccatttaattgctccattggctggtgttgttccaaacaaaccagggtcggcctcttatccattctttggtattgatgctgcattgattgatccagttagtggggttgaaattaaaggtaatgatgttgaaggggttttggttgtcaaagaccattggccatcaatggcaagaactgtctacaaaaatcataccaaatatatggatacctacatgaatccatatccaggattttatttcactggtgatggggctgctagagaccatgatggatattattggatcagaggtagagttgatgatgttgttaatgttagtggtcatagattatccactgctgaaattgaagcagctttaattgaagacaagaaagttagtgaagctgctgttgttggtattcatgatgatatcactggtcaagctgtcattgcatatgttgctttgaaagaaggaaatgatgaagaagattctgatgaattaagaaaagaattggttttacaagttagaaaaactattggtccatttgcggcaccaaaatctgttataatcgttcaagatttaccaaaaactagatctggtaagattatgagaagaattttaagaaaagttagttctaatgaagctgatcaattgggtgatattacaactttatctaatccacaatcagttgacggtataatttctgcttttggtgctcaattcggtaagaaataa

SEQ ID NO: 151153 - protein, 671 aa, Candida dubliniensis CD36
MPTEQTHNIVHEANGVKLRQTPKEFFERQPNKGHIHDVNQYKQMYEESIKDPQGFFGPLAKELLSWDHDFHTVKSGTLQNGDAAWFLGGELNACYNCVDRHAFANPNKPALICEADEDKDSFVLTYGDLLREVSKVAGVLQSWGVKKGDTVAVYLPMNAQAIIAMLAIARLGAAHSVIFAGFSAGSIKDRVNDASCKALITCDEGKRGGRTTNIKKLCDEALIDCPTVEKVLVYKRTNNPEIKLTEGRDYYWDVETAKFPGYLPPVSVNSEDPLFLLYTSGSTGTPKGVVHSTAGYLLGAALSTKYIFDIHPEDILFTAGDVGWITGHTYALYGPLLLGVPTIIFEGTPAYPDYGRFWHIVEKHKATHFYVAPTALRLLRKAGEQEIAKYDLSSLRTLGSVGEPISPDIWEWYNEFVGKNQCHISDTYWQTESGSHLIAPLAGVVPNKPGSASYPFFGIDAALIDPVSGVEIKGNDVEGVLVVKDHWPSMARTVYKNHTKYMDTYMNPYPGFYFTGDGAARDHDGYYWIRGRVDDVVNVSGHRLSTAEIEAALIEDKKVSEAAVVGIHDDITGQAVIAYVALKEGNDEEDSDELRKELVLQVRKTIGPFAAPKSVIIVQDLPKTRSGKIMRRILRKVSSNEADQLGDITTLSNPQSVDGIISAFGAQFGKK

SEQ ID NO: 151154 - DNA, 2031 bp, Candida dubliniensis CD36
  CDS (1)..(2031): transl_table=12
atgccggaatctactcaacaatctcatctttctttggaccatgagaagatgcaacaacctccaaaagggttcacagaacgttctaaaacgaaaccaaatttacctgattttgaaacttatgagaaattatataaacaatccattgaaaatcctaatgaatttttctctcaacaagccaaagaaaatttggattggttcaaaccatttgatttagctagatttcctgttgaccctaaagatgattacaaaaatggggatttacctgcttggtttatcaatggacaattgaatgcttgttataatgctgttgatagatgggccattaaaaaccctggtaaaccagctattatttatgaaggtgatgaacccgatcaaggtagaatcatcacttatggtgaattattaaaacaagttagtaaattggcccaagctttgactaaattgggcgtcaaaaaaggtgattcagttgcagtttatttaccaatgattcctgaagccattgtcactttattagccattgttagaattggtgccatgcactcggttgttttcgctgggttttcttctgcttcattaagagatagaattttggatgccgattcaagaattgttattactgctgatgaatctaaaagaggtggtaaaaccattgaaacgaaaaaaattgttgatgatgccttgaaagaatgtccaaaagttagaaatgtcattgttttcaaaagaactggtaattctcatgttccattttctcctggtagagatttatggtggcacgatgaaatggctaaatatggtccatacttcccaccagttccggtcaattctgaagatccattatttttgttgtatacttctggttctactggtaaaccaaagggggttcaacacaacactgctggttatttattaggtgctgttttgaccaccaagtatacttttgatgttcatgaagatgatatcttgtttactgctggtgacattggttggatcactggtcatacttattgtgtttatggtccattgttagctggtgccacttcagtggttttcgaaggtactcctgcttatccaaactattctcgatactgggaaattgttgataaatacaaagttaatcaattttatgttgccccaactgctttaagattattgaaaagggctggtaccaaatatgttgaaaaatacgatttgtcatctttaagagtattgggttcagttggtgaaccaattgctgctgaagtttggcattggtataatgataacattggtagaggtcaggctcatattgttgatacttattggcaaactgaatctggatctcacttgttgactccattggccggtattaccccaaccaaaccaggttcagcttcattaccattctttggggttgatccaaaaattttagatccaaccactggtgaagaattgcctgataatgatgttgaaggggttcttgccattaaatcagcttggccatcaattactagaggtatttataatgattacaatagatttattgatacttatttggcaccatatcagaattattatttctctggtgatggtgctgctagagatagagatggattttattggattttgggtagagttgatgatgttgttaatgtttctggtcacagattatcaactgctgaaattgaagctgctttgattgaacatccaattgtcggtgaatctgccgttgttggttatgccgacgagttgactggtcaagctgtggctgcttatgtttcattaaagaaagataaagctgttggtgaagatgtggaaaacatcaagaaagaaatgattttaacggtaagaaaagaaattggaccatttgctgcccccaaaatgattttattggttgatgatttacctaaaactagatctggtaagattatgagaagaattttaagaaaggtattggctggtgaagaagaccaattgggtgatatttcaactttatccaatccaggtgtcgttcaacaaatcatcgatgttgttcatcatgcaaagaagaaatag

SEQ ID NO: 151155 - protein, 676 aa, Candida dubliniensis CD36
MPESTQQSHLSLDHEKMQQPPKGFTERSKTKPNLPDFETYEKLYKQSIENPNEFFSQQAKENLDWFKPFDLARFPVDPKDDYKNGDLPAWFINGQLNACYNAVDRWAIKNPGKPAIIYEGDEPDQGRIITYGELLKQVSKLAQALTKLGVKKGDSVAVYLPMIPEAIVTLLAIVRIGAMHSVVFAGFSSASLRDRILDADSRIVITADESKRGGKTIETKKIVDDALKECPKVRNVIVFKRTGNSHVPFSPGRDLWWHDEMAKYGPYFPPVPVNSEDPLFLLYTSGSTGKPKGVQHNTAGYLLGAVLTTKYTFDVHEDDILFTAGDIGWITGHTYCVYGPLLAGATSVVFEGTPAYPNYSRYWEIVDKYKVNQFYVAPTALRLLKRAGTKYVEKYDLSSLRVLGSVGEPIAAEVWHWYNDNIGRGQAHIVDTYWQTESGSHLLTPLAGITPTKPGSASLPFFGVDPKILDPTTGEELPDNDVEGVLAIKSAWPSITRGIYNDYNRFIDTYLAPYQNYYFSGDGAARDRDGFYWILGRVDDVVNVSGHRLSTAEIEAALIEHPIVGESAVVGYADELTGQAVAAYVSLKKDKAVGEDVENIKKEMILTVRKEIGPFAAPKMILLVDDLPKTRSGKIMRRILRKVLAGEEDQLGDISTLSNPGVVQQIIDVVHHAKKK

SEQ ID NO: 151156 - DNA, 2079 bp, Sorghum bicolor
  CDS (1)..(2079)
atgggcgcgagcgatcacctggcggcggcggcggccgccgccaagccgcggaacggcaggccgtgcgcggccgtgctgggcgagccgctgccggcgctcgacgaccccggcctcctcgtccaccccagcgccgacttcgccgcccaggcgctcgtctcctccacacagcagtaccgggagatgtatcaaaagtcgatcgacgacccagctgggttctggtcggagatcgcggatgagttctactggaagcagaagtggagccctgatgaagtttgtgcggagaacctcgacgtgaccaaggggccgatcaagattgaatggttcaaggggggaaagaccaacatatgctacaatgcggtggaccgccatgtggaggctgggaatggggacaagattgccatgtactgggaggggaatgagcccagtcaggatgggaagctcacctactctgagctcctggaaaaggtttgccagctgtcgaattacttgaaaagcgtcggcgttggaaagggtgatgccgtggtgatctacctaccaatgttgatggagctgccgattgcaatgcttgcatgtgcccgcattggtgctgttcactcggttgtgtttgctggcttctcagccgaggcactggcccaacgagttattgattgcaagcctaaggttgttattacctgcaatgctgtgaaaagggggttgaaaatcatctttctcaaagatatagtagatgcatctctggatgaaagtgcaaagaatggagttgatgtaggcatttgcttgacatacgaaaaccagtccgcgctgaataaagtagacacgcgatggacaacaggaagagatgtttggtggcaggatgttgtgcccgatttcccaactaaatgtgatgtggaatgggttgatgcagaggatccactgtttcttttgtacacaagtggcagcacaggaaagccaaagggtgtgttgcatacaactgggggctatatggtctactctgctacaacatttaagcatgcatttgactacaagccaacagacatatactggtgcactgcagattgtggctggattactggacatagttatgtgacatatggtccactattgaatggagccacagttcttgtttttgaaggggctccaaattaccctgatcctggtcgctgttgggacatcgttgataaatatggagtgacaatattttatactgcaccaacacttatacgctcgcttatgcgtgatggtactgagtatgttgctcggtactctcgcaagtccctccgagtgcttggaagtgtgggtgagccaatcaaccccaccgcatggaggtggttctatgatgttattggcgactcacgatgccctatatcagatacttggtggcagactgaaactgggggattcatgataactccattacctggtgcttggcctcaaaagccaggatcagcaacatttcctttcttcggtgtgcagccagtcattgttgacgagaaaggtcgggaaatggaaggagaatgcagtgggtatctttgcataaagaaatcgtggcctggggctttccggactctatatggagataaagagagatatgagacgacatacttcaaaccatttgctggatattatttctcgggtgatggctgcagcagggataaagatggttaccactggctgactggaagagttgatgatgttatcaatgtgagtggacaccggattgggacagccgaagttgagtctgctctggtttcacatccaaaatgtgccgaggccgctgttgttggtattgatcacgaggttaaaggtcagggaatatatgctttcgtgactttggtagatggtgttccctacagtgacgatctacggaaaagcctcgttatgacggtccgcagtcagattggcgcgtttgctgctcctgacaagatccactgggcacctgggctcccaaagacgcgaagtgggaagatcatgcgaagaatcttacgaaaaatcgcatccaggcaactagatgagctcggagacacgagcacgcttgctgaccccggtgttgtggaccagctgattgtgctcagtgacagctaa

SEQ ID NO: 151157 - protein, 692 aa, Sorghum bicolor
MGASDHLAAAAAAAKPRNGRPCAAVLGEPLPALDDPGLLVHPSADFAAQALVSSTQQYREMYQKSIDDPAGFWSEIADEFYWKQKWSPDEVCAENLDVTKGPIKIEWFKGGKTNICYNAVDRHVEAGNGDKIAMYWEGNEPSQDGKLTYSELLEKVCQLSNYLKSVGVGKGDAVVIYLPMLMELPIAMLACARIGAVHSVVFAGFSAEALAQRVIDCKPKVVITCNAVKRGLKIIFLKDIVDASLDESAKNGVDVGICLTYENQSALNKVDTRWTTGRDVWWQDVVPDFPTKCDVEWVDAEDPLFLLYTSGSTGKPKGVLHTTGGYMVYSATTFKHAFDYKPTDIYWCTADCGWITGHSYVTYGPLLNGATVLVFEGAPNYPDPGRCWDIVDKYGVTIFYTAPTLIRSLMRDGTEYVARYSRKSLRVLGSVGEPINPTAWRWFYDVIGDSRCPISDTWWQTETGGFMITPLPGAWPQKPGSATFPFFGVQPVIVDEKGREMEGECSGYLCIKKSWPGAFRTLYGDKERYETTYFKPFAGYYFSGDGCSRDKDGYHWLTGRVDDVINVSGHRIGTAEVESALVSHPKCAEAAVVGIDHEVKGQGIYAFVTLVDGVPYSDDLRKSLVMTVRSQIGAFAAPDKIHWAPGLPKTRSGKIMRRILRKIASRQLDELGDTSTLADPGVVDQLIVLSDS

SEQ ID NO: 151158 - DNA, 2124 bp, Sorghum bicolor
  CDS (1)..(2124)
atgggcacggccaacggccagcagccggcggcggagggcgcttcctctgacaagctccgccacgtcgagtccatgtcggagctgccctccggcgccggcaagatctccgggatcaacgccgtcgtgctcggggagtcgctcgccgccgaggagaacgacctcatcttccccagctccgacttctctgccaacgctctcgtctcctctccgaaacagtatcgggagatgtatgagaggtccatcaagaacccggctgggttctggtcggagattgccgagacattttactggaaggagaagtggaaccctgccgaagtctgctcggagaacctcgatgtcaccaagggacccgtccagatcaactggttcaagggagggaaaactaacatatgttacaacgctgttgaccgcaacatcgagtctggcaatggggacaagattgcaatgtactgggagggtaatgagcccagtcaggatgggaagctcacctattccgagctcctggagaaggtttgccagcttgcaaattacttgaagagccttggtgtcggcaagggtgatgctgttattatctacttaccaatgctactggagcttcccattgccatgcttgcctgtgcccgcattggtgctgtccactcggttgtgtttgctggcttctcagcagattctctagcccaaaggattgttgattgcaagccgaagcttgtcatcacgtgcaatgctgtgaagcggggagtcaagcccatctttctcaaagatatagtggatgtggctttggtcgaaagtgagaagaatggagtctctgtaggtctctgcttgacgtatgaaaatcagtcagccatgaagagggaagacacaaaatggcaaccagaaagggatgtttggtggcaggatgtcgtgaccaaatttccaaccaaatgtgatgtggaatgggtggatgccgaggatccattgttccttttgtacacaagtggcagcacagggaagccaaagggtgtgttgcatacttctgggggctacatggtgtatactgcaacaacctttaagtacgcatttgactacaagccaactgacatatactggtgcactgcagactgtggctggattactggacatagttatgtaacatatggtcctctcctgaatggtgctacggttctcgtttttgaagggactccgaactaccctgattcaggccgatgctgggacattgtcgacaagtacaatgtgacaatattttatactgccccaactcttgttcgttcactcatgcgtgatggcactgagtatgtcacacgttactctcgaaagtctctacgagtcctgggaagtgttggtgagccaatcaatcctagtgcatggagatggttctacaatattgttggggattcccggtgccccatatcagacacctggtggcaaactgaaactggcggtttcatgatcacccctttgcctggcgcctggcctcagaaaccgggttctgcaacctttcctttctttggtgttcagccagtcattgttgatgagaaagggcaagagattgaaggggaatgcagtggatatctttgcataaagaaatcatggcctggggctttccggactctgtatggagatcatgagagatatgagaccacatacttcaaaccatttgctgggtactatttcactggtgatggttgcagcagagacaaagatggttatcactggctgactggaagagtagatgatgtcatcaatgtcagtggacaccgaatcggcactgccgaggttgagtcagctttggtgtcacatccacagtgtgcagaggctgctgttgttggtgttgagcatgaggtcaaaggtcaaggaatttatgcttttgtaactttggtggatggtgttccgtatagtgaggaactacgaaaaagccttataatgacagtgcgcaaccagattggggcatttgcagctcctgacaagatccactgggcaccaggacttcctaaaacccggagtggcaagatcatgcgaaggattttgcgtaaaattgctgcacggcaactggatgaacttggggacataagcacccttgctgaacctgctgtagttgaccagcttattgcgctcagcgattgctag

SEQ ID NO: 151159 - protein, 707 aa, Sorghum bicolor
MGTANGQQPAAEGASSDKLRHVESMSELPSGAGKISGINAVVLGESLAAEENDLIFPSSDFSANALVSSPKQYREMYERSIKNPAGFWSEIAETFYWKEKWNPAEVCSENLDVTKGPVQINWFKGGKTNICYNAVDRNIESGNGDKIAMYWEGNEPSQDGKLTYSELLEKVCQLANYLKSLGVGKGDAVIIYLPMLLELPIAMLACARIGAVHSVVFAGFSADSLAQRIVDCKPKLVITCNAVKRGVKPIFLKDIVDVALVESEKNGVSVGLCLTYENQSAMKREDTKWQPERDVWWQDVVTKFPTKCDVEWVDAEDPLFLLYTSGSTGKPKGVLHTSGGYMVYTATTFKYAFDYKPTDIYWCTADCGWITGHSYVTYGPLLNGATVLVFEGTPNYPDSGRCWDIVDKYNVTIFYTAPTLVRSLMRDGTEYVTRYSRKSLRVLGSVGEPINPSAWRWFYNIVGDSRCPISDTWWQTETGGFMITPLPGAWPQKPGSATFPFFGVQPVIVDEKGQEIEGECSGYLCIKKSWPGAFRTLYGDHERYETTYFKPFAGYYFTGDGCSRDKDGYHWLTGRVDDVINVSGHRIGTAEVESALVSHPQCAEAAVVGVEHEVKGQGIYAFVTLVDGVPYSEELRKSLIMTVRNQIGAFAAPDKIHWAPGLPKTRSGKIMRRILRKIAARQLDELGDISTLAEPAVVDQLIALSDC

SEQ ID NO: 151160 - DNA, 2007 bp, Pichia pastoris GS115
  CDS (1)..(2007)
atgccattagataacgaacacttacttcatgaaaattccattgacccaccaaagggattctttgaaagacaccctggaactcctaatataccaggcggttgggaagaatacttgaagctgtacaatcagtccatcgagaacccctcaaagttttttggagaaaaagcaaaggaattcttgtcatgggctactcctttcactgacgctcgttacccacctggtaatggatttcagaatggtgactccgccgcttggtttctgaatggtgagttgaacgcgtcgtacaactgtgttgatagacatgctttaaagaatccagacaaacctgccattatttatgaggctgatgaacctaatcaaggccgtacggttacctatggagagttgctgaaggatgtttgtcgaattgcccaagtattgactgacctgggtgtgaaaaagggtgacactgttgctgtttacctgcctatggttccagaagctatcaccactttattggctatcgttagaatcggtgctatccactctgttgtcttcgcaggtttttcagctggttctctacgtgatcgtatattggatgctgattctagaattgttatcacttctgatgaatctctgagaggtgggaagatcatcgagactaagaagattgttgacgaggctctgaagtcttgcccagatgttcgtaatgtgctggtcttcaaaagaacaggtacaccacatcttccatgggttgagggtcgtgatctttggtggcacgaggaaatcattaagcatgttccgtactctcccccagtgaatgttagatctgaagatacttcatttttgctttacacttctggctctaccggaaagcctaaaggtatccagcattcaactgctggctacttactgggagctcttttgaccaccaagtatgtctttgatgttcagggtgatgatattttattcactgctggtgatgtgggctggatcacagggcattcttatgtagtttacggtccacttttaaacggggctacgacagttgtttttgagggcaccccagcttacccagactattcacgttattgggatatcgttgacaaacacaaagttactcagttttatgtagcaccaactgctcttaggttgctgaagagagctggtagcaagtatgtccagaatcatgatttgtcttcaatcagggttttgggttccgttggtgaacctatagccgctgaagtttgggaatggtacaacgagtatgttggaagaggaaaagctcatatttgtgatacgtattggcaaacagagactggttctcacattattgctccaatagctggtgtgtcaaagaccaaaccaggttcagcatctttccccttcttcggtattgatccggttattctagatgctactactggagaggaactcaaaggtaataatgttgaaggtgttttggctatcagaaatccatggccatctatggctagaacagtctggaaggactacaaccgtttcctggatacatatctcaggccatatgaaggttattacttcactggtgatggagctgccagagatcaggaaggattttattgggttctgggtagagttgatgatgttgttaatgtgtcaggtcacagattgtctactgccgagattgaaagcgctctaatcgaacacaatttggtaggagagtctgctgtcgtcggattccctgacgagctgactggttctgctgtggccgcgtttgtgtctttgaagaaggacgtcgacaatccagcggaagtgaaaaaggagttaatccttactgtcagaaaagagattggaccattcgctgcacctaaactcatcatcttggtaagtgatcttccaaagaccagatcaggtaagataatgagacgtattctcagaaaggttttggctggagaggaagactctctgggcgacatttcaactctttcaaacccttcgattgtggaagagataatctctaccgttaaaagggatgcccgcaaatga

SEQ ID NO: 151161 - protein, 668 aa, Pichia pastoris GS115
MPLDNEHLLHENSIDPPKGFFERHPGTPNIPGGWEEYLKLYNQSIENPSKFFGEKAKEFLSWATPFTDARYPPGNGFQNGDSAAWFLNGELNASYNCVDRHALKNPDKPAIIYEADEPNQGRTVTYGELLKDVCRIAQVLTDLGVKKGDTVAVYLPMVPEAITTLLAIVRIGAIHSVVFAGFSAGSLRDRILDADSRIVITSDESLRGGKIIETKKIVDEALKSCPDVRNVLVFKRTGTPHLPWVEGRDLWWHEEIIKHVPYSPPVNVRSEDTSFLLYTSGSTGKPKGIQHSTAGYLLGALLTTKYVFDVQGDDILFTAGDVGWITGHSYVVYGPLLNGATTVVFEGTPAYPDYSRYWDIVDKHKVTQFYVAPTALRLLKRAGSKYVQNHDLSSIRVLGSVGEPIAAEVWEWYNEYVGRGKAHICDTYWQTETGSHIIAPIAGVSKTKPGSASFPFFGIDPVILDATTGEELKGNNVEGVLAIRNPWPSMARTVWKDYNRFLDTYLRPYEGYYFTGDGAARDQEGFYWVLGRVDDVVNVSGHRLSTAEIESALIEHNLVGESAVVGFPDELTGSAVAAFVSLKKDVDNPAEVKKELILTVRKEIGPFAAPKLIILVSDLPKTRSGKIMRRILRKVLAGEEDSLGDISTLSNPSIVEEIISTVKRDARK

SEQ ID NO: 151162 - DNA, 2019 bp, Pichia pastoris GS115
  CDS (1)..(2019)
atgacttttccagagccaagagaacacaaagtggtgcacgaagccaacggcgtaagggctatcaaaacccctcaatcattttatgacaagcaacctgttaagtcattggaggcattggaacattatcaagagctgtaccagaagtccatcgaggacccagaggaattcttcggccaaatggcaaagcagtttctagattgggacaaagactttggtaaggtctcctctggatctttgaaagaaggtgatgctgcgtggttccttggtggagagctgaatgcttcgtacaactgtgttgaccgacatgctttttcgcaccctgatcgtcccgccgtaattttcgaagcggacgaggaatctgaatctcgaacaataacttatgcagaacttctacgtgaggtctctcgtgttgcaggagtactgcagagctggggtgtacgcaaaggtgacactgtcgcaatctacttgcccatgactaccgaggccattgtggccatgctggcagtggcacgtctgggtgcagtgcactccgttatcttttctggattttcgtcaggatctatccgggacagagttaacgatgctggatctaaggcaattattacctgtgatgagggacgccgtgggggtcgtattgtgaacaataagaaaattgtcgatgccgctgttgacagctgccccacagtggaaaaaatcctggtttataagaggactggtaacccagaaatcaagatggtagaaggaagagacttctggtggcaggaagaggttgagaaattccctggttacattgcccctgtccctgtaaactcggaggacccactatttcttttgtatacttcgggatctactggttctcccaaaggtgtggtacactccacaggtggttatttgctgggagcagcattgacaactcgttatgtgtttgatgtccaggatgaggatattatatttactgctggtgacgtcggatggattactggtcacacatactcgttgtatggaccacttgttctgggtgttccaaccattgtttttgagggaactcctgtctaccctgactacggaagattgtggaagatttgcgccaaacataaagccacacacttttacatcgctcctactgctcttcgtcttttgaaaaaggctggtgaagaagaaattaaaaagtacgacttgtctagacttcgtactttaggatctgttggtgaaccaattgcccccgaattgtgggagtggtacaatgagaaaatcggaaacggaaactgtcatattgctgatacttactggcagactgaatctggttctcatttgattgctccattagcaggtgccgttccccaaaagccgggtgcagctactgttcctttctttggtattgatgcttgtatcattgaccctgtttctggtaaggaacttgaaggcaacgatgtggaaggtgttttagctgtcaagtccacttggccatcaatggctcgtacagtctggagaaaccacgctaaatacctcgacacatatatgcgtccttatccaggctactactttactggcgatggtgccggtagagatcacgatggttattactggatccgtggtcgtgttgacgatgttgtcaatgtatctggccaccgtttatccacttctgaaattgaaagtgctttactggaaaatggcaaagttgctgaagctgctgtgattggtatttccgatgagctaactggtcaagctgttattgcttttgtcgccttgaaagatgccactgactctgagaatttagacgctctcagacgtgccttagtcttgcatgttcgtggagaaattggtccatttgcagctcctaagtccgtgattgtggttgatgacttgcctaagacccgatcaggtaagatcatgcgtagagttttaagaaagatttcttgccatgaagctgatcaattgggtgatatgtctactttggccaatcctgaatcggtagactctataatcggagctgttgataaccagttcttcaagaagtag

SEQ ID NO: 151163 - protein, 672 aa, Pichia pastoris GS115
MTFPEPREHKVVHEANGVRAIKTPQSFYDKQPVKSLEALEHYQELYQKSIEDPEEFFGQMAKQFLDWDKDFGKVSSGSLKEGDAAWFLGGELNASYNCVDRHAFSHPDRPAVIFEADEESESRTITYAELLREVSRVAGVLQSWGVRKGDTVAIYLPMTTEAIVAMLAVARLGAVHSVIFSGFSSGSIRDRVNDAGSKAIITCDEGRRGGRIVNNKKIVDAAVDSCPTVEKILVYKRTGNPEIKMVEGRDFWWQEEVEKFPGYIAPVPVNSEDPLFLLYTSGSTGSPKGVVHSTGGYLLGAALTTRYVFDVQDEDIIFTAGDVGWITGHTYSLYGPLVLGVPTIVFEGTPVYPDYGRLWKICAKHKATHFYIAPTALRLLKKAGEEEIKKYDLSRLRTLGSVGEPIAPELWEWYNEKIGNGNCHIADTYWQTESGSHLIAPLAGAVPQKPGAATVPFFGIDACIIDPVSGKELEGNDVEGVLAVKSTWPSMARTVWRNHAKYLDTYMRPYPGYYFTGDGAGRDHDGYYWIRGRVDDVVNVSGHRLSTSEIESALLENGKVAEAAVIGISDELTGQAVIAFVALKDATDSENLDALRRALVLHVRGEIGPFAAPKSVIVVDDLPKTRSGKIMRRVLRKISCHEADQLGDMSTLANPESVDSIIGAVDNQFFKK

SEQ ID NO: 151164 - DNA, 2295 bp, Zygosaccharomyces rouxii CBS 732
  CDS (1)..(2295)
atgacggtcaattatgtatatgcaggaatgtggagaaatctctttcccgaaagtatatgtcgccttagagacaaaagaaaagaacatatcccttactctatgtccccatcaacgactgcaactggcacttccccaacgggcggtacgattggagatttgaaagcgagattagtacatgcagctgaaagggagaatacatctccggccactacaaacaatgtaagtactgaaaaggatcatgaagctgaaactaatacaccaactaccgattatgatcatttgattagtgttcatacagtgcagcaaaagccaatcactcatagattacagtctgaattgtcttgtcattattgcccgcacatatctggatttagagaatacgaaaaattgtacagagaatcaattgatcagccttcggagttttttggtaacaaagcacgtcaatttttgaactggttcaaagattttgatcaagttttcattcctgaccctcgtactggtaaaccttcattgaacaataatgcatggttcctaaatggtcaaacaaatgcttgttataattgcgttgatagacatgctttagagacacctgataaaccggccataatttacgagactgatgagcctggccaaggctatactttaacatattcggaattgttagaacaagtttgtcaattggctcaagtgcttcgctattcgatgggagttcgtaaaggtgatacagttgcagtatatatgccaatgattcctcaagcggtaatttctttgatggcaattgctagaattggtgctattcattctgtggtttttgctggattttcctgtaattcattgagagatcgtattaatgatgcagattcgcatgtagtaattactacagatgaaactaagagagggggcaaaattgtggaaaccaagagaattgttgatgatgctctgaaagagactccaggcgtgagcaacgttcttgtttatagacgtactaataaccctagggttccacgccaagtatccagagatttggattgggatggagaattgcggaaatataaaggttattgtccttgtgaacctgtggattcagagcatcctttatttctcttgtatacttcgggttcgaccggtactccgaagggtgtgcaacatagcactgctggttatctactatcagctcttttgacgatgagatacagctttgacacacatcgagaagacgtgtttttcactgcaggtgacgttggctggataacaggtcacacttatgttgtttatggtcctttactttacggttgtactactttggtgtttgaaggtactcctgcatatccaacttatgctcgttactgggatattattgatcagtacaaagtaacccaattttatgtggctcctactgcactgagactgctaaagcgggctggtgactcctttatcgaaggtcactctttacaatccttacgtgccttaggtactgtaggcgagcctatagccgctgaagtttgggagtggtattccgaaaaaattggtaaaaatgaattgccaattgtggatacctattggcaaactgaatctggatctcatatgttaacgccaatggcagggggtgttacaccaatgaaaccaggatctgcaggcttccccttcattgggattgactcctgtatactagatccaacgacaggtcaagaattaactaagcctcttgttgaaggtgttctggcggttagatgtggatggccgtcatttgctagaaccatttggaaagatcacgatagattccttgatacttatttgaaaccttatccaggttattatttcactggggacggtgctgccagagataaagatggttacatttggatcttaggacgtgtcgatgatgttgttaatatttcaggtcacagattatcaacagcagaaattgaaagtgcagttcttgatgatgcaattgtggcagagtgtgccgtcgtaggatttaatgatgatttaacaggccaagcagtcgcggcctttgtagttttaaagaataaatcaagttggtcaacggcctctgaagaagaattactagatatcaagaaacatttgattctagcggtaagaaaagacatcggtccctttgctgctcctaaactaattgtattggtggatgatttaccaaagactagatcaggtaagattatgaggcgtattctaagaaaaatcttagctggtgagtgtgatcaattgggcgatgtttctactttatccaatccaggtgtcgttaggcatttgattgattctgtaaaattgtag

SEQ ID NO: 151165 - protein, 764 aa, Zygosaccharomyces rouxii CBS 732
MTVNYVYAGMWRNLFPESICRLRDKRKEHIPYSMSPSTTATGTSPTGGTIGDLKARLVHAAERENTSPATTNNVSTEKDHEAETNTPTTDYDHLISVHTVQQKPITHRLQSELSCHYCPHISGFREYEKLYRESIDQPSEFFGNKARQFLNWFKDFDQVFIPDPRTGKPSLNNNAWFLNGQTNACYNCVDRHALETPDKPAIIYETDEPGQGYTLTYSELLEQVCQLAQVLRYSMGVRKGDTVAVYMPMIPQAVISLMAIARIGAIHSVVFAGFSCNSLRDRINDADSHVVITTDETKRGGKIVETKRIVDDALKETPGVSNVLVYRRTNNPRVPRQVSRDLDWDGELRKYKGYCPCEPVDSEHPLFLLYTSGSTGTPKGVQHSTAGYLLSALLTMRYSFDTHREDVFFTAGDVGWITGHTYVVYGPLLYGCTTLVFEGTPAYPTYARYWDIIDQYKVTQFYVAPTALRLLKRAGDSFIEGHSLQSLRALGTVGEPIAAEVWEWYSEKIGKNELPIVDTYWQTESGSHMLTPMAGGVTPMKPGSAGFPFIGIDSCILDPTTGQELTKPLVEGVLAVRCGWPSFARTIWKDHDRFLDTYLKPYPGYYFTGDGAARDKDGYIWILGRVDDVVNISGHRLSTAEIESAVLDDAIVAECAVVGFNDDLTGQAVAAFVVLKNKSSWSTASEEELLDIKKHLILAVRKDIGPFAAPKLIVLVDDLPKTRSGKIMRRILRKILAGECDQLGDVSTLSNPGVVRHLIDSVKL

SEQ ID NO: 151166 - DNA, 2028 bp, Zygosaccharomyces rouxii CBS 732
  CDS (1)..(2028)
atgacaactaaggaacataagaccgttcatgaggcacagaatgtagtagctcgtcatgcacctgagcatttctacaaatcacaaccaggattgggttatgtcaaggatatgaagcagtaccaagagatgtacaagcaatctgtggaagatccagaaacctttttcggtaccaaggctcaagaattgttacattgggataaaccatttacaaagacgaagtttggttcattggaaaatggtgatactacttggtttttaaacggtgagttgaatgctgcttacaactgtgttgatagacatgcttttgccaatcctgataaaccagcattgatctacgaagcggatgaagaagcagacaacagggttgttacattcggtgagcttttgagacaagtttctcaagttgctggtgttcttcacagctggggggttagaaaaggtgataccgtcgcagtttatctaccaatgattcctgaagctgttgttgcaatgttggccgttgccagattaggtgcaattcattctgttgtttttgcaggtttttcagcaggttccttgaaggatcgtgttgtagacgcaggttgtaaagttgttattacttgtgatcaaggtaaaagaggtagcaaaaccgttcatacaaagaaaattgtcgatgaaggtttaaatggaatttctcaagtttctcatattcttgtcttccaaaggacaggtgctgaagggatcccaatgacacctggcagagattactggtggcacgaagaagctgctaagcaaagaggttacattccaccagttccttgtagtgctgaagatccattattcctcttgtacacttcaggttccaccgggtcaccaaagggtgtggtccattcaaccggtggttatctattgggtgcagccatgaccactagatatgtgtttgacatccatccagaagatgtcttattcacagcaggtgatgttggttggattacaggtcatacttatgctctttatggtccattagcgctaggtactgcatcaatcatctttgaatcaacaccagcttatcctgattacggtagatattggagaatcattcagcgtcataaggcaactcatttctacgtggctccaacagccatgagattgattaagcgtgtaggtgaggctgaaattccaaaatacgatctatcttcactaagagttcttggatcagtcggtgaaccaatttcaccagatctttgggaatggtacaacgaaaaaattggtcacaacaactgtgtcgtttgtgataccatgtggcaaaccgaatctggttctcatttaattgctccattagcaggtgcagtcccaacaaaacctggttccgctacagttccattctttggtgttgatgcttgtatcattgacccagtcactggtgttgaattacaaggtaatgacgtggaaggtgttttggcagtaaaatcatcttggccatctatggcaagatcagtttggcaaaatcacaaccgtttccaggagacttacttgcaaccataccctggttactactttacaggtgatggtgcaggtagagaccatgatggttactactggatcagaggtagagttgatgatgtggttaacgtttctggccacagattgtccactgctgaaattgaagcttcattgaccaaccatgataatgtttctgaatctgctgtcgtaggtattcctgacgaattgaccggtcaaaccgtcattgccttcgttgcattgaaagatggtactccaagtcaaggtgatgcgagtgctaacgttcgtcgtgaattggtgctccaagttagaggtgaaattggtccatttgctgctcctaaatgtgtcatcttggttaaagatctgccaaagactagatccggtaaaatcatgagaagagtcctaagaaaagttgcatctaatgaagctgatcaactgggtgatctatctactatggctaacgctgaagtcgttccaggtatcattgcagctgttgatgaacaatattttgctgagaagaagaaataa

SEQ ID NO: 151167 - protein, 675 aa, Zygosaccharomyces rouxii CBS 732
MTTKEHKTVHEAQNVVARHAPEHFYKSQPGLGYVKDMKQYQEMYKQSVEDPETFFGTKAQELLHWDKPFTKTKFGSLENGDTTWFLNGELNAAYNCVDRHAFANPDKPALIYEADEEADNRVVTFGELLRQVSQVAGVLHSWGVRKGDTVAVYLPMIPEAVVAMLAVARLGAIHSVVFAGFSAGSLKDRVVDAGCKVVITCDQGKRGSKTVHTKKIVDEGLNGISQVSHILVFQRTGAEGIPMTPGRDYWWHEEAAKQRGYIPPVPCSAEDPLFLLYTSGSTGSPKGVVHSTGGYLLGAAMTTRYVFDIHPEDVLFTAGDVGWITGHTYALYGPLALGTASIIFESTPAYPDYGRYWRIIQRHKATHFYVAPTAMRLIKRVGEAEIPKYDLSSLRVLGSVGEPISPDLWEWYNEKIGHNNCVVCDTMWQTESGSHLIAPLAGAVPTKPGSATVPFFGVDACIIDPVTGVELQGNDVEGVLAVKSSWPSMARSVWQNHNRFQETYLQPYPGYYFTGDGAGRDHDGYYWIRGRVDDVVNVSGHRLSTAEIEASLTNHDNVSESAVVGIPDELTGQTVIAFVALKDGTPSQGDASANVRRELVLQVRGEIGPFAAPKCVILVKDLPKTRSGKIMRRVLRKVASNEADQLGDLSTMANAEVVPGIIAAVDEQYFAEKKK

SEQ ID NO: 151168 - DNA, 2031 bp, Micromonas sp. RCC299
  CDS (1)..(2031)
atggactccgtgaacgacgtcgccacgaaggcggcgcaggtatccgaggccggccagaagcacctctacccgcccccggccgacctcgccgccgccgctcacgtcaaatccttggacgagtacaaggcgatgtatcggcaatcgatcgacgatcccgagacgttcttcgggaacatggcgcgccagttccactgggagaaacccttcgactccgtcggccccgtctacaacttcgacctgagcaagggcccgatcaagatcgactggttccagggcggtaagacgaacatctgctacaacgcgttggaccgccacgtcgccgccggccacggcgacgacgtcgccatcctgtgggagggcaactcccccgacgagcaggcgtcgcacacctaccacgacgtcctcgacgccgtgaagaagtttgcgaacgtgctcaagtccaagggcgttcgcaagggcgacaccgtgacgctgtacatgcccatggtggttgaactcgcggttgcgtgtttagcgtgcgctcgaattggcgccatccattccgtggtgttcggcggcttcagccccgaggcgatccgcgggaggatggcggacgcgcagagcaaggttgtcgtgacgtgcgacgcggtgatgcgcggcgcgaagcccgttcagctcaagacccaggtggacgcggctttggaactgggcaaggacgacttcaccgtcgaatccgtcgtcgtgttcaggcggctcgcgggcgagtgcccgatggtggacggacgagacacgtggtggcacgacgagatggcgactgttaccgccgactgcgagtgcgagtgggtcgagtccgagcacccgctgttcatgctgtacacctccgggagcaccggcaagcccaagggtatcgttcactccaccgccgggtacatgctcggatcgtgggccacgttcaagtacgtgttcgactacaagcccggcgaggtgtactggtgcaccgcggacatcgggtggatcaccggacactcctacatcgtctacggccccctgttggagcgcgcgacgacggtgatgttcgagggggtgcccacgtatccagacgcgggacggtgctgggccatctgcgagaagcacgcggtgaaccagttctacaccgcgcccaccgcggttcgcgcgctgatgaaggcgggcgacgacttcgtcaccaaacacgatcgcagttcgttgcgcatcctgggttccgtcggcgagcccatcaacccggaggcttggcggtggtactactccgtcgtcggcgaggagcgatgccccatcgtcgacacgtactggcagacggagactggttcgttcatgatcacgccgctgccgggcgccacgccgctcaagcccgggtccgccaccctccctttcttcggcgtccagcccgtggtgctcgacgacaagggcgtcgagctcgagggcgaggcttcgggctttttggccatcaagaaaccgtggccgtccgcgtctcgatcctgctacggcgatcacgcgcggttcgagagcgtgtactactccatgttcaagggatactacgtcgccggcgacgggtgcaggcgcgacgccgacgggtactactggatcaccggcagggtcgacgacgtcatcaacgtctccggccaccgcatgggaaccgcggaggtggagtccgccctcgtgctacacccggcgtgctcggaagccgccgtcgtcggcatgccccacgagatcaagggcgcgggcatctactgctacgtcgtgctcaaggacgggcaggtcgcgagcgacgagctggcggcggggctcaaggcgatcgtgcggaaggagattgggcccatcgccacccccgacgcgatccagttctcggagggtctgccgaagacccgctcggggaagatcatgcggcgcatcctgcgaaagctcgccgagaaccccgcgattgacatggcggagctcggcgacatctccaccctggcggaccccgggatcgtggcgctgctcaaggatggggccatgaagctcgcgggcaagtga

SEQ ID NO: 151169 - protein, 676 aa, Micromonas sp. RCC299
MDSVNDVATKAAQVSEAGQKHLYPPPADLAAAAHVKSLDEYKAMYRQSIDDPETFFGNMARQFHWEKPFDSVGPVYNFDLSKGPIKIDWFQGGKTNICYNALDRHVAAGHGDDVAILWEGNSPDEQASHTYHDVLDAVKKFANVLKSKGVRKGDTVTLYMPMVVELAVACLACARIGAIHSVVFGGFSPEAIRGRMADAQSKVVVTCDAVMRGAKPVQLKTQVDAALELGKDDFTVESVVVFRRLAGECPMVDGRDTWWHDEMATVTADCECEWVESEHPLFMLYTSGSTGKPKGIVHSTAGYMLGSWATFKYVFDYKPGEVYWCTADIGWITGHSYIVYGPLLERATTVMFEGVPTYPDAGRCWAICEKHAVNQFYTAPTAVRALMKAGDDFVTKHDRSSLRILGSVGEPINPEAWRWYYSVVGEERCPIVDTYWQTETGSFMITPLPGATPLKPGSATLPFFGVQPVVLDDKGVELEGEASGFLAIKKPWPSASRSCYGDHARFESVYYSMFKGYYVAGDGCRRDADGYYWITGRVDDVINVSGHRMGTAEVESALVLHPACSEAAVVGMPHEIKGAGIYCYVVLKDGQVASDELAAGLKAIVRKEIGPIATPDAIQFSEGLPKTRSGKIMRRILRKLAENPAIDMAELGDISTLADPGIVALLKDGAMKLAGK

SEQ ID NO: 151170 - DNA, 2250 bp, Ricinus communis
  CDS (1)..(2250)
atgaagccggcaacaagctcactatcgccaccagtcaaagtcaaaccttcaatttcggtgactcggcgtttctcctcctcctgctcattctcctcctcctcctccaccgccgcctttgtttgccgccgcagtgagatctggatggcgaatcataatctgaaaacgacggagaatcacctgagacatgtggagtcaatggcgacattgccgaatggtgccggtaaaattcctcgtcttaacgccgttatattaggagaatctttagcttctgaagaggacgatcttgtttttcctaacgatgacttctcacgacgagctcttctgtcgtctcctcaacagtatttggagatgtacaagaagtccattgaagatccggcaggattttggtcggagattgcttctcagttttactggaaacagaggtggggccaaggtcaaccggtttgctccgagaattttgatgttcgccaagggagtatcaagatcgagtggttcaagggaggtgtcaccaacatttgttataactgtttggatagaaatgttgaatctggaaatgctaataagattgctctttattgggagcctaatgagcctggctctgaggattctttaacctattctcagcttcttcaaagagtttgccagctagccaattacttgaaagataaaggtgttaagaagggtgatgctgttgtgatttatttacctatgctcatggaacttcctattgcaatgctcgcttgtgcccgcattggtgctgttcactcggttgtgtttgctggattttcttctgaatctcttgctcaaagaattgtggattgcaaaccaaaagttgtaattacttgcaatgctgttaaaagaggttctaaagttattccccttaaggacatagttgatgctgcccttgtcgaatctgctaaaaatggtgtttctgtcggtgtatgtttgacctatgaaaacctatctgctatgaagagggaaagcactaaatggcaggatggaagagatgtatggtggcaggattttgtgcctaattatccaactacttgtgaagtggagtgggttgatgcagaagatccactttttctgctatatactagtgggagcacaggaaagccaaagggtgttctccatacaactggaggatatatggtttacactgccacaacattcaagtatgcatttgattataagccatctgacgtctactggtgcacagccgactgtggttggatcaccgggcacagctatgtaacgtatggaccgatgctcaatggagcaactaatgtcatttttgaaggggctcccaattatcctgattctggacgctgttgggatattgttgacaaattcagagtgacaatattttacactgcccccacattggtgcggtccctcatgcgtgatggtgatgagtatgttactcgctattcacgtaaatccttaaggatccttggaagtgtaggcgagcctattaatccaagtgcttggaggtggtttttcaatgtagttggagattcacgatgccctatatcggacacttggtggcaaactgaaactggtggttttatgattactccactaccaggtgcttggccacagaagcctggttctgcaacctttcctttctttggagttcagcctgtgatagtggacgaaaagggtgttgagattgaaggagagtgtagtggatatctctgtgtgaaaagctcatggcctggggcattccgaactctttatggcgatcacgaaagatatgaaaccacttacttcaagccatttcctggctattatttcagtggtgatggctgtagcagggacaaggatggatactactggcttactggaagagtcgatgatgttatcaatgttagtggtcatcgtattggcacagcagaagtggaatctgctcttgtatctcatccccagtgtgcagaagctgctgtagttggcgttgagcatgaggttaaaggacagggcatttatgcatttgtcacacttgtggagggcgtttcttacagtgaagaactccgaaaaagtcttatcctcacagtccgaaatcaaataggagcatttgcagcaccagacaaaattcactgggctcctggccttccgaagacaagaagtggaaagataatgaggaggattctgagaaaaattgcttccaggcagttagatgaacttggggacacaagcactctggcagatccaaatgtggttgaccagcttatagcacttgctgatagctga

SEQ ID NO: 151171 - protein, 749 aa, Ricinus communis
MKPATSSLSPPVKVKPSISVTRRFSSSCSFSSSSSTAAFVCRRSEIWMANHNLKTTENHLRHVESMATLPNGAGKIPRLNAVILGESLASEEDDLVFPNDDFSRRALLSSPQQYLEMYKKSIEDPAGFWSEIASQFYWKQRWGQGQPVCSENFDVRQGSIKIEWFKGGVTNICYNCLDRNVESGNANKIALYWEPNEPGSEDSLTYSQLLQRVCQLANYLKDKGVKKGDAVVIYLPMLMELPIAMLACARIGAVHSVVFAGFSSESLAQRIVDCKPKVVITCNAVKRGSKVIPLKDIVDAALVESAKNGVSVGVCLTYENLSAMKRESTKWQDGRDVWWQDFVPNYPTTCEVEWVDAEDPLFLLYTSGSTGKPKGVLHTTGGYMVYTATTFKYAFDYKPSDVYWCTADCGWITGHSYVTYGPMLNGATNVIFEGAPNYPDSGRCWDIVDKFRVTIFYTAPTLVRSLMRDGDEYVTRYSRKSLRILGSVGEPINPSAWRWFFNVVGDSRCPISDTWWQTETGGFMITPLPGAWPQKPGSATFPFFGVQPVIVDEKGVEIEGECSGYLCVKSSWPGAFRTLYGDHERYETTYFKPFPGYYFSGDGCSRDKDGYYWLTGRVDDVINVSGHRIGTAEVESALVSHPQCAEAAVVGVEHEVKGQGIYAFVTLVEGVSYSEELRKSLILTVRNQIGAFAAPDKIHWAPGLPKTRSGKIMRRILRKIASRQLDELGDTSTLADPNVVDQLIALADS

SEQ ID NO: 151172 - DNA, 2025 bp, Candida tropicalis MYA-3404
  CDS (1)..(2025): transl_table=12
atgccagaatctactcaacaatctcatatttctttggatcatgaaaagatgcagcaacctccagctggtttcactgaacgttccacttccaaaccaaacttaccagatttcgacacttacaagaaattgtaccaacaatctgtagaaaatccaaatgaatttttcaccgaacaagcaaagaagaatttagactggttcaaaccatttgatttggctagattccctgtcgatccaaaagatgatttcaagaatggtgatttgccagcttggtttatcaatggtcaattgaatgcttcatacaatgctattgatagatgggctatcaagaacccagataagccagctattatttacgaaggtgatgaaccagatcaaggtagaatcatttcttatggtgaattattgaaagaagtcagtaaattggctcaaactttgactaaattgggtgttaaaaaaggtgattctgtcgctgtttacttaccaatgattcctgaagctattgtcactttattggccattgtcagaattggtgctgtccattctgttgtctttgctggtttctcttctgcctctttaagagacagaattttagatgctgactctagaattgtcatcactgctgatgaatccaagagaggtggtaaaactatcgaaaccaagaagattgttgatgatgctttgaaggaatgtccaaaagtcagaaatgtcattgttttcaaaagaactggtaactcacatgttccattttctcctggtagagatttatggtggcacgaagaattggccaaatacggtccatacttcccaccagtcccagttaactctgaagatccattgttcttgttgtatacttctggttctactggtaagccaaagggtgttcaacataatactgctggttacttgttgggtgccgttttaaccaccaaatacacctttgatgtccatgaagatgatgtcttgttcactgctggtgatgttggttggattactggtcacacttattgtgtttacggtccattgttgtgtggtgccactactgttgtctttgaaggtactccagcttatccaaacttctccagatactgggaaattgttgacaaatataaggttaaccaattctatgttgcaccaactgctttaagattattgaagagagctggtaccaagtatgttgaaaaatacgacttgtcctccattagagtcttgggttctgttggtgaaccaattgctgctgaagtttggcactggtataatgacaatattggtagaggtaaagctcatattgtcgatacttattggcaaactgaatctggttctcatttgttgactccattggctggtgtcactccaaccaagccaggttctgcttccttgccattctttggtgttgttccaaagatcttagatccaactactggtcaagaattagaaggtaacgatgttgaaggtgtccttgctattaaatctgcttggccatctattactagaggtatttacaatgattacaatagatttattgaaacttatttggctccataccacgaccactatttctcaggtgatggtgctgctagagataacgatggtttctactggatcttgggtagagttgatgatgttgtcaatgtttctggacacagattatcaactgccgaaatcgaagctgctttgattgaacatccattggttgcagaatctgctgttgtcggatatgccgatgacttgactggtcaagccgttgctgcttatgtttccttgaagaaagataaggttaatgatgatttggaagctgtcaagaaggaattgattttaactgtcagaaaagaaattggtccatttgctgctcctaaattgattttgttggttgatgacttgccaaagaccagatctggtaagattatgagaagaatcttgagaaaagttttggctggtgaagaagatcaattgggtgatatttccacattatctaatccaggtgttgttcaacaaatcattgaagttgtccatgcttcaaagaaataa

SEQ ID NO: 151173 - protein, 674 aa, Candida tropicalis MYA-3404
MPESTQQSHISLDHEKMQQPPAGFTERSTSKPNLPDFDTYKKLYQQSVENPNEFFTEQAKKNLDWFKPFDLARFPVDPKDDFKNGDLPAWFINGQLNASYNAIDRWAIKNPDKPAIIYEGDEPDQGRIISYGELLKEVSKLAQTLTKLGVKKGDSVAVYLPMIPEAIVTLLAIVRIGAVHSVVFAGFSSASLRDRILDADSRIVITADESKRGGKTIETKKIVDDALKECPKVRNVIVFKRTGNSHVPFSPGRDLWWHEELAKYGPYFPPVPVNSEDPLFLLYTSGSTGKPKGVQHNTAGYLLGAVLTTKYTFDVHEDDVLFTAGDVGWITGHTYCVYGPLLCGATTVVFEGTPAYPNFSRYWEIVDKYKVNQFYVAPTALRLLKRAGTKYVEKYDLSSIRVLGSVGEPIAAEVWHWYNDNIGRGKAHIVDTYWQTESGSHLLTPLAGVTPTKPGSASLPFFGVVPKILDPTTGQELEGNDVEGVLAIKSAWPSITRGIYNDYNRFIETYLAPYHDHYFSGDGAARDNDGFYWILGRVDDVVNVSGHRLSTAEIEAALIEHPLVAESAVVGYADDLTGQAVAAYVSLKKDKVNDDLEAVKKELILTVRKEIGPFAAPKLILLVDDLPKTRSGKIMRRILRKVLAGEEDQLGDISTLSNPGVVQQIIEVVHASKK

SEQ ID NO: 151174 - DNA, 2016 bp, Candida tropicalis MYA-3404
  CDS (1)..(2016): transl_table=12
atgactacagaatccaacaatcataaggttgtccacgaagccaatggggttcaattaagagaaactccaaaggaattcttccaaagacaaccaaacaaaggacatattcaagatactgaagaatacaagaaaatgtatgaacaatccataaaagatcctcaaggtttctttggtccattggccaaagaattgttgtcttgggatagtgatttccatactgtcaagtcaggtacccttaaaaacggtgatgctgcttggttcttgggtggtaaattgaatgcttcttacaattgtgttgatagacacgctttggctaacccaaacaaaccagccattatctacgaagctgatgaagaaaaagattcttacattttaacttatggtgatttattaagagaagtttctaaagttgctggtgtcttgcactcttggggtgttagaaaaggtgacactgttgctgtctacttgccaatgaatgctcaagctctcattgctatgttggctattgctagattgggtgctgcccattctgttatttttgctggtttctcttctggttctattaaagacagagtcaatgatgccagctgtaaagctcttattacttgtgatgaaggtagaagaggtggtagaactaccaacatcaagaaattgtgtgatgaagctttgaaacaatgtccaactgtccaaaaagttttggtccacagaagaactggtaacccagatatcaaattggttgaaggtagagattactactgggatgaagaaactgccaaattctctggttacttcccaccagttgctgttgattcagaagatccattattcttgttgtatacttctggttctactggtactccaaagggtgttgtccactcaactgctggttacttgttgggtgctgcccttaccaccaaatacatctttgatgtccacccagaagatatcttcttcactgctggtgatgtcggttggattactggtcacacctatgctttgtatggtccattgttattgggtgttccatctgttgtttttgaaggtactccagcttacccagattacggtagattctggcaaattgttgaaaaacacaaggccacccatttctatgttgctccaactgctttaagattattgcgtaaagctggtgaacaagaaattgccaaatacgacttgagttctttgagaactttgggttctgttggtgaaccaatttccccagatatttgggaatggtacaatgaatttgtcggtaaagaccaatgtcatatttccgatacatactggcaaactgaatctggttctcatttgattgctccattagctggtgtcattgccaacaaaccaggttctgcttcttacccattctttggtattgatgctgctttgattgacccagtctctggtgttgaaattaccggtaacgatgttgaaggtgttttggttgtcaaagaccactggccatccatggcaagaactgttttcaacaaccacgtcaaatatatggatacctacatgaacccatacccaggctactatttcactggtgatggtgctgccagagataatgatggttactactggatcagaggtagagttgatgatgttgttaatgtttccggtcacagattatctactgctgaaattgaatctgctttgattgaagatccaagagttggtgaatcagctgttgttggtatcaatgatgatcttactggtcaagctgttgttgcctatgttgccttgaaaaccggtgatgttccagatgaagatgctttaagaaaagaattgattcttttggttagaaaagaaattggtccatttgctgctccaaaatctgttatcttggttcaagacttgccaaagactagatcaggtaagattatgagaagaattttaagaaaagtcagttccaatgaagctgatcaattgggtgacattactactttacaaaacccaggttctgttgaaggtatcatttctgctttcagcgcacaattcggtagaaagtaa

SEQ ID NO: 151175 - protein, 671 aa, Candida tropicalis MYA-3404
MTTESNNHKVVHEANGVQLRETPKEFFQRQPNKGHIQDTEEYKKMYEQSIKDPQGFFGPLAKELLSWDSDFHTVKSGTLKNGDAAWFLGGKLNASYNCVDRHALANPNKPAIIYEADEEKDSYILTYGDLLREVSKVAGVLHSWGVRKGDTVAVYLPMNAQALIAMLAIARLGAAHSVIFAGFSSGSIKDRVNDASCKALITCDEGRRGGRTTNIKKLCDEALKQCPTVQKVLVHRRTGNPDIKLVEGRDYYWDEETAKFSGYFPPVAVDSEDPLFLLYTSGSTGTPKGVVHSTAGYLLGAALTTKYIFDVHPEDIFFTAGDVGWITGHTYALYGPLLLGVPSVVFEGTPAYPDYGRFWQIVEKHKATHFYVAPTALRLLRKAGEQEIAKYDLSSLRTLGSVGEPISPDIWEWYNEFVGKDQCHISDTYWQTESGSHLIAPLAGVIANKPGSASYPFFGIDAALIDPVSGVEITGNDVEGVLVVKDHWPSMARTVFNNHVKYMDTYMNPYPGYYFTGDGAARDNDGYYWIRGRVDDVVNVSGHRLSTAEIESALIEDPRVGESAVVGINDDLTGQAVVAYVALKTGDVPDEDALRKELILLVRKEIGPFAAPKSVILVQDLPKTRSGKIMRRILRKVSSNEADQLGDITTLQNPGSVEGIISAFSAQFGRK

SEQ ID NO: 151176 - DNA, 2049 bp, Lachancea thermotolerans CBS 6340
  CDS (1)..(2049)
atgaccaaacaacacaaagtggttcacgaggctcacaacgtggagctgcgtgaggcacccgagcatttctacaagtcgcagcccgccccgggtcacgtgacgtccatggaccagtaccgcgagatgtacgagcagtccatccaggacccagagggcttcttcgggcccatggcgcgcgagcacctccactgggaccgtcccttcaccaaggtgtgcgccggctcgctcgagaacggcgacgcgtcttggttcctaaacggtgagctgaacgcctcgtacaactgtgtcgacagacacgccttcgctaacccttccaagcccgcgcttatctacgaggccgacgacgagaaggacaaccgcgtcgtgaccttcggcgagctgttgcgccaggtttccgaggtcgccggcgtgctcaagagctggggtgtcaagaagggcgacaccgtcgccgtctacctgccaatgatcgccgaggctgttgttgccatgcttgcggttgccagacttggcgctattcactctgttgtctttgccgggttctccgcgggctccttgaaggagcgtgtggtcgacgcgggcagcagagtcgtcattacctgcgacgagggccgcagaggtggtaagaccgtccacaccaagaagatcgtggatgagggtctagctggcgttgactccgtctcgcacatcctggtgtttcagagaactggctctgccggcatcccaatgaagccaggccgtgacttctggtggcacgaggagaccgccaagcaccgcggctacctacctccaacccctgtcaatgccgaggaccctctgttcttgctatacacttccggttccaccggttctccaaagggtgtcgtccattcgaccgccggctacctgctaggtgccgcgttgaccaccaaatacgttttcgatattcatccacaagacgtcctattcactgccggtgacgtgggctggattactggccacacctacgctctgtacggtcctttggctctcggtaccgccaccatcattttcgagtcaactccagcgtacccagactacggtagatactggagaataatcgagcgtcacaaggccacccacttctacgtggctcctaccgcgctacgactaatcaagcgcgtgggcgaggctgaaatctcgaaatacgatacctcttcgctcagagtgttgggttctgtcggtgaacctatttctcctgacttgtgggaatggtaccacgacaaggtcggtaacaagaactgtgtcatttgcgataccatgtggcaaactgagtccggttctcacttgattgcgccgctagccggtgctgtcggcacgaagccaggttctgccactgttccattcttcggcgttgacgcctgtctcatcgacccagtttctggtgaagagctcaagggcaacgacgttgaaggtgttctggctgtcaagtctccatggccatccatggccagatccgtgtggaacaaccactcgcgttacatcgagacctacttgaagccttatccaggtttctacttcactggcgacggtgccggtagagaccacgacggctactactggattagaggtagagtcgacgacgtggtcaacgtttctggccacagactttctacggctgagatcgaggccgcactgggtgagcacgacggtgtctcggagtctgccgttgtgggtatcaccgacgagctgacgggtcaggccgtcattgctttcgtgtctttgaaagacggttacttgcaagaaaacgcttccgaaggcgacatggcccacattactcccgacaatttgcgccgcgagctggtgctccaggttagaggcgagatcggcccattcgccgctcctaaatccgtcgttgtggtcaacgacttaccaaagaccagatccggtaagattatgagaagagtcctgagaaaggtggcctctaacgaggcggaccagttgggcgacatgtccaccctggcgaacccggactgcgttccatccatcatttctgccgtggaaaaccagttcttgattcaaaagaagaaataa

SEQ ID NO: 151177 - protein, 682 aa, Lachancea thermotolerans CBS 6340
MTKQHKVVHEAHNVELREAPEHFYKSQPAPGHVTSMDQYREMYEQSIQDPEGFFGPMAREHLHWDRPFTKVCAGSLENGDASWFLNGELNASYNCVDRHAFANPSKPALIYEADDEKDNRVVTFGELLRQVSEVAGVLKSWGVKKGDTVAVYLPMIAEAVVAMLAVARLGAIHSVVFAGFSAGSLKERVVDAGSRVVITCDEGRRGGKTVHTKKIVDEGLAGVDSVSHILVFQRTGSAGIPMKPGRDFWWHEETAKHRGYLPPTPVNAEDPLFLLYTSGSTGSPKGVVHSTAGYLLGAALTTKYVFDIHPQDVLFTAGDVGWITGHTYALYGPLALGTATIIFESTPAYPDYGRYWRIIERHKATHFYVAPTALRLIKRVGEAEISKYDTSSLRVLGSVGEPISPDLWEWYHDKVGNKNCVICDTMWQTESGSHLIAPLAGAVGTKPGSATVPFFGVDACLIDPVSGEELKGNDVEGVLAVKSPWPSMARSVWNNHSRYIETYLKPYPGFYFTGDGAGRDHDGYYWIRGRVDDVVNVSGHRLSTAEIEAALGEHDGVSESAVVGITDELTGQAVIAFVSLKDGYLQENASEGDMAHITPDNLRRELVLQVRGEIGPFAAPKSVVVVNDLPKTRSGKIMRRVLRKVASNEADQLGDMSTLANPDCVPSIISAVENQFLIQKKK

SEQ ID NO: 151178 - DNA, 2010 bp, Penicillium chrysogenum Wisconsin 54-1255; identical to SEQ ID NO: 122180
  CDS (1)..(2010)

SEQ ID NO: 151179 - protein, 669 aa, Penicillium chrysogenum Wisconsin 54-1255; identical to SEQ ID NO: 122181

SEQ ID NO: 151180 - DNA, 2106 bp, Schistosoma mansoni
  CDS (1)..(2106)
atgagtatcgtttcacctagtgatttaatcagagaatctgctcatgttaagtcagctgaagaacacaaattgttatctgacaaggcattatgtaatcccaaagaattttggttgggatatgcaatgaagtttcactggcaatcacctccttcattcggaaaatgtcttagttacaatttcgattgccgtaaaggacctattttcgttaaatggtttgaagatggatgcacaaatatttgctacaatatcttggatcgtaatgttgaccgtggttttggcgataaagtggcaattttatgggaaggtaacgatccaaatgatacaaatcgtttgacatactctgaaatattggtcaaggtcaaaagaattgggaaaatgcttgagaatttcggtattagaaaaggagattgtgttgccatttatatgcctatgatcccagagcttctgatgactatgttagcatgtgctcgtattggtgctgtacatactgttgtatttggtgggttctctgcctgtgctcttgctgatcgaattatcgatgccaaatgtagcattcttatcactgctgatggaacatggagagggtcaaaacttattcaacttcaatcaattgcgtctactgcaatggatatgtgtgaagagaaaggatattctgtacgacgatgtgttgtatttcaacatgtcaccgcttttccttctaaatccactaatggaatcagtaataatgttgaaagtaaagttggcgttcgacccgcttcaatgcttgatgtcccattaaaggatggtcgtgattattggtggcatgatataatcagtactattcctgaaaatactgattgtcctgtagaatgggtgaattcagaagatccgttatttatactttatacaagtggcagtacaggacgaccgaaaggtgttgtacacaccacaggtggctacatggtttatacagctacaacattcttctacacgttcgattatcatgaagatgatatatattggtgtactgctgatgccggttggataacaggtcattcatatgttgtatatggaccattattaaacggtgctacaagtgtagtttttgaaggcattccaacttggcctgatccgggtcgatattggtctatcgtagatcgatataaagtgacgaaattctatacagctccaacagcaattcggacgttaataaaggctggtgatcaatacgtccaatgttatgatcgtacatcattaaaagttcttggaagtgttggtgagccaatcaatgtatctgcttgggaatggtattataatattgtgggtaatggtaaatgttcaattgtcgatacattttggcaaacagaaactggtggacatatgcttacatcattacctggagcaaatataatgaaacctggctgtgctactaaaccgttctttggcattgatgctcgaatattatcggaaagtggtgaagatttaacagacaagtcaaaagaactaggtatcaatgtagaaggttatttggtctttgctaaaccatggcctggtatgatgagaacaatcaataataattatgaattatttgaatcagtttattttaaacgttttcctggttattatgttgctggtgacggttctgtgttagataaagatggagatttttggataaccggtcgtttagatgatatgttgaatgttagcggtcatcttattagtactgcagaagtagaaaatgctcttctattagatccaaatgttagtgaagctgctgttgtcggtcgaaaacattcagttaagggtgaatgtttatattgttttgttacattgaaagatactataccaaatgatcatatgaatggtttcatggatgttgatataattacacaagaaatgaaatcagaattatgtcaaatgatacgaacaaaaattggaccatttgctactccagattacattcagagtgcccctgtgctaccaaaaacacgtagtggtaaaattataagacgtattttacgaaaaatagctaatgaagattatgaattcggtgatacatcaactttattggattattcttgtttagaaactttaattaaattatcaaaatccgtcataaatcaataa

SEQ ID NO: 151181 - protein, 701 aa, Schistosoma mansoni
MSIVSPSDLIRESAHVKSAEEHKLLSDKALCNPKEFWLGYAMKFHWQSPPSFGKCLSYNFDCRKGPIFVKWFEDGCTNICYNILDRNVDRGFGDKVAILWEGNDPNDTNRLTYSEILVKVKRIGKMLENFGIRKGDCVAIYMPMIPELLMTMLACARIGAVHTVVFGGFSACALADRIIDAKCSILITADGTWRGSKLIQLQSIASTAMDMCEEKGYSVRRCVVFQHVTAFPSKSTNGISNNVESKVGVRPASMLDVPLKDGRDYWWHDIISTIPENTDCPVEWVNSEDPLFILYTSGSTGRPKGVVHTTGGYMVYTATTFFYTFDYHEDDIYWCTADAGWITGHSYVVYGPLLNGATSVVFEGIPTWPDPGRYWSIVDRYKVTKFYTAPTAIRTLIKAGDQYVQCYDRTSLKVLGSVGEPINVSAWEWYYNIVGNGKCSIVDTFWQTETGGHMLTSLPGANIMKPGCATKPFFGIDARILSESGEDLTDKSKELGINVEGYLVFAKPWPGMMRTINNNYELFESVYFKRFPGYYVAGDGSVLDKDGDFWITGRLDDMLNVSGHLISTAEVENALLLDPNVSEAAVVGRKHSVKGECLYCFVTLKDTIPNDHMNGFMDVDIITQEMKSELCQMIRTKIGPFATPDYIQSAPVLPKTRSGKIIRRILRKIANEDYEFGDTSTLLDYSCLETLIKLSKSVINQ

SEQ ID NO: 151182 - DNA, 2103 bp, Uncinocarpus reesii 1704
  CDS (1)..(2103)
atgtcagagtctcccgctgaaccaaaggccccagtggttatagaggcccaccaggtcgatactttccatgtcccggaagcattccatcacaaccatccccatggaccgcacctgaggaatatggatgagtacaaccggctctatcaagaatccataaacgaccccgacacgttttgggcgcgcatggcgcgcgagcttatcacatttgataaagatttcgtcaaaactcacattgggtcttttgctgggggggataacgcatggtttgtcggtggtcgcctgaacgcttcgtacaattgtgtcgaccgtcatgccatgcagaatccagacaagacggctataatatatgaagcagacgaacctgaccagggccggtatatcacctacggcgagttactgaaggaagtctgccagctggcttgggttctgaagagtcagggtgttaagaaaggtgatactgtggcaatatatcttcctatgattcccgaagccatcgttgcgctcctagcctgtgctcgcattggtgctattcattctgtcgtctttgcaggtttctcttccgattccttgcgcgaccgtgttctcgatgcgcgatcaaagttcgttataaccgccgatgagggtaaacgtggcggaaaactcatcgggacgaagaagatagtagacgaggcgttgaaacaatgcccagacgttgtcaactgcatcgtctttaaaagaaccggcgcagatgtaccctggaccaagggccgtgatttgtggtggcatgaagaagtcgaaaaatatccaaactatattcctgttgagccaatggattctgaggaccctcttttcctgctatatacgtccggctcgactggaaaacccaagggggttatgcatacaacagctggctatcttgtaggggcagccgccacttgcaaatacgtcttcgatgttcaccgtgacgaccgtttcttttgcggcggtgatgttggatggattacagggcatacatatgttgtctatgccccgttgcttctgggatgtgccactgtggtcttcgaaagcacaccagcataccctaacttttcccgttactgggatgttattgaaaagcataaggtgacccagttttatgtcgcaccaactgcgttgcggcttttgaaacgtgcgggcgaccatcatatcaatcacgaaatgaaagatatgcgcgttctgggctctgtaggcgaacctatcgcagctgaggtctggaagtggtaccatgatgttattggaaaaagacaagcccacgtggttgatacatactggcaaaccgaaaccggctcccatgttatcactcctctcgctggcatcacgccaactaagccaggaagtgcgtcgcttccattctttggtattgaccctgctatccttgatcccgttacgggcgtagaggtccacggaaatgatgtcgagggaattcttgccttcaagaagccatggccaagtatggcccgcactgtgtggggtgatcataaacgatatatggacacttatttcaatgtctataaaggttattatttcaccggagacggcgccgggcgagaccatgaaggctattattggattagaggacgcgtggatgatgttgtgaacgtgtctggtcatcgcctttcgactgcggagatcgaagctgctcttatcgaacaccactccgttgctgaagccgctgtcgttggtattccagacccattgacaggacaggctgtgcatgcttttgttgccttgaagaatagtaacgagaacaaggaacaacttcgaaaagaactggtaatgcaggttcgtaaatcgattggcccgtttgctgctccgaaggttgtgttcgtgatcgacgaccttccgaagacacgtagcggcaagatcatgagacggattttgcgcaagattttaagcggcgaggaagatagcctcggcgacatctcaacgctttctgatcccagcgtggtttctaagattcttgatacctatcatgagtggaagaaagtagttgacgccgccgcctctgctgctgccactgtagcttccaatacggccaccaacgcagcagctgcgatctcagcgaaaacaacaaccgccgcttga

SEQ ID NO: 151183 - protein, 700 aa, Uncinocarpus reesii 1704
MSESPAEPKAPVVIEAHQVDTFHVPEAFHHNHPHGPHLRNMDEYNRLYQESINDPDTFWARMARELITFDKDFVKTHIGSFAGGDNAWFVGGRLNASYNCVDRHAMQNPDKTAIIYEADEPDQGRYITYGELLKEVCQLAWVLKSQGVKKGDTVAIYLPMIPEAIVALLACARIGAIHSVVFAGFSSDSLRDRVLDARSKFVITADEGKRGGKLIGTKKIVDEALKQCPDVVNCIVFKRTGADVPWTKGRDLWWHEEVEKYPNYIPVEPMDSEDPLFLLYTSGSTGKPKGVMHTTAGYLVGAAATCKYVFDVHRDDRFFCGGDVGWITGHTYVVYAPLLLGCATVVFESTPAYPNFSRYWDVIEKHKVTQFYVAPTALRLLKRAGDHHINHEMKDMRVLGSVGEPIAAEVWKWYHDVIGKRQAHVVDTYWQTETGSHVITPLAGITPTKPGSASLPFFGIDPAILDPVTGVEVHGNDVEGILAFKKPWPSMARTVWGDHKRYMDTYFNVYKGYYFTGDGAGRDHEGYYWIRGRVDDVVNVSGHRLSTAEIEAALIEHHSVAEAAVVGIPDPLTGQAVHAFVALKNSNENKEQLRKELVMQVRKSIGPFAAPKVVFVIDDLPKTRSGKIMRRILRKILSGEEDSLGDISTLSDPSVVSKILDTYHEWKKVVDAAASAAATVASNTATNAAAAISAKTTTAA

SEQ ID NO: 151184 - DNA, 1932 bp, Branchiostoma floridae
  CDS (1)..(1932)
atgccggaggcagacggcttccctggggtccacacccaccaggatttgtacgacttctctctgagggaacccgacactttctggggaacacttgcgaagtctcgcatacagtggatcaagtccttcgaccgtgtgagtgactgtgatatgtcagcagggaagatagagtggtttcttggaggccagctcaacgtctcagttaataccttggacagacatgtgcagaaaatgccagacaaagtagctctgatttgggagagggatgagccaggaactgaagtgaggattacgtacagggaactcctcgccatgacatgtcagctggctaacactttaaggagccatggagtaaagaagggagacagagtgtgcatttacatgcccaactctcccatagctgtggcagccatgcaagcttgtgcacgaatcggagccccacacagtgtggtgtttgctggcttcagtgctgatgccttggcaagcaggatccaagatgccaactgtgaaacagtgatcacgacagatcaggctgtgagaggagggaaagtgatcgagctgaagaagactgtggatgatgctgttgccaactgccccatggtgaagagggtactggtagcacagaggactggcaaagaagttccaatgaaacacaacctggacttctccctcgaggaggatatgtgcaggcagtccacagagtgtaccccagagataatggacagtgaggaccctctgttcatgttgtatacgtccggcagcacaggcaaacccaaggggatcctccatacacaggcagggtacctgctgtatgcaaccatgacctccaagtttgcctttgacatccgtgaagatgacatattcagctgtgtggcagacataggctggatcactggtcacagctatgttgtatacggccctctgagtaatggtgccaccactgtgctcttcgaaagcatacctacttatcccaatccaggtaggtactgggagatggtggagagactgaaaatcaaccagttctacctggcccccactgctgtccgactgctgctcaagtttgatgagtcctgggtgaagaagtatgacaggtccacactcaggaaattggggtgtgttggagagccactgaatgttgaggcaggtgactggtacagccaggtggtgggggagggcaggtgtgatctggtggacacctggtggcaaacagaaactggaggcattatgatcacacccagaccctcccagcctggcgctgaaatcctacatggtcccatgagacccttctttggaattgaacctgtgctgttcaatgatgagggaaaggagctgactggcaaggacgtgtcaggtgcgctgtgtgtcaggaaaccctggccaggcatcgcacggacaatctttggagaccatgagagatatctagacacatacttcagaccctatccagggacatacttctcaggggatggagctcacagggatcacaagggttactatcacatcactggacgcatggatgatgtcattaacatcagtggacacaggattggcacagcagagattgaggatgccatggatgaacatcatgatgtagctgaaacagctgtcatcggaactccacatgaagtaaaaggagaagtaccatatgcatttgtgatcttgaaagaaggagttcgacgtgatgaggaagacatagccaaggagctgaaggatctggtgaggaaaaccatcgcagcatatgcagttcctgataccattttgatcacacctggcttacctaagaccagatctgggaagatcatgagacgaatcttgcgcaagatctccacagacaaagaagaggagttgggagatgtgtccaccctggcagagcccagtgttgtagatgccatcgtccaaagtcacaaggcatacaagcaaaggatcagaagctaa

SEQ ID NO: 151185 - protein, 643 aa, Branchiostoma floridae
MPEADGFPGVHTHQDLYDFSLREPDTFWGTLAKSRIQWIKSFDRVSDCDMSAGKIEWFLGGQLNVSVNTLDRHVQKMPDKVALIWERDEPGTEVRITYRELLAMTCQLANTLRSHGVKKGDRVCIYMPNSPIAVAAMQACARIGAPHSVVFAGFSADALASRIQDANCETVITTDQAVRGGKVIELKKTVDDAVANCPMVKRVLVAQRTGKEVPMKHNLDFSLEEDMCRQSTECTPEIMDSEDPLFMLYTSGSTGKPKGILHTQAGYLLYATMTSKFAFDIREDDIFSCVADIGWITGHSYVVYGPLSNGATTVLFESIPTYPNPGRYWEMVERLKINQFYLAPTAVRLLLKFDESWVKKYDRSTLRKLGCVGEPLNVEAGDWYSQVVGEGRCDLVDTWWQTETGGIMITPRPSQPGAEILHGPMRPFFGIEPVLFNDEGKELTGKDVSGALCVRKPWPGIARTIFGDHERYLDTYFRPYPGTYFSGDGAHRDHKGYYHITGRMDDVINISGHRIGTAEIEDAMDEHHDVAETAVIGTPHEVKGEVPYAFVILKEGVRRDEEDIAKELKDLVRKTIAAYAVPDTILITPGLPKTRSGKIMRRILRKISTDKEEELGDVSTLAEPSVVDAIVQSHKAYKQRIRS

SEQ ID NO: 151186 - DNA, 1968 bp, Branchiostoma floridae
  CDS (1)..(1968)
atggctgacaaaggagagggcgtgtatatgcctcacgatcatatcagggaaaactcccatgtttcttccatagagcagtaccacaagatgtacaaggaatctgtggaaaatcccgaagcgttctggggcaaaatcgccgaaaatttctattggaaatcccagtgtacgggcaagttttgggagtacaactacgatgtccgccagggtgagattttcataaaatggatggcgggagcgacgactaacgtttgttacaactgcctggaccacaacattgagaaggggttaggagacagtgtggcgttttactgggaaggaaactacccaggagatgccagtcaaatcacttacaatgagctgctgaaggaagtttgcaagtgtgcaaatgtcctcatcaacaaaggagtgaagaagggtgaccgtgtggccatctacatgccgatgattgtggagctggtagtggccatgttagcctgtgccaggattggagctgtccattctattgtgtttggaggattctctgcagactctttagctgggaggatcttggactccaaaagctctgttctgatcactgcagacggagtgtatcgtggcgagaagatgttgaacctgaaggacatctcggatacggccatccaggagtgtcaggacgcgggcttcaccgtgacctcctgtatcgtggtcaggcatctggtgttaatgtgtgactctgattggcagaccaaatggcacaatgaccgtgactgctggtggcatgacctgatggcagatgccagtgaccagtttgagccagtctggttggatgctgaggatccactcttcatgctctacaccagtgggtccacaggcaaacccaaaggtgttctccacacccaggctggttacatgctctacgctgcaaccactactaaatacgtctttgactacaagcctggggagatctactggtgcactgctgacattggctggataactggacactcctacatcacatatggtccaatgctaaatggagctacaagtgttatatttgagggaatgcccctatggccagatgcaggaaggatgtgggagatagtggacaaatataaggtctccaaattctacactgctccaacagccattcgcacactcatgaagtttggagaggactatgtcaagaagcactccagaaaaagcctgaaggtgcttggcacagttggtgaacccatcaacccagaggcttggctctggtactacaatgtcatcggggacaagagatgttccattgtggacacatactggcagacggagactggtggacatgttctgacacctttacctggtgccactcctgccaagcctggctctgcaactctgcccttctttggacaagtcccagctgttgtgaatgagaatggtgaggaactggatggaccatgtgaagggtacctggttctgaagcagccgtggccaggacagatgaggacggtatacggcgaccaccaacgcttcgaacgcacctacttccagaagttcccaggctactacctcactggggatgggtgcataagggataaggacggctactattggatcacggggaggaccgacgacaccatgaacgtgtccggccatctgctgagcactgcggaaatcgagtctgccctgattgaacactcagcagtagcagaggctgccgttgtctcttacccgcattcaattaagggagagtgtgtgtactgctttgtcactctgaaagaggtatgtttacgtcagaagattggtccgatagctgttccagaatatatccagaatgctccaggtcttccaaaaacgcgctcgggtaagatcatgcggcgtgttctgaggaagatcgccaggaaccagcaggacctgggggacatcagcaccatggcagactcctctgtggtggaggtgctgtttcagaacaggcccaaaaatgttcagggctgggtggagtag

SEQ ID NO: 151187 - protein, 655 aa, Branchiostoma floridae
MADKGEGVYMPHDHIRENSHVSSIEQYHKMYKESVENPEAFWGKIAENFYWKSQCTGKFWEYNYDVRQGEIFIKWMAGATTNVCYNCLDHNIEKGLGDSVAFYWEGNYPGDASQITYNELLKEVCKCANVLINKGVKKGDRVAIYMPMIVELVVAMLACARIGAVHSIVFGGFSADSLAGRILDSKSSVLITADGVYRGEKMLNLKDISDTAIQECQDAGFTVTSCIVVRHLVLMCDSDWQTKWHNDRDCWWHDLMADASDQFEPVWLDAEDPLFMLYTSGSTGKPKGVLHTQAGYMLYAATTTKYVFDYKPGEIYWCTADIGWITGHSYITYGPMLNGATSVIFEGMPLWPDAGRMWEIVDKYKVSKFYTAPTAIRTLMKFGEDYVKKHSRKSLKVLGTVGEPINPEAWLWYYNVIGDKRCSIVDTYWQTETGGHVLTPLPGATPAKPGSATLPFFGQVPAVVNENGEELDGPCEGYLVLKQPWPGQMRTVYGDHQRFERTYFQKFPGYYLTGDGCIRDKDGYYWITGRTDDTMNVSGHLLSTAEIESALIEHSAVAEAAVVSYPHSIKGECVYCFVTLKEVCLRQKIGPIAVPEYIQNAPGLPKTRSGKIMRRVLRKIARNQQDLGDISTMADSSVVEVLFQNRPKNVQGWVE

SEQ ID NO: 151188 - DNA, 2028 bp, Clavispora lusitaniae ATCC 42720
  CDS (1)..(2028): transl_table=12
atgacccatacggttgtacacgaggccaacggcgtcaccccacgtcacactccaaaagagttttatgcccggcagcctgccaagggccacattgagtccttggagcagtaccaacagatgtaccaacaatccattaatgacccagaggctttttttggtcccatggccaaggaattgttgcactgggatagaccattcaccaaggtcaaggctggcggtcttgcccatggtgatccacaatggtttatcggtggtgaattgaacgcatgctacaactgtgttgatcgttgggcctatgctcacccagacaagcctgcactcatttacgaggctgatgatgagaaggactcccgtaccctcacgtatggtgaacttttgcgcgaggtcagtgctgttgctggtgttttgcagagctggggtgttaccaaaggcgacaatgttgccatttacttgcctatgaacgctcacgctgttgtggccatgttggccgtggctcgtttgggtgctgtacacctggtgatctttgctggtttctctgctggatccatccgcgaccgtgtgaatgatgctggatgcaaggctttgattacttgtgacgagggtaagcgtggtggtaagaccatcaacatcaagaagttatgtgacgaggctttgcaatcgtgcccatcagtggaaaaggtgttggttcaccgcagaacaggtaaccctgacattgcgactgttgctggtcgtgacttctggtgggatgaggaaactgccaagttcccaggttatcttccacctgtgtctgtcaacgctgaggacccattgttcttgttgtacacttcgggctctaccggctctccaaagggtgtggttcacactactggtggttacttgcttggtgcagctatgtccaccaaatacgtttttgatgtgcattccctggatgttgtctttactgcaggtgatgttggctggatcaccggccacacctatgccctttacggtcctctccttttgggtgtcccaacggtggtgttcgaaggtacacctgcttaccctgactacggtcgtttgttccagatcatcgataagcaccgcgcaacacacttttacatcgctcctactgcgttgcgtcttttgagaaaggctggcgaacacgagattgaaaagtacgacttgacatcgttgagaaccttgggttccgtcggtgagcctatttccccagacatttgggagtggtaccatgaaaagattggccgtggccagtgtcacatctcggacacttactggcagacagagagtggttcgcacttcattgctccactcgctggtgttacacccaacaagcctggcctggcctctttgcctctctttggtattgacgcatgcatcatcgacccggtgtcgggccacgaagtcaagggcaatgatgtagagggtgttttggcgatcaagaacacatggccatctatggcacgttctgtgtaccgtaatcaccaaaagtacatggacacctacttgaaaccataccctggctactacttcacaggtgacggtgctgcgcgtgatcatgatggctactactggatccgtggccgtgtggatgacgttgtcaatgtgtcgggacatcgtttgtctacagccgagattgaagctgctttgatcgaacaccacggtgtttctgaatcggctgtggttggtatcaatgatgacttgaccggtcaggctgttgttgcgtttgttgcgttgaaggacgaagttgccgatgccatcaatggcaacgagacttctgaggaggcgttcgctttgcgtcgtgagttggtgttggtggttcgtaaagagattggaccatttgcggcaccaaagtctgtgatcattgtccaggacttgccaaagacacgttctggtaagatcatgcgccgtatcttgcgtaagatctcgtcaaatgaagctgaccagttgggtgacatcctgacattggctaacccacaatctgttgcgggtatcattgactcgttcgctgcgcaatttggcaagaagtaa

SEQ ID NO: 151189 - protein, 675 aa, Clavispora lusitaniae ATCC 42720
MTHTVVHEANGVTPRHTPKEFYARQPAKGHIESLEQYQQMYQQSINDPEAFFGPMAKELLHWDRPFTKVKAGGLAHGDPQWFIGGELNACYNCVDRWAYAHPDKPALIYEADDEKDSRTLTYGELLREVSAVAGVLQSWGVTKGDNVAIYLPMNAHAVVAMLAVARLGAVHSVIFAGFSAGSIRDRVNDAGCKALITCDEGKRGGKTINIKKLCDEALQSCPSVEKVLVHRRTGNPDIATVAGRDFWWDEETAKFPGYLPPVSVNAEDPLFLLYTSGSTGSPKGVVHTTGGYLLGAAMSTKYVFDVHSSDVVFTAGDVGWITGHTYALYGPLLLGVPTVVFEGTPAYPDYGRLFQIIDKHRATHFYIAPTALRLLRKAGEHEIEKYDLTSLRTLGSVGEPISPDIWEWYHEKIGRGQCHISDTYWQTESGSHFIAPLAGVTPNKPGSASLPLFGIDACIIDPVSGHEVKGNDVEGVLAIKNTWPSMARSVYRNHQKYMDTYLKPYPGYYFTGDGAARDHDGYYWIRGRVDDVVNVSGHRLSTAEIEAALIEHHGVSESAVVGINDDLTGQAVVAFVALKDEVADAINGNETSEEAFALRRELVLVVRKEIGPFAAPKSVIIVQDLPKTRSGKIMRRILRKISSNEADQLGDISTLANPQSVAGIIDSFAAQFGKK

SEQ ID NO: 151190 - DNA, 2019 bp, Clavispora lusitaniae ATCC 42720
  CDS (1)..(2019): transl_table=12
atgcctgaacatttggccatggatcacgagggggcccagcagcccccacaaggtttctttgacagatcccactccgctcccaacttgagctctttggacgagtacaatgccatgtacaagcagtccattgacgacccggccacgttttttggcaaccaggcccgcgatctcttgtcgtggagcacgcctttcaacgtcgcccgctacccggcgtcgcccaaggacgactttgccaacggcgacattccagcgtggtttctcggcggccagttgaatgcgtgctacaacgcagtcgaccgctgggccttcgaggacccaaacaagcccgccatcatctacgaaggtgacgagcccggaacaggccgcatcatctcctacggcgagttgttgaaggacgtgtgcaagttggcccaggcgttggtcaaggccggcgtgaaaaagggcgacaccgttgccgtgtacttgcccatgattcccgaggccattgtcaccttgttggccattgtgcgtatcggtgccgtgcactcggtggtgtttgctggcttttcgctgacctcgttgcgtgaccgtattgtggacgccgactcgcgcatcgttatcaccgccgacgagagcaagcgtggtggaaagaccattgaaacaaagaaaatcgttgacgaggccctcaaggacttgccccaggtgcgcaatgtgtttgtgttcaagcgtacgggaaacaaacatgtgcccttctatccgggccgtgacttgtggtggcacgatgagttggccaagcacggcaactactctcccccagtcgctgtcgactccgaggacccattgtttttgttgtacacatccggctccacaggtaaaccaaagggtgtgcagcacaatgtcgccggttatttgcttggtgcgttactcacaaccaagtacactttcgacgtgcaccgtgatgacatcatcttcactgccggtgatattggatggatcacgggccacacatacgtggtctacggtcctttgctcaacggtgccaccacagttgtattcgaaggcactccagcttacccagactactcgcggtactggcagattgttgacgagtacaaggttaaccagttctacgtggcgccaaccgcgttgcgtttgttgaagcgggctggcccctccttcatcgaaaagttcaagttggactccttgcgtgtgttgggttctgtcggtgaacctattgcaggagaggtgtggcactggtacaacgagcacattggccgtggcaaggctcatattgtggatacctactggcaaaccgagtctggctctcacttgttgaccccgttggctggtgtaacccctaccaaacccggttccgcgtccttaccattctttggtattgacgcccatgtgttggatcctgtcacgggtaagcgcttgactgaggatggcgtggaaggtgttttggccatcaagaacgcctggccttcgatcgcacgtggtattttcaacgactacaaccggtttatcgacacttaccttggcaactacaaaggctactatttcacgggcgatggcgcagcaagagacaaggacggcttttactggatcttgggccgtgtcgatgatgtggtcaatgtgtctggtcacagattgtctactgcagagattgaggcggcgttgatcgagcacgaaatggttggtgaaagtgctgttgttggatacgcagacgacttaacgggccaggctgtggctgcgtacgtgtcgttgaagtctcagttcaagtctgatgacaaggacgcgatcgacgccatcaagaaggagttgatcttgactgtcagaaaggaaattggacctttcgctgcgccaaagttgattttgttggtgaacgacttgccaaagacgagatcgggcaagatcatgagaagaatcttgcgtaaggttttggccggcgaggaggaccagttgggtgacacctcgacattgtccgaccctagtgttgtgcaacagatcatcgacgttgtcaaggaaacaagaaagtga

SEQ ID NO: 151191 - protein, 672 aa, Clavispora lusitaniae ATCC 42720
MPEHLAMDHEGAQQPPQGFFDRSHSAPNLSSLDEYNAMYKQSIDDPATFFGNQARDLLSWSTPFNVARYPASPKDDFANGDIPAWFLGGQLNACYNAVDRWAFEDPNKPAIIYEGDEPGTGRIISYGELLKDVCKLAQALVKAGVKKGDTVAVYLPMIPEAIVTLLAIVRIGAVHSVVFAGFSSTSLRDRIVDADSRIVITADESKRGGKTIETKKIVDEALKDLPQVRNVFVFKRTGNKHVPFYPGRDLWWHDELAKHGNYSPPVAVDSEDPLFLLYTSGSTGKPKGVQHNVAGYLLGALLTTKYTFDVHRDDIIFTAGDIGWITGHTYVVYGPLLNGATTVVFEGTPAYPDYSRYWQIVDEYKVNQFYVAPTALRLLKRAGPSFIEKFKLDSLRVLGSVGEPIAGEVWHWYNEHIGRGKAHIVDTYWQTESGSHLLTPLAGVTPTKPGSASLPFFGIDAHVLDPVTGKRLTEDGVEGVLAIKNAWPSIARGIFNDYNRFIDTYLGNYKGYYFTGDGAARDKDGFYWILGRVDDVVNVSGHRLSTAEIEAALIEHEMVGESAVVGYADDLTGQAVAAYVSLKSQFKSDDKDAIDAIKKELILTVRKEIGPFAAPKLILLVNDLPKTRSGKIMRRILRKVLAGEEDQLGDTSTLSDPSVVQQIIDVVKETRK

SEQ ID NO: 151192 - DNA, 2067 bp, Ajellomyces dermatitidis SLH14081
  CDS (1)..(2067)
atgtctgatggtcccattacgccgcctaaggcgccagtagttgttgaagcccacgaggttgacactttccatgtcccccaagcttttgtcgagaaccatcctacgagaacccatctaaaggacctggacgagtataagaagctctatgaagaatcgatccgtgacccgcatactttttgggcacggctggcccgtgagctcattacattcgaaaaggatttcgacaccacccgcaacggctcctttgaaggcggagacgttgcgtggttccttggtgggcgtttgaacgcgtcgtacaattgcgtcgaccgccatgctatcaaggatcccaacaaggtggctatcgtttacgaggcggatgaacccaatgaaggtcgcactattacatatggcgagctcctgaaggaagtttcccggatggcctgggtgctgaagcaggctggtgttagaaagggggataccgtggccatttacttgcctatgattcccgaggccgtgattgcgttcatggcgtgtattcgtattggtgcggttcactccgtcgtttttgctgggttctcctcggattctctccgcgaccgcgtcttggatgccaagtcgaaagttgtcattaccacagacgaggggaagcgtggtgggaagctgattgggaccaagaagattgttgacgaggccctcagtcaatgcccggatgtcacaaactgcattgtgtacaagaggacgggcgctgatgtgccgtggacgaagggccgagatttgtggtggcatgaggaggtcgagaagtatcccaactacattccccctgagtcaatgaactcggaggatcctctcttcctcctgtacacatccggttcgactgggaagcccaagggtctgatgcacacgacagctggttatttggttggcgcggccgcaactggcaaatatgtgtttgatattcatgactcagaccgcttcttctgcggtggtgatgttggttggattacggggcacacctatgtcgtatatgctcctctgcttcttggatgtgcaactctggtgtttgagagcacgccggcatatcctaacttctcccgttattgggatgttattgagaagcacaaggtgacccagttctatgttgccccaactgctctgagacttctgaagcgtgctggaaatgactacatccaccacaaactcaagagtctccgtattttgggttctgttggcgaaccaattgcggccgaggtgtggaaatggtatttcgaggtcgttggaagggaagagtgtcatcttattgacacatactggcaaactgagaccggctcccacgttattacccccctgggtggcatcacgccaacgaaacctggcagtgcttcgctccccttcttcggcattgaacctgccatcattgacccggtatcgggagaggaaatcaaaggtaacgacgttgaaggtgtcctagccattaaacagccatggcccagtatggcccgcacagtctggggtggccacaagagatatatggacacatatttcaatgtctacaagggcttttacttcactggcgatggtgctggacgtgatcttgacggatactactggatccgaggccgtgttgacgacgttgtcaatgtttctggccaccgtctgtcaactgcagagattgaagctgctcttattgaacactctgctgtggctgaagcggctgtcgtcggtattgcggatgaactcaccggacaagccgtcaacgcctttgtcgccctgaaggccagcagcgacaatgtcgaacaactccacaaggatcttatcatgcaagttcgcaaatcgattgggccatttgctgctcccaaggctgtattcatcgttgatgacctgccgaagactcgaagtggtaagatcatgcgacgaatcttgagaaagattcttagcggtgaggaggatagcttgggtgatatctcgactctatccgacccaagtgttgttgcgaaaatcatcgatacttaccatgcttcaaagaagaagaagggtatttcttttgttttccaaaataatgaaaataaaaataaaatgaatgaataa

SEQ ID NO: 151193 - protein, 688 aa, Ajellomyces dermatitidis SLH14081
MSDGPITPPKAPVVVEAHEVDTFHVPQAFVENHPTRTHLKDLDEYKKLYEESIRDPHTFWARLARELITFEKDFDTTRNGSFEGGDVAWFLGGRLNASYNCVDRHAIKDPNKVAIVYEADEPNEGRTITYGELLKEVSRMAWVLKQAGVRKGDTVAIYLPMIPEAVIAFMACIRIGAVHSVVFAGFSSDSLRDRVLDAKSKVVITTDEGKRGGKLIGTKKIVDEALSQCPDVTNCIVYKRTGADVPWTKGRDLWWHEEVEKYPNYIPPESMNSEDPLFLLYTSGSTGKPKGLMHTTAGYLVGAAATGKYVFDIHDSDRFFCGGDVGWITGHTYVVYAPLLLGCATLVFESTPAYPNFSRYWDVIEKHKVTQFYVAPTALRLLKRAGNDYIHHKLKSLRILGSVGEPIAAEVWKWYFEVVGREECHLIDTYWQTETGSHVITPLGGITPTKPGSASLPFFGIEPAIIDPVSGEEIKGNDVEGVLAIKQPWPSMARTVWGGHKRYMDTYFNVYKGFYFTGDGAGRDLDGYYWIRGRVDDVVNVSGHRLSTAEIEAALIEHSAVAEAAVVGIADELTGQAVNAFVALKASSDNVEQLHKDLIMQVRKSIGPFAAPKAVFIVDDLPKTRSGKIMRRILRKILSGEEDSLGDISTLSDPSVVAKIIDTYHASKKKKGISFVFQNNENKNKMNE

SEQ ID NO: 151194 - DNA, 2043 bp, Caenorhabditis briggsae
  CDS (1)..(2043)
atgtcggacgttcgcgtcaaattcaaccttaccaatggagaggatgggcaggatgaggatatcttcaacccgccagcacctcttctcgccggtgcccactgctctggcctccaaaactaccacgacctctaccgcacctcgatcaacgatgctgatggtttctggcgcaacgttgcctctgaccttcacttcgagcaaggcacatccaaaggacttgagtacaatttcgacgccaaagctgggccagtctactgtaaattcatggatggcgccaagacaaacatctcctacaactgcttggaacgaaatatcaaacgaggactgggagacaaaatcgcctatatctttgaaggaaacgagccatctgacgtctccacatggacctacaaagagttgcacgcacaagttgtccaattctcggcagttcttcgtgctcacggtgttcaacgcggagacgtcgttgctctttaccttccaatgattccggaactcgccgttgctatgttagcatgcgcacgtatcggagcaatgcactctgttgtcttcgccggtttctctgctgaatctcttgctgctcgcgtcgtcgacgctcgttgtagagtagtggtgacagctgatggagtgttccgtggtgccaagccgattgggctgaagtcaattgcggatgcagctgtggcacttgccgctcaagaagacgtcaaagtggaagctgtcattatggtggagcatttaaagcgagtgacgaagccggatggagtggaacttccaaaagcggactattcggaaatcacatttgtatacgaaacagaaatgcaaaagtgctctggcatagactctcccgtagaatggatggacgctgaatcccctctcttcctgctctacacatctggctccacaggaaaaccaaaaggaatccaacacacgacggccggctacatgacatatgcatacgccactacaaagtacacattcgacgccaaagacgacgacgtttactggtgcaccgccgattgtggatggatcaccggacactcgtacttgctctatggccctctcatgaacggtctcaagggaatctggtacgagggtgtgccgacctatccgacgccttctagaatgtgggatgctgttgataagtatggtgtcaccaagctctacacgtcaccaactgccgctcgtgctctgatggctctcggaaataagtggcttgaaagcacttcccgaaaaagcctgaaggttatcggaaccgttggagagccaatcaatccagccgcctggatgtggttgtacaagaaggttggactttcgaatgtctccattgtcgacacctactggcaaactgagactggaggacatatgatcacctgccttccaggagcgactccaatgaaaccaggagccgccgctatgccattcttcggtgcctctcctgttcttctagatgctgaaggacgtgtgattgagggaccaggagagggatcattgtgtttcgatcgtgcctggccaggaatgatgagaggtatctatggagatgagcaacgtttcgtcaagacctactttgctccattcaacggatactatttcactggagatggtgcccgacgtgacgaggatggttacttgtggatcacaggacgtgttgatgatctcatgaacgtcagtggacatcttctatctactgctgagatcgagtctgcccttgttgctcatgagaaggtagccgaggctgctgtcgttgctgctccccatgatatcaaaggatcgttcccatacgcttttgtcacgctgaatgtgggagagaagatcgacgagaagctagtcgccgagttgaagaagatggttcgtgagaagattggagcgttggctgtgccagatgtcattcaagaggctccaggacttccaaaaactcgctctggaaaggtcactcgtagaatcctccgcaagattgctgaaggatcggagagcggcatcggcgacaccaccaccctcgtcgacgagtctgtcatcaagcaactcatttctggacgttctgcgagagcataa

SEQ ID NO: 151195 - protein, 680 aa, Caenorhabditis briggsae
MSDVRVKFNLTNGEDGQDEDIFNPPAPLLAGAHCSGLQNYHDLYRTSINDADGFWRNVASDLHFEQGTSKGLEYNFDAKAGPVYCKFMDGAKTNISYNCLERNIKRGLGDKIAYIFEGNEPSDVSTWTYKELHAQVVQFSAVLRAHGVQRGDVVALYLPMIPELAVAMLACARIGAMHSVVFAGFSAESLAARVVDARCRVVVTADGVFRGAKPIGLKSIADAAVALAAQEDVKVEAVIMVEHLKRVTKPDGVELPKADYSEITFVYETEMQKCSGIDSPVEWMDAESPLFLLYTSGSTGKPKGIQHTTAGYMTYAYATTKYTFDAKDDDVYWCTADCGWITGHSYLLYGPLMNGLKGIWYEGVPTYPTPSRMWDAVDKYGVTKLYTSPTAARALMALGNKWLESTSRKSLKVIGTVGEPINPAAWMWLYKKVGLSNVSIVDTYWQTETGGHMITCLPGATPMKPGAAAMPFFGASPVLLDAEGRVIEGPGEGSLCFDRAWPGMMRGIYGDEQRFVKTYFAPFNGYYFTGDGARRDEDGYLWITGRVDDLMNVSGHLLSTAEIESALVAHEKVAEAAVVAAPHDIKGSFPYAFVTLNVGEKIDEKLVAELKKMVREKIGALAVPDVIQEAPGLPKTRSGKVTRRILRKIAEGSESGIGDTTTLVDESVIKQLISGRSARA

SEQ ID NO: 151196 - DNA, 2136 bp, Saccoglossus kowalevskii
  CDS (1)..(2136)
atggcttccacggtatttcgcgccttaccaatagcattgcggcatccttgccatttctgcatcagaccatcgccgacgattgccaagcaccttattgggaaatggccaaaccctgtcatttcgcggacgtcaagtaacggtgtctgttcaacaatcattcccgaagtgcaagtatttaacgagaaacatggcctgaacattcagagttacaaagacctccacgatttcagtctgagagacccggcattattttgggggactctggctaaaagtcgacttgattggtaccgtgaatttgaccaagtaatgaattgtgattttacgaaaggaaaaattgcctggttccaaggagggcaactgaacgtcacggttaactgtgttgatagacataaagatagaactcctgataaaattgcattgatatgggaaaaagatgaaccaaatatgcatgaaacactgacatacaaggagctgtacgagttgatgaatcagttcgcaaatgttctcaagaatcatggtgtgctgaaaggcgatagagtatgcatttatatgccagtgtcacctctttctgtggcagccatgttagcatgtgctcgtattggtgcagttcacagtgttgtatttgctggttttagtgctgaagcacttggaagtcgaattagagctgcatcgtcagaggttgtcataacaacagatcaaggagtacgtggaggaaaaataattgatttaaagaaaactgtagatgcagctgttgcgagttgtccaactgttaagaaggtgtttgtaacacagagaactggagctgaggtaccaatgggagagctggatataccagtggaagctgaacttgctggccagcctacagaatgtaacccggaaataatggatagtgaagatatgctatttatgctgtatacttcaggtagtactggtcaacctaaaggtttagtccatacacaggctggatacctactgtatgctggcttcacacaccagactgtttttgactaccaaaaagatgacatctttgcatgtgttgctgacattggatggattactggtcattcatatgttgtgtatggaccattgtttaatggagctaccactgtgttgtttgagagtataccaacatatccagaccctggtcgttactgggagatggtagaacggttgaaggttaaccagctttactgtgctccgactgctattagattattattgaagtctggtgagaaacatgtcaacaagtacgatagatcatctcttaaaactatcggatcagttggtgaacccctgaatcatgaagcttgggaatggtattacaacgttgttgggcaaaagcgatgtactttggtcgacacttggtggcaaaccgaaactgggggtatattaatttctccacgtccatcagagccatttggtgaattgaggcttggaccaatgagagctttacctggaatagaacttgttctcatgcatgatatggataaggaaatgaaaggtaacgatgcatatggtgcattatgtgttcgaacgccgtggcccggtattgcacgtacagtatatggtgatcatcagcgctacattgatacatactttaaaacctatccagggttgtatttttctggtgatggtgcacatcgtgatcactatggttactatttgatcactggtcgtatggatgatgtcattaacgtcagtggacatcggctgggtacagctgaagttgaagatgccatggatgagcatcccgctgtagcagagacagctgtggtaggatttccacatgatatcaaaggagaaggtgtgtatgcttatgtgactttaaaagatgatatagagggagagcctgaagaacagataatggaggaactgaaagaacttgttcgtcaacagattgcaagttatgctgtcccagaaatgatacaggtggctccaggattacccaagacaagatctggaaaaattatgcgacgtattctacgtaaaattgctgcaaatgaacatgaagatttgggtgacatcaccacacttgctgaaccaaacgttgtggaggccatcgttaagaatcatgatgtaattatggaacagagaaacaagcatttaacaaagaaaaaagattccctaagttcttaa

SEQ ID NO: 151197 - protein, 711 aa, Saccoglossus kowalevskii
MASTVFRALPIALRHPCHFCIRPSPTIAKHLIGKWPNPVISRTSSNGVCSTIIPEVQVFNEKHGLNIQSYKDLHDFSLRDPALFWGTLAKSRLDWYREFDQVMNCDFTKGKIAWFQGGQLNVTVNCVDRHKDRTPDKIALIWEKDEPNMHETLTYKELYELMNQFANVLKNHGVLKGDRVCIYMPVSPLSVAAMLACARIGAVHSVVFAGFSAEALGSRIRAASSEVVITTDQGVRGGKIIDLKKTVDAAVASCPTVKKVFVTQRTGAEVPMGELDIPVEAELAGQPTECNPEIMDSEDMLFMLYTSGSTGQPKGLVHTQAGYLLYAGFTHQTVFDYQKDDIFACVADIGWITGHSYVVYGPLFNGATTVLFESIPTYPDPGRYWEMVERLKVNQLYCAPTAIRLLLKSGEKHVNKYDRSSLKTIGSVGEPLNHEAWEWYYNVVGQKRCTLVDTWWQTETGGILISPRPSEPFGELRLGPMRALPGIELVLMHDMDKEMKGNDAYGALCVRTPWPGIARTVYGDHQRYIDTYFKTYPGLYFSGDGAHRDHYGYYLITGRMDDVINVSGHRLGTAEVEDAMDEHPAVAETAVVGFPHDIKGEGVYAYVTLKDDIEGEPEEQIMEELKELVRQQIASYAVPEMIQVAPGLPKTRSGKIMRRILRKIAANEHEDLGDITTLAEPNVVEAIVKNHDVIMEQRNKHLTKKKDSLSS

SEQ ID NO: 151198 - DNA, 2010 bp, Paracoccidioides brasiliensis Pb01
  CDS (1)..(2010)
atgtctgatggaccggttataccccccaaagggccagtggtcatcgaagcccacgaagtcgacactttccatgtcccgcaagcctttctggacaagcatcccaccagaactcacctaaaggatcttgacgagtacaagaaactctacgaagaatcgatccgggatccagataccttttggtcaaggctggcccgcgagctcctgacgtgggagcgtgattttgacactgcccgttatggaacttttgaaatgggaaatgttgcctggtttctcggtgggcgtttgaatgcttcgtataattgtgttgatcgtcatgcgatcaaggacccaaataagttggcgctcatttatgaggcggatgatcccggcgaaggccgcaacattacatacggggagcttctgaaggaggtttcgcggttagcttgggtattgaagcaggctggcgttaagaagggggacactgttgcaatctacctgcccatgattccagaggctgttattgcgttcctggcgtgtgttcgcattggtgcggttcactcagtcgttttcgctggattctcctctgattcgctccgggaccgcgttttggacgcgcgctccagggtcgttattaccacggatgagggcaagcgcggtgggaagctcattgggacgaagaagatcgtggatgaggcccttaagcaatgccctgacgtgaatcactgcatagtgtacaagagaacgggtgccgatgtgccctggactaagggtcgggacatgtggtggcatgaggaggtcgagaagtatcctaactacatagttccggagccgatggattcagaggaccctcttttccttctgtacacgtcagggtcaactggaaaaccaaagggcctgatgcacacgactggcggctatttggttggcgcagctgcaactggcaaatatgtatttgacatccatcccaccgaccgcttcttctgtggtggggatgtaggctggattacaggacacacctatgtcgtctatgctcctctgcttctcggatgcgcaagtgtgattttcgagagtactccagcatatcccaacttctcccggtactgggatgttattcagaagcataaagtgacccagttctacgttgccccaacggcgctgaggctcttgaaacgcgctggaaatcaatacatccaccacaaacttgagactcttcgtatcttgggatccgtcggtgaaccaattgccgcagaggtgtggaagtggtatttcgaggttgttggaaaggaagaatgccatcttgtcgacacatactggcaaaccgagactggctctcatgttattactccactgggtggcatcacgccaaccaaacctggcagtgcctcccttcccttctttggcattgagcccgccattattgatccgacgtcaggagaggaaatcaaaggtaatgatgttgaaggtgttttggccattaagcatccatggcccagcatggcccgcacggtatggggtgctcacaagagatatatggacacctatttcaatgtttataagggattttatttcactggtgatggtgctggtcgagatatagacggatactattggattcggggccgtgtcgatgatgttgtcaacgtttctggccatcgtctatcaacagcagaaattgaagctgctctcattgaacatcatgctgttgctgaggctgctgtcgttggtattgccgatgaactcaccggacaggctgttaatgcatttgtttcgctgaaaaatggggacgacggcgaatcactccgcaaagatctcgttttgcaagttcgcaagtcaattggtccatttgctgcacccaaggctgtgttcgttgtcgaagacctgcccaagactcgaagcggtaagattatgcgacgaattttgagaaagattctcagcggagaggaggacagcctgggtgatatctcaactctatctgatccaagcgtcgttgccaagatcattgacatctaccaagcgacaaagagcaagtga

SEQ ID NO: 151199 - protein, 669 aa, Paracoccidioides brasiliensis Pb01
MSDGPVIPPKGPVVIEAHEVDTFHVPQAFLDKHPTRTHLKDLDEYKKLYEESIRDPDTFWSRLARELLTWERDFDTARYGTFEMGNVAWFLGGRLNASYNCVDRHAIKDPNKLALIYEADDPGEGRNITYGELLKEVSRLAWVLKQAGVKKGDTVAIYLPMIPEAVIAFLACVRIGAVHSVVFAGFSSDSLRDRVLDARSRVVITTDEGKRGGKLIGTKKIVDEALKQCPDVNHCIVYKRTGADVPWTKGRDMWWHEEVEKYPNYIVPEPMDSEDPLFLLYTSGSTGKPKGLMHTTGGYLVGAAATGKYVFDIHPTDRFFCGGDVGWITGHTYVVYAPLLLGCASVIFESTPAYPNFSRYWDVIQKHKVTQFYVAPTALRLLKRAGNQYIHHKLETLRILGSVGEPIAAEVWKWYFEVVGKEECHLVDTYWQTETGSHVITPLGGITPTKPGSASLPFFGIEPAIIDPTSGEEIKGNDVEGVLAIKHPWPSMARTVWGAHKRYMDTYFNVYKGFYFTGDGAGRDIDGYYWIRGRVDDVVNVSGHRLSTAEIEAALIEHHAVAEAAVVGIADELTGQAVNAFVSLKNGDDGESLRKDLVLQVRKSIGPFAAPKAVFVVEDLPKTRSGKIMRRILRKILSGEEDSLGDISTLSDPSVVAKIIDIYQATKSK

SEQ ID NO: 151200 - DNA, 1821 bp, Tuber melanosporum Mel28
  CDS (1)..(1821)
atgtccgaagcagaggtttccgtggtgagtgaggcgcataatgttgagacctaccaagttccccgcaagtattatgagaagcacccagccaaacctcatttgacgttggaggagtacaaggctcagtatcgtgaatccatcgagaacccggataaattttggggggagaaagcgagagaacttcttcactgggatattccatttcagaccgtaagaaatggatcctttcagcatggggacatcagctggttccttgagggccgtttgaacgcttgctacaattgtgtcgacagacatgctttcaaggatcccgagagacccgcgattatctacgaagccgacgagccgtccgaaggccgcgtgatcacatacagtgagctccttcgtgaggtatgcaagttggcctttgtcctaaggcagatgggtgtcaggaagggagataccgtcgccatttacatgcccatgatcccggaggccctggtcgcattcttggcaatcgttagaatcggagcggttcactccgtcgtgtttgccgggttctcggctgaatctctccgcgatcgggttctggatgcgcgctccaaagtggtaatcaccactgatgagggcaagcgcggtggaaaggttatcggaaccaagcggattgtggacgacgcattgaagcaatgccctgaagtcaagaacgtacttgtctaccgtcgtaccggatcggaggtgccctggacccagggtcgtgattattggtggcatgaggaggtcaacaagtaccccggttactgtccgcctacccttatggactcagaggaccccttgttcctgctgtacacctccggatccactggaaagcctaagggtggcacacccgcatacccggatttttcgagatattgggatatcatcgagaagcacggaattacccaattctatgtcgcaccaaccgcattgaggctgttgaagaaggccggcgaccaccacatcaacaaacagatgaagaccctgcgagtattgggctcagtcggtgaaccaatcgctgaggacgtgtggaagtggtatcatgagaaggttgggcgtggggaatgccatgttgtagatacgtactggcaaactgagaccggttctcacgctattgcgcccatggctggtgttactccaaccaaacctggaagtgctacgcttcctttcttcggaattgaacccgctatcattgatccggtaactggtgatgaattacacgggaacggggttgagggagttttggctatcaagaggccatggcccagtatggcgagaacggtctgggcctctcaccagagattcatggagacgtatttgaatgtctacaagggttactatttcaccggcgatggcgcggggagagatcatgaaggatactactggatccgtggtcgagtagacgacgttgtcaacgttagcggtcacaggttgtcaaccgcagagatcgaggccgccctcattcatcatgaggctgttgccgaggctgctgtagtcggtattgccgatgagttgactggccagactgtcaacgccttcgtctcgctaaaggacagcttcgagaactcttctgagatgaggaagagtttgacccttcaagtccggaaatccattggaccgttcgcagcccccaaggcggtgcacgtggtcaatgaccttcctaagactagatcgggaaagattatgagacgcgtcctccgaaagatcctatccggcgaagaggatcagttgggtgatacctcgaccttgtcggacccttctgtcgttggtaccatacttgagacactgcacgagactggaaacaagtag

SEQ ID NO: 151201 - protein, 606 aa, Tuber melanosporum Mel28
MSEAEVSVVSEAHNVETYQVPRKYYEKHPAKPHLTLEEYKAQYRESIENPDKFWGEKARELLHWDIPFQTVRNGSFQHGDISWFLEGRLNACYNCVDRHAFKDPERPAIIYEADEPSEGRVITYSELLREVCKLAFVLRQMGVRKGDTVAIYMPMIPEALVAFLAIVRIGAVHSVVFAGFSAESLRDRVLDARSKVVITTDEGKRGGKVIGTKRIVDDALKQCPEVKNVLVYRRTGSEVPWTQGRDYWWHEEVNKYPGYCPPTLMDSEDPLFLLYTSGSTGKPKGGTPAYPDFSRYWDIIEKHGITQFYVAPTALRLLKKAGDHHINKQMKTLRVLGSVGEPIAEDVWKWYHEKVGRGECHVVDTYWQTETGSHAIAPMAGVTPTKPGSATLPFFGIEPAIIDPVTGDELHGNGVEGVLAIKRPWPSMARTVWASHQRFMETYLNVYKGYYFTGDGAGRDHEGYYWIRGRVDDVVNVSGHRLSTAEIEAALIHHEAVAEAAVVGIADELTGQTVNAFVSLKDSFENSSEMRKSLTLQVRKSIGPFAAPKAVHVVNDLPKTRSGKIMRRVLRKILSGEEDQLGDTSTLSDPSVVGTILETLHETGNK

SEQ ID NO: 151202 - DNA, 2004 bp, Arthroderma otae CBS 113480
  CDS (1)..(2004)
atggcagagactgaaactgctaaaaccccggtggttgtggaagcccaccaggttgatactttccatgtcccggaggagtaccacaagcattcgaccaggccgcacctcaaggactttgaagaatacaagactctctatgcagagtccatctctagctcggataccttctgggcacggctggcgcgagagcttctgacctttgagaaggacttcaccacaacgcatattggctcgttcgagggtggtgacaatgcctggtttgtcggtggaaggctgaatgcttcttacaactgcgtcgaccgtcatgcgctaaagaatccagacaaggttgccatcatctatgaggctgatgagcccggcgagggccgcagcatcacctatggcgagcttctaagacaggtctccagctttgcatggactctgagacagcgaggagtgaagaagggtgatacggtggctatctatcttcccatgattccagaggcagtggttgctttcctggcctgttctcgcatcggcgccgtccattcagttgtatttgctggcttctcgtcagactcactccgtgaccgtatcaatgatgccaactccaaggttgtcattactgcggacgagggaaagcgaggtggaaaagtgatcggaaccaagaagattgttgacgaagccttgaaacagtgcccaggagtgtctagttgtatcgtgttcaagaggacgggagcgcaggttccatggacagaaggccgtgatctctggtggcacgaggaagtcgagaaataccccaactacctcgctcctgagcccatggactcagaggaccctcttttcctgctgtacacttctggttcgacaggaaagccaaaggggttgatgcatacaactgccggttacctggttggcgctgctgcaactggtaaatacgtttttgatatccatgacgacgatcgcttcttctgtggtggtgatgtcggttggattactggacatacttatgttgtctatgctcctctgctgctcggcgctacaactgttgtcttcgaaagtacccctgcttaccccaacttttcgcgatactgggacgtcatcgagaaaaataaagtcacacagttctatgttgcgcctaccgccttgcgcctcttgaagcgtgctggtgacgaacacatccatcatgagatgaaagacctccgagtgttgggaagtgtgggtgagcctatcgcagctgagatttggaagtggtactttgaagctgtgggaaaggaaaggtcccatgtcgtcgacacctactggcaaactgagacaggctcccatgtcatcaccccgctgggtgggatcacccctaccaagccagggagtgcatccttgccattctttggcattgagcctgccattgttgacccagtttcaggaaaggaactgacgggtaacgatgtggagggcgtgctggcgttcaaacagccatggccaagcatggcgcgcacagtatggggtgctcataagagatatatggatacctacttcaacgtctatccaggattctatttcactggagacggcgcaggccgagatcacgatggatactattggatcagaggcagagtagacgacgtcgtaaacgtctctggtcatcgtctctcgaccgctgaaatagaggctgcccttatcgaacatcattctgtcgccgaggctgccgtcgttggagtgaccgatgagctcaccggccaggcagtcaatgccttcgtcgccctcaagacaggtaatgaaattggcgaagagatccgcaaggagctggtattgcaggtccgcaagtctattgggccatttgcggctcccaaggctgtctatgtcgttgaagacctacccaagactcgcagtgggaagatcatgcgccgtattctcaggaagatcctgagcggcgaggccgacagtctgggcgatatctctacgctctccgacccaactgtggtgcctaaaatcatcgagatgtatgaggctacgaagaagaattga

SEQ ID NO: 151203 - protein, 667 aa, Arthroderma otae CBS 113480
MAETETAKTPVVVEAHQVDTFHVPEEYHKHSTRPHLKDFEEYKTLYAESISSSDTFWARLARELLTFEKDFTTTHIGSFEGGDNAWFVGGRLNASYNCVDRHALKNPDKVAIIYEADEPGEGRSITYGELLRQVSSFAWTLRQRGVKKGDTVAIYLPMIPEAVVAFLACSRIGAVHSVVFAGFSSDSLRDRINDANSKVVITADEGKRGGKVIGTKKIVDEALKQCPGVSSCIVFKRTGAQVPWTEGRDLWWHEEVEKYPNYLAPEPMDSEDPLFLLYTSGSTGKPKGLMHTTAGYLVGAAATGKYVFDIHDDDRFFCGGDVGWITGHTYVVYAPLLLGATTVVFESTPAYPNFSRYWDVIEKNKVTQFYVAPTALRLLKRAGDEHIHHEMKDLRVLGSVGEPIAAEIWKWYFEAVGKERSHVVDTYWQTETGSHVITPLGGITPTKPGSASLPFFGIEPAIVDPVSGKELTGNDVEGVLAFKQPWPSMARTVWGAHKRYMDTYFNVYPGFYFTGDGAGRDHDGYYWIRGRVDDVVNVSGHRLSTAEIEAALIEHHSVAEAAVVGVTDELTGQAVNAFVALKTGNEIGEEIRKELVLQVRKSIGPFAAPKAVYVVEDLPKTRSGKIMRRILRKILSGEADSLGDISTLSDPTVVPKIIEMYEATKKN

SEQ ID NO: 151204 - DNA, 2232 bp, Arabidopsis lyrata subsp. lyrata
  CDS (1)..(2232)
atgaaaatagcttctccttcttctccgattctcaccgttgtctccagctcaggctcattggatccgaaaattagtggatcacttggatctcgaatccttccggctactcaaagatcatccccatcggacaatcttctcctccataggacaatgtcatctaattacctgaggcatgtggagtccatgtcccagctaccctcaggtaccggaaagatctctcaattaaacgccgttgttttaggagaatcccttgcatcggaggagaatgatctcatctttcccagcaaggaattctccggccaggctcttgtttcctcccctcaacagtacatggaaatgcataagaggtcgatggatgaccctgctggtttttggtctgatattgcgtctgagttttactggaagcagaaatggggtgaccaagtgttttccgaaaatctcgatgtcaggaagggtcctattagcattgagtggtttaaagggggaatcaccaatatttgctacaactgtttggacaaaaacgttgaagctgggttgggtgataaaacagccatatactgggaaggaaatgaacttggggtagatgcttccttaacttattctgagttgctccaacaagtttgccagcttgctaattacttaaaagataatggcgtgaagaagggggatgccgttgtaatttatttacctatgttgatggaacttcccatcgctatgcttgcatgtgcacggatcggagctgttcattcggtcgtttttgcgggattttctgctgactctcttgcccaaagaatcattgattgcaagccaaaagtgatactgacttgcaatgctgttaaaagaggccctaagaccataaaccttaaagctattgttgatgctgcacttgaccaatcttctaaagatggagtctctgtaggcatatgcttgacctatgacaactcattagcgacaacaagggaaaacacaaaatggcagaatggaagagatgtgtggtggcaggatgtcatttctcaatatccaacatcgtgtgaggtggaatgggttgatgcggaagatcccctgtttttgctctacacaagtggaagtaccgggaagccaaagggtgtcctacacacaactggagggtatatgatctacactgctacaacattcaagtatgcatttgattacaaatcaacagatgtatactggtgtacagcagactgtggttggataactggccatagctatgttacttatggaccaatgctaaatggagccactgttgttgtctttgaaggggctccaaactaccctgattctggacgctgttgggatattgttgacaaatacaaagtttccatattttatactgccccaacattggtgaggtctctcatgcgtgatgacgataagtatgtaacacgtcactctcgcaaatcgctacgggtccttggaagtgtgggagagcccatcaatcctagtgcctggagatggttcttcaatgtagtcggtgactcaaggtgtcccatttcagatacgtggtggcaaactgaaactggtggcttcatgataaccccattgccaggtgcttggccacagaagcctggttcagctactttccctttctttggtgttcagcctgtcatagttgatgaaaaaggcattgaaatcgaaggcgagtgtagtggttatctttgtgtcaaaggttcatggcctggggcgtttcgaactctgtttggggatcatgaaagatatgaaaccacatactttaaaccttttgccggatattatttcagtggtgatggttgcagaagagacaaggatggttactactggcttacagggagggttgatgatgttatcaacgtcagtggccatcgaatcggaactgctgaagtggaatctgctctggttttacatcctcaatgtgcagaagcagctgttgtaggcatagaacatgaggtaaaaggtcagggaatttatgcgtttgtcactcttctggaaggtgttccttacagcgaggagcttcggaaaagcctagtactaatggtccgaaatcagattggggcttttgcagcaccggacagaatacattgggcaccagggttgccaaagacgagaagcggaaagataatgaggagaatcttgagaaagattgcttcaaggcaattagaagaactcggagatattagcacactcgcggatcctagtgtagttgatcagcttattgcacttgccgatgtgtga

SEQ ID NO: 151205 - protein, 743 aa, Arabidopsis lyrata subsp. lyrata
MKIASPSSPILTVVSSSGSLDPKISGSLGSRILPATQRSSPSDNLLLHRTMSSNYLRHVESMSQLPSGTGKISQLNAVVLGESLASEENDLIFPSKEFSGQALVSSPQQYMEMHKRSMDDPAGFWSDIASEFYWKQKWGDQVFSENLDVRKGPISIEWFKGGITNICYNCLDKNVEAGLGDKTAIYWEGNELGVDASLTYSELLQQVCQLANYLKDNGVKKGDAVVIYLPMLMELPIAMLACARIGAVHSVVFAGFSADSLAQRIIDCKPKVILTCNAVKRGPKTINLKAIVDAALDQSSKDGVSVGICLTYDNSLATTRENTKWQNGRDVWWQDVISQYPTSCEVEWVDAEDPLFLLYTSGSTGKPKGVLHTTGGYMIYTATTFKYAFDYKSTDVYWCTADCGWITGHSYVTYGPMLNGATVVVFEGAPNYPDSGRCWDIVDKYKVSIFYTAPTLVRSLMRDDDKYVTRHSRKSLRVLGSVGEPINPSAWRWFFNVVGDSRCPISDTWWQTETGGFMITPLPGAWPQKPGSATFPFFGVQPVIVDEKGIEIEGECSGYLCVKGSWPGAFRTLFGDHERYETTYFKPFAGYYFSGDGCRRDKDGYYWLTGRVDDVINVSGHRIGTAEVESALVLHPQCAEAAVVGIEHEVKGQGIYAFVTLLEGVPYSEELRKSLVLMVRNQIGAFAAPDRIHWAPGLPKTRSGKIMRRILRKIASRQLEELGDISTLADPSVVDQLIALADV

SEQ ID NO: 151206 - DNA, 2010 bp, Anopheles gambiae str. PEST; identical to SEQ ID NO: 121970
  CDS (1)..(2010)

SEQ ID NO: 151207 - protein, 669 aa, Anopheles gambiae str. PEST; identical to SEQ ID NO: 121971

SEQ ID NO: 151208 - DNA, 1959 bp, Magnaporthe oryzae 70-15; identical to SEQ ID NO: 126539
  CDS (1)..(1959)

SEQ ID NO: 151209 - protein, 652 aa, Magnaporthe oryzae 70-15; identical to SEQ ID NO: 126540

SEQ ID NO: 151210 - DNA, 1974 bp, Magnaporthe oryzae 70-15; identical to SEQ ID NO: 126541
  CDS (1)..(1974)

SEQ ID NO: 151211 - protein, 657 aa, Magnaporthe oryzae 70-15; identical to SEQ ID NO: 126542

SEQ ID NO: 151212 - DNA, 2052 bp, Gibberella zeae PH-1; identical to SEQ ID NO: 121978
  CDS (1)..(2052)

SEQ ID NO: 151213 - protein, 683 aa, Gibberella zeae PH-1; identical to SEQ ID NO: 121979

SEQ ID NO: 151214 - DNA, 1989 bp, Gibberella zeae PH-1; identical to SEQ ID NO: 28190
  CDS (1)..(1989)

SEQ ID NO: 151215 - protein, 662 aa, Gibberella zeae PH-1; identical to SEQ ID NO: 28191

SEQ ID NO: 151216 - DNA, 2052 bp, Candida glabrata CBS 138; identical to SEQ ID NO: 122142
  CDS (1)..(2052)

SEQ ID NO: 151217 - protein, 683 aa, Candida glabrata CBS 138; identical to SEQ ID NO: 122143

SEQ ID NO: 151218 - DNA, 2115 bp, Candida glabrata CBS 138; identical to SEQ ID NO: 28602
  CDS (1)..(2115)

SEQ ID NO: 151219 - protein, 704 aa, Candida glabrata CBS 138; identical to SEQ ID NO: 28603

SEQ ID NO: 151220 - DNA, 2124 bp, Kluyveromyces lactis NRRL Y-1140; identical to SEQ ID NO: 122138
  CDS (1)..(2124)

SEQ ID NO: 151221 - protein, 707 aa, Kluyveromyces lactis NRRL Y-1140; identical to SEQ ID NO: 122139

SEQ ID NO: 151222 - DNA, 2055 bp, Kluyveromyces lactis NRRL Y-1140; identical to SEQ ID NO: 28608
  CDS (1)..(2055)

SEQ ID NO: 151223 - protein, 684 aa, Kluyveromyces lactis NRRL Y-1140; identical to SEQ ID NO: 28609

SEQ ID NO: 151224 - DNA, 2040 bp, Debaryomyces hansenii CBS767; identical to SEQ ID NO: 28606
  CDS (1)..(2040): transl_table=12

SEQ ID NO: 151225 - protein, 679 aa, Debaryomyces hansenii CBS767; identical to SEQ ID NO: 28607

SEQ ID NO: 151226 - DNA, 2016 bp, Debaryomyces hansenii CBS767; identical to SEQ ID NO: 122136
  CDS (1)..(2016): transl_table=12

SEQ ID NO: 151227 - protein, 671 aa, Debaryomyces hansenii CBS767; identical to SEQ ID NO: 122137

SEQ ID NO: 151228 - DNA, 1974 bp, Yarrowia lipolytica CLIB122; identical to SEQ ID NO: 121986
  CDS (1)..(1974)

SEQ ID NO: 151229 - protein, 657 aa, Yarrowia lipolytica CLIB122; identical to SEQ ID NO: 121987

SEQ ID NO: 151230 - DNA, 2013 bp, Aspergillus nidulans FGSC A4; identical to SEQ ID NO: 28616
  CDS (1)..(2013)

SEQ ID NO: 151231 - protein, 670 aa, Aspergillus nidulans FGSC A4; identical to SEQ ID NO: 28617

SEQ ID NO: 151232 - DNA, 2016 bp, Candida albicans SC5314; identical to SEQ ID NO: 28222
  CDS (1)..(2016): transl_table=12

SEQ ID NO: 151233 - protein, 671 aa, Candida albicans SC5314; identical to SEQ ID NO: 28223

SEQ ID NO: 151234 - DNA, 2028 bp, Candida albicans SC5314; identical to SEQ ID NO: 28224
  CDS (1)..(2028): transl_table=12

SEQ ID NO: 151235 - protein, 675 aa, Candida albicans SC5314; identical to SEQ ID NO: 28225

SEQ ID NO: 151236 - DNA, 2013 bp, Aspergillus fumigatus Af293
  CDS (1)..(2013)
atgtctgacggcgacgttaagcccgcaaagccggccgtggtgctcgaggccaacgatgtcgacactttccacgtccccaaagctttctatgagaagcacccttcgaagactcatctgaaagatttggacgagtataagaaactatacgacgagtctatccgtagccctgacacgttctgggcccgcatggcccgtgagctgctcactttcgacaaagacttccaaaccacgcacatcgggtcgctcgagaatggagacaatgcctggttcgtcgaaggtcgcttgaatgcctcgttcaactgcgtggatcgtcatgccatcaagaaccctaataaggtcgcgatcatctacgaggccgatgagcctaatgagggccgcatcattacctacggcgagctcctccgcgaagtctcccgcgttgcctgggtcctgaagcagcggggtgtcaagaagggtgacactgtcgcgatctaccttcccatgattcctgaagccgttgtggcttttctcgcctgtgcccgtatcggtgccattcactccgttgtcttcgctggtttctcctcggactccctgcgtgaccgtgtccttgatgctggatccaaggtcgttatcaccacggacgagggtaagcgtggtggcaaggtgattggcaccaagcgcattgtcgatgaggccctcaagcagtgccccgatgtgaccagtgtgctggtctacaagcgcactggtgccgaagtcccttggaccaatgggcgtgacatttggtggcatgaggaggtcgagaagtacccctgctatgtcgctcctgagtcgatgagctccgaggaccccctcttcctcctctacacctctggttcgactggtaagcccaagggtgttatgcacactactgccggctacctccttggtgccgcgatgaccggcaagtacgtctttgacattcatgacgacgatcgcttcttctgcggtggtgacgttggctggatcaccggacacacctacgtcgtctatgcgcctcttcttcttggttgctctaccgtcgttttcgaaagcactcccgcctaccccaacttctcccgctactgggatgtcattgagaagcacaaggtcacccagttctatgtcgcccccacagctctgcgtctgctgaagcgtgccggtgatgagcacatccaccacaagatggagcacctgcgtatcctgggctccgtcggtgaaccaattgccgctgaggtctggaagtggtactttgagaaggtcggaaaggaggaagctcacatttgcgacacctactggcaaactgagaccggctcgcacgtcatcagtcccctcggtggaattacttccaccaagccaggcagtgcatccttgcccttcttcggcattgaacccgctatcatcgaccccgtctccggcgaggagatctctggcaacgatgtcgagggtgttcttgctttcaagcagccttggcctagcatggcccggaccgtgtggggtgcccacaagcgctatatggacacatacctgaacgtctacaagggctactacttcactggagatggcgctggccgtgaccacgacggatattactggattcgcggtcgtgtcgacgacgtggtcaatgtctctggacaccgtttgtctactgctgagatcgaggccgctcttattgagcaccaccaggttgccgaagcggctgtcgtcggtattgccgatgaactcactggccaagctgtcaacgccttcgtttctctcaaggacggcaacgagaccaccgaacaagtccgcaaggatcttgtgatgcaagttcgcaagtcaatcggtccatttgccgcacccaaggcggttttcgtcgtagaagaccttcccaagacccgcagtggcaagattatgcgccgtatcctacggaagattctgagcggtgaagaagatagcttgggtgatacctcaaccttgtcggatccttccgtggtcaacaagatcattgagactgttcatgctgcccgagccaagtag

SEQ ID NO: 151237 - protein, 670 aa, Aspergillus fumigatus Af293
MSDGDVKPAKPAVVLEANDVDTFHVPKAFYEKHPSKTHLKDLDEYKKLYDESIRSPDTFWARMARELLTFDKDFQTTHIGSLENGDNAWFVEGRLNASFNCVDRHAIKNPNKVAIIYEADEPNEGRIITYGELLREVSRVAWVLKQRGVKKGDTVAIYLPMIPEAVVAFLACARIGAIHSVVFAGFSSDSLRDRVLDAGSKVVITTDEGKRGGKVIGTKRIVDEALKQCPDVTSVLVYKRTGAEVPWTNGRDIWWHEEVEKYPCYVAPESMSSEDPLFLLYTSGSTGKPKGVMHTTAGYLLGAAMTGKYVFDIHDDDRFFCGGDVGWITGHTYVVYAPLLLGCSTVVFESTPAYPNFSRYWDVIEKHKVTQFYVAPTALRLLKRAGDEHIHHKMEHLRILGSVGEPIAAEVWKWYFEKVGKEEAHICDTYWQTETGSHVISPLGGITSTKPGSASLPFFGIEPAIIDPVSGEEISGNDVEGVLAFKQPWPSMARTVWGAHKRYMDTYLNVYKGYYFTGDGAGRDHDGYYWIRGRVDDVVNVSGHRLSTAEIEAALIEHHQVAEAAVVGIADELTGQAVNAFVSLKDGNETTEQVRKDLVMQVRKSIGPFAAPKAVFVVEDLPKTRSGKIMRRILRKILSGEEDSLGDTSTLSDPSVVNKIIETVHAARAK

SEQ ID NO: 151238 - DNA, 1995 bp, Ustilago maydis 521; identical to SEQ ID NO: 28230
  CDS (1)..(1995)

SEQ ID NO: 151239 - protein, 664 aa, Ustilago maydis 521; identical to SEQ ID NO: 28231

SEQ ID NO: 151240 - DNA, 2043 bp, Cryptococcus neoformans var. neoformans B-3501A; identical to SEQ ID NO: 28238
  CDS (1)..(2043)

SEQ ID NO: 151241 - protein, 680 aa, Cryptococcus neoformans var. neoformans B-3501A; identical to SEQ ID NO: 28239

SEQ ID NO: 151242 - DNA, 2004 bp, Neurospora crassa OR74A; identical to SEQ ID NO: 28618
  CDS (1)..(2004)

SEQ ID NO: 151243 - protein, 667 aa, Neurospora crassa OR74A; identical to SEQ ID NO: 28619

SEQ ID NO: 151244 - DNA, 1938 bp, Halorhodospira halophila SL1
  CDS (1)..(1938): transl_table=11
atgtcggagaccaaggtgtatcccgtccccgagacgatccagcgggacgctcatctgaacttcgagcagtaccaggagatgtacaaccgctcgatccaggatcccgaggggttctggtcggagcaggccgacaagttcctggactggttcagcaagtggggcaccacttgccactgggatctggccaagggcgacatccgcttcttcgagggcgggacgctgaacgtggcctacaactgcgtggatcgccacctggagacccggggtgatcagaccgccatcatctgggagggcgacgaaccggaccaggatgagcacatcacctaccgcgacctgtacgagcgcgtcggtcgcctggccaacgccctcaaggcccgcggcgtcaagaagggcgatcgcgtctgcatctacctgccgatggtgcccgaggcggcggtggccatgctcgcctgcgcccgcatcggtgccgttcactccatcgtgttcggcggcttctcgccggaggcgctgcgcgaccggatccaggacgccgacgccgaggtggtgatcacctccgacgagggcgtccgtggcggtcgcagcattccgctcaaggccaacaccgacaaggccctggaggggtgccccaacgtcaagacggtcttcgtggtccgccgcaccggcggcgacatcgcctggaacgacgggcgtgacgtctggttccacgaggcctgtgccgaggcctcgccggactgcccgccggagcacatggacgccgaggacccgctgttcatcctctacacctccggctccaccggcaagccgaagggcgttcagcacagcaccgccggctacctgctcggcaccgccatgacccacaagtacatcttcgactaccaggatggcgaggtgtactggtgcaccgccgacgtgggctgggtcacgggccactcctacatcgtctacggccctctggccaacggcgccaagactctgatgttcgaaggcgtgcccacctaccccgacgccgggcgtttctggcaggtggtggacaagcacgaggtctcgatcttctacaccgcgccgacggccatccgcgcgctgatgggccagggcgacgaccacgtgaagaagacctcgcgcaagagcctgcgcatcctcggcaccgtgggcgagccgatcaaccccgaggcgtgggagtggtactaccacaccattggcgaagaccgctgccccatcgtcgacacctggtggcagaccgagaccggctccatcctcatcgcgccgctgcccggcgccatggacctcaagcccggttccgccaccctgcccttcttcggtgtcgagccgcagctggtcgacgacaagggcaacgtcctggagggcgccaccaacggcaacctggtgatcaaccgcgcctggcccagcatgatgcgcaccatctacggcgaccacgagcgcttcttcaacacctatctggccgcctatccgggcaagtacttcaccggtgacggcgctcgccgtgacgaggacggctactactggatcaccggccgggtcgacgacgtcatcaacgtctcgggtcaccgcatgggcaccgccgaggtcgaaagcgccctggtgctccacgacaaggtgagtgaggccgcggtggtgggctacccccacgacgtcaagggccagggcatctacgcctacgtcaccctgatggccggcgaggagccgagcgacgagctcaagcaggagctggtcaaactctgcatccaggagatcggccccatcgccaagccggacatcatccagttcgcgccggggctgccgaagacccgctcgggcaagatcatgcgccggatcctgcgcaaggtcgcctcgaacgagctcgacagcctgggcgacaccagcacgctggccgacccgacagtggtcgataccctgatcgaggatcgggccaaccagtag

SEQ ID NO: 151245 - protein, 645 aa, Halorhodospira halophila SL1
MSETKVYPVPETIQRDAHLNFEQYQEMYNRSIQDPEGFWSEQADKFLDWFSKWGTTCHWDLAKGDIRFFEGGTLNVAYNCVDRHLETRGDQTAIIWEGDEPDQDEHITYRDLYERVGRLANALKARGVKKGDRVCIYLPMVPEAAVAMLACARIGAVHSIVFGGFSPEALRDRIQDADAEVVITSDEGVRGGRSIPLKANTDKALEGCPNVKTVFVVRRTGGDIAWNDGRDVWFHEACAEASPDCPPEHMDAEDPLFILYTSGSTGKPKGVQHSTAGYLLGTAMTHKYIFDYQDGEVYWCTADVGWVTGHSYIVYGPLANGAKTLMFEGVPTYPDAGRFWQVVDKHEVSIFYTAPTAIRALMGQGDDHVKKTSRKSLRILGTVGEPINPEAWEWYYHTIGEDRCPIVDTWWQTETGSILIAPLPGAMDLKPGSATLPFFGVEPQLVDDKGNVLEGATNGNLVINRAWPSMMRTIYGDHERFFNTYLAAYPGKYFTGDGARRDEDGYYWITGRVDDVINVSGHRMGTAEVESALVLHDKVSEAAVVGYPHDVKGQGIYAYVTLMAGEEPSDELKQELVKLCIQEIGPIAKPDIIQFAPGLPKTRSGKIMRRILRKVASNELDSLGDTSTLADPTVVDTLIEDRANQ

SEQ ID NO: 151246 - DNA, 1947 bp, Aeromonas salmonicida subsp. salmonicida A449
  CDS (1)..(1947): transl_table=11
atgagcgagagcaaggtctacccggtcaaagcccacatcagcaacggcgccctgctggacaaggcaggttacgaggccatgtaccgagcctccgtgcaggatccggatgccttctggggtgaacagggaaaaatcatcgactggatgaagccttataccaaggtaaagaacacctcgtacgacccggggcatgtctccatcaagtggtatgaggatggcctgctcaacgtctcggccaactgcctggatcgccatctggcacagcgcggtgacaaggtggccatcatctgggaaggggacaacccggcagaggatcgcaagctgacctaccgcgagctgcacgccgaggtgtgcaagttttccaacgtattgaaagcacagggtgtgcatcggggtgatgtggtctgcctctacatgcccatggtgccggaagcggccatcgccatgctggcctgtactcgtataggtgccgtgcacagcatcgtcttcggcggcttctcgccggaggccctggccggccgcatcattgactcaggctcctccatcgtcatcacggccgacgaggggctgcgtggcggccgccctgtcccgctcaagaaaaacgtggatgaagcgctcaccaatccggatacccgggtcagcaaggtgatagtgctcaagcgcaccggcggcaacgttgcctggcacaaccacagggacatctggtggcatgaggcaactgccgccgccagcagcgactgcccacccgaggcaatgaacgccgaagatcccctgttcgtcctctacacctccggttccaccggcaagcccaagggagtgttgcacaccaccggcggctatctggtctacgccacccttaccttcaagtacgtgttcgactaccacgaggaggacatctactggtgtaccgccgacgtgggttgggtcacgggccactcctatctggtctacgggccgctcgccaacggcgccaccaccatcatgttcgaaggggtgcccaactacccggccaccaaccgcatgagccaggtggtagacaagcaccaggtcaccatcctctacacggccccgacggcgatccgcgccctcatggccaagggccgtgatgcggtagagggcacttcccgccagagcttgcgcatcatgggttcagtgggcgagcccatcaacccggaagcctgggagtggtactaccgcaccataggcgaggaacgctgccccatcgtcgatacctggtggcagaccgagaccggcggcatcctcatcagcccgctgcccggcgtcaccgatctcaagccaggatcggctacccgtcccttcttcggggtgcagccggcgctggtggacaacatgggcgagccgctggagggtgcaaccgagggcaacctggtgatcaccgactcctggccgggtcagatgcgcaccgtgtttggcgatcatgagcgcttcgagcagacctacttctccaccttcccgggtcgttacttcaccggcgacggcgcccgtcgcgacgaagatggttactactggatcacgggacgggtggatgatgtactcaacgtatccggccatcgcatggggaccgccgaaatagagtcggcgctggtcgcccatcccaagatcgccgaggcggcggtggtgggagtgccccacgagatcaagggtcagggcatctacgcctatgtcaccctgatcgccggggaagagccgagccgcgagctgcataaagaggtgaaagagtgggtgcgcaaggagattggcgcgattgccacgccggatgtgatccactgggcggaggggctgccgaagacccgttccggcaagatcatgcgccgaattttgcgcaagatcgccaccggcgagaccgacagtctgggggatatctccaccctggcggatccgggtgtggtggacaagctcattcgcgagaagtcggaagcggcctga

SEQ ID NO: 151247 - protein, 648 aa, Aeromonas salmonicida subsp. salmonicida A449
MSESKVYPVKAHISNGALLDKAGYEAMYRASVQDPDAFWGEQGKIIDWMKPYTKVKNTSYDPGHVSIKWYEDGLLNVSANCLDRHLAQRGDKVAIIWEGDNPAEDRKLTYRELHAEVCKFSNVLKAQGVHRGDVVCLYMPMVPEAAIAMLACTRIGAVHSIVFGGFSPEALAGRIIDSGSSIVITADEGLRGGRPVPLKKNVDEALTNPDTRVSKVIVLKRTGGNVAWHNHRDIWWHEATAAASSDCPPEAMNAEDPLFVLYTSGSTGKPKGVLHTTGGYLVYATLTFKYVFDYHEEDIYWCTADVGWVTGHSYLVYGPLANGATTIMFEGVPNYPATNRMSQVVDKHQVTILYTAPTAIRALMAKGRDAVEGTSRQSLRIMGSVGEPINPEAWEWYYRTIGEERCPIVDTWWQTETGGILISPLPGVTDLKPGSATRPFFGVQPALVDNMGEPLEGATEGNLVITDSWPGQMRTVFGDHERFEQTYFSTFPGRYFTGDGARRDEDGYYWITGRVDDVLNVSGHRMGTAEIESALVAHPKIAEAAVVGVPHEIKGQGIYAYVTLIAGEEPSRELHKEVKEWVRKEIGAIATPDVIHWAEGLPKTRSGKIMRRILRKIATGETDSLGDISTLADPGVVDKLIREKSEAA

SEQ ID NO: 151248 - DNA, 1956 bp, Pseudomonas stutzeri A1501
  CDS (1)..(1956): transl_table=11
atgtgtgctgcgtccgtgtatcccgtgtcccctgaggctgcaaagcactccctgaccgacgaggccgcttatcgggccatgtatcagcagtcggtgatcaaccctgaaggattctggcgtgaacaggcggcacggctggactggattcggcccttcagcgaggtcaagcgcacctccttcgacgaccatcacgtcgatatcaagtggtttgccgacggcacgctgaacgtgtcggccaattgcctggaccggcacctggccgagcgcggcgatcaggtggcgatcatctgggagggggacgacccctcggagcaccgcgagatcacctaccgcgagctctaccaggaggtctgcaagttcgccaacgctctgcgtggccaggatgtgcaccgcggtgacgtggtgaccatctacatgccgatgattcccgaggccgcggtggcaatgctggcctgcgcgcgcatcggtgcgatccactcggtggtgttcggcggcttctcgccggaggcattggccgggcgcatcatcgatggcagctcgaaggtggtgatcactgccgatcagggcatacgtggcggcaagaccatcgccctgaaggagaacgtcgacgaggcgctgacgaacccgcagacccgttgcgtgcagaagatcatcgtggtgcgccgcaccggagcgaacatccgctggtacccgcaccgggacgtctcctacgacgacttgatgcgggttgccggcgaggtctgcgcgccgaaggaaatgggcgccgaggagccgctgttcattctctacacctcgggctccaccgggaaacccaagggcgtgctgcacacctgcggcggctacctgctgtacgccgcgctgacccacgaacgggtcttcgactaccgccctggcgatatctactggtgcaccgccgacatcggctggattaccggtcatagctatctgatctacggcccactggccaacggtgcgacgaccctgatgtacgaaggcgtgccgaactatccggacgtcacccgcatcgccaggatcatcgacaagcaccgggtcaacatcctctacaccgcgccgacggcaatccgcgcgatgatggccgaggggccggcggcgatggagggtgccgacggttcgagcctgcgcctgctcggcacggtgggcgaaccgatcaatccggaagcctggcactggtactacgagacggtcggtcggtcgcgctgcccgatcgtcgatacctggtggcagaccgagaccggcggcatcctcatcagcccgctacccggtgccacggcgctcaagcccggctcggcgacgcggccgctgttcggcgtagtgccggggctggtggacaatcttggcaacctgctggaaggcccggcggagggcaatctggtgattctcgactcctggccagggcagatgcgcaccatttacggtgaccacgaccgtttcgtcgatacctacttcaagaccttccgcggtatgtacttcaccggcgacggcgcgcgccgcgacgaggacggttactactggatcaccgggcgcgtcgacgatgtgctcaacgtctccggacaccgcatgggcaccgccgaaatcgagagcgccctggtggcgcatgccaaggtggccgaagccgcggccgttggcgtgccgcatccgctcaagggccaggccatctatgtttacgtgactctggttgctggtaccgagcccagcgacacgctgcgccaggagctgcagcagtgggtccggcacgagatcggcccgatcgcggtgccggataccattcaatgggcgccggggctgccgaagacacggtccggcaagatcatgcgccgcctgctgcgcaagatcgccacggacgactacgacactctgggcgatacctcgacgctggccgaccctggcgtcgtcgaccagttgatcgctgcccatgaggcggtgaagcagcgctga

SEQ ID NO: 151249 - protein, 651 aa, Pseudomonas stutzeri A1501
MCAASVYPVSPEAAKHSLTDEAAYRAMYQQSVINPEGFWREQAARLDWIRPFSEVKRTSFDDHHVDIKWFADGTLNVSANCLDRHLAERGDQVAIIWEGDDPSEHREITYRELYQEVCKFANALRGQDVHRGDVVTIYMPMIPEAAVAMLACARIGAIHSVVFGGFSPEALAGRIIDGSSKVVITADQGIRGGKTIALKENVDEALTNPQTRCVQKIIVVRRTGANIRWYPHRDVSYDDLMRVAGEVCAPKEMGAEEPLFILYTSGSTGKPKGVLHTCGGYLLYAALTHERVFDYRPGDIYWCTADIGWITGHSYLIYGPLANGATTLMYEGVPNYPDVTRIARIIDKHRVNILYTAPTAIRAMMAEGPAAMEGADGSSLRLLGTVGEPINPEAWHWYYETVGRSRCPIVDTWWQTETGGILISPLPGATALKPGSATRPLFGVVPGLVDNLGNLLEGPAEGNLVILDSWPGQMRTIYGDHDRFVDTYFKTFRGMYFTGDGARRDEDGYYWITGRVDDVLNVSGHRMGTAEIESALVAHAKVAEAAAVGVPHPLKGQAIYVYVTLVAGTEPSDTLRQELQQWVRHEIGPIAVPDTIQWAPGLPKTRSGKIMRRLLRKIATDDYDTLGDTSTLADPGVVDQLIAAHEAVKQR

SEQ ID NO: 151250 - DNA, 1959 bp, Enterobacter sp. 638
  CDS (1)..(1959): transl_table=11
atgagccaaatccacaaacacgacattcccgcaaatattgcggaccattgcctgattaatccggagcagtataaagagaagtatcagcaatccatttctgaccccgacgccttctggggcgagcagggcaaaattcttgactggatgaagccgtatcagaaggtgaaaaacacctcttttgcgccgggcaatatctccattaaatggtatgaagacggcacgctgaatctcgcggccaactgcctggacagacacctcgccgagcgcggcgatcagaccgccattatttgggaaggtgacgacgcgtcccaaagcaaacacatcacctataaagagctacaccgcgacgtgtgccgtttcgccaacgtcctgctggagcaaggcatcaaaaaaggcgatgtggtcgccatttatatgccgatggtgcccgaagctgccgtcgccatgctcgcctgcgcgcgcatcggggcgatccattctgttattttcggcggattctcgccggaagccgtagccggacgcattatcgattccaattcaaaactggtgatcactgcagatgaaggcgtgcgcgctggacgcagtattccgctgaagaaaaacgtcgatgaagcgctgaaaaacccgaacgtcaagagcatcagcaatgtggtggtgttcaagcgtaccggcggtaacgttgagtggaaagagggccgcgacctgtggtggagcgacctgattgaacaagcgagcgaccagcatcagcccgaagaaatgaacgccgaagatccgctgtttatcctgtacacctccggctctaccggcaagccgaaaggcgtgctgcacaccaccggcggctatctggtgtacgcggcctccacctttaaatatgtctttgattatcatcagggcgatatctactggtgtaccgctgacgtgggctgggtcaccggtcacagctatctcctgtacggcccgctggcctgcggcgcaaccaccctgatgtttgaaggcgtgcccaactggccgacgcctgcacgtatgtgccaggtggttgataagcataaagtgaacattctgtataccgcaccgacggcgatccgcgccctgatggcggaaggcgacaaagccatcgacggcactgaccgctcttccctgcgcattctcggctccgtgggcgagcctatcaacccggaagcgtgggagtggtactggaagaaaataggtaacgaaaaatgcccggtgatcgacacctggtggcagaccgaaacgggcggctttatgatcaccccaatgcctggcgcaacccagctgaaagccggttcggcgacccatccgttcttcggcgtgcagcctgcgctggtggataacgaaggcaatccgctggaaggggcaactgaaggcaacctggtaattaccgattcgtggccgggtcaggcgcgtacgctgtttggcgatcacgatcgctttgagcagacctatttctcgaccttcaaaaacatgtatttcagcggtgacggcgcgcgtcgtgacgaagacggctatttctggattaccgggcgcgtggatgacgtactgaacgtctccggccaccgtctggggacggctgaaattgagtctgcgctggtctcgcatccaaaaattgccgaagcggctgtggtggggatcccgcacaacatcaaaggccaggcgatttatgcttacgtcacgctgaatcacggcgaagaaccgacgccggaactgtacaccgaagtgcgcaactgggtgcgaaaagagattggtccgcttgccacacccgacgtgctgcactggaccgactccctgccgaaaacccgttccggcaaaatcatgcgccgaattctgcgcaaaatcgcggcgggtgacaccagcaatctgggtgatacctccacactcgccgatccaggcgtagtggaaaaactgcttgaagagaagcaggccatcgcgatgccttcgtga

SEQ ID NO: 151251 - protein, 652 aa, Enterobacter sp. 638
MSQIHKHDIPANIADHCLINPEQYKEKYQQSISDPDAFWGEQGKILDWMKPYQKVKNTSFAPGNISIKWYEDGTLNLAANCLDRHLAERGDQTAIIWEGDDASQSKHITYKELHRDVCRFANVLLEQGIKKGDVVAIYMPMVPEAAVAMLACARIGAIHSVIFGGFSPEAVAGRIIDSNSKLVITADEGVRAGRSIPLKKNVDEALKNPNVKSISNVVVFKRTGGNVEWKEGRDLWWSDLIEQASDQHQPEEMNAEDPLFILYTSGSTGKPKGVLHTTGGYLVYAASTFKYVFDYHQGDIYWCTADVGWVTGHSYLLYGPLACGATTLMFEGVPNWPTPARMCQVVDKHKVNILYTAPTAIRALMAEGDKAIDGTDRSSLRILGSVGEPINPEAWEWYWKKIGNEKCPVIDTWWQTETGGFMITPMPGATQLKAGSATHPFFGVQPALVDNEGNPLEGATEGNLVITDSWPGQARTLFGDHDRFEQTYFSTFKNMYFSGDGARRDEDGYFWITGRVDDVLNVSGHRLGTAEIESALVSHPKIAEAAVVGIPHNIKGQAIYAYVTLNHGEEPTPELYTEVRNWVRKEIGPLATPDVLHWTDSLPKTRSGKIMRRILRKIAAGDTSNLGDTSTLADPGVVEKLLEEKQAIAMPS

SEQ ID NO: 151252 - DNA, 1953 bp, Shewanella putrefaciens CN-32
  CDS (1)..(1953): transl_table=11
atgagctcgcagtctctctacaaagtctccggcaatatcgctgccaatgcacttgtaaataacgaacaatataaaacaatgtaccaagagtcgattgtcaacccagagggtttctggagagagcacggcaaacgcattgactggataaaaccctatacaaagatcaaaaaaacctcttttgacgatcataatttgtcgattaactggttttacgatggcaccctaaacgcatcagctaactgccttgaccgccaccttagcgaacacagtgatcgcgtggcgattatttgggaaggcgacaacgccagcgaacaacgcaaaatcacctacggtgaattacatgcagatgtgtgtaagtttgccaacgcactgcgtagtcaaggcgtgcgccgtggtgacatagtcaccatttacatgccaatggtgccagaagccgccgttgctatgcttgcttgcgcacgcattggcgcggttcattcagtcgtatttggtggcttctcacctgactctatcgcctcccgtgtgatcgatggcaaatcaaaagtggtgatcacctctgatgaggggatgcgcggtggccgagccattccgctaaagcgtaatatcgatgacgcgctcaatcatcccgatgtcactagcgtagaaaaagtcattgtacttaaacgtacaggtggcaaaatcgactgggttgaaggccgtgatgtttggtggcacagcttacttgaaaccgcatcggagcactgccagccagaagaaatgggcgccgaagacccactgtttttactctatacctcaggctctaccggtaatcctaaaggtgttttacataccactggtggttacatggtttatgcgtcgatgacccatgaatatgtctttgattataaagcaggagaagtgtactggtgtacggctgatgtaggttggatcacgggccactcatatatggtttacggtccactcgccaatggtgccactgtacttatccatgaaggcgtgcccaatcatccaagccccgctcgacttggtgagatgattgaccgtcataaggtcaatatcctttacaccgcaccgacgttgatccgtgcattaatggccgaaggcaaacagcattttgatcaattcgatggaagtacactgcggatcatgggctcagttggcgaacctatcaatccagaagcatggcgttggtatcacgaagtcattggtcacgagcattgtccgattgtcgatacttggtggcaaaccgagactggcggtattttaataacgccactgccgggtgcgacggacacaaaaccgggatcagccacccgtccattctttggcgtacaacccgccctagtagacaatatgggtaacattttagagggtgagaatgaaggtaacttagttttactcgattcttggccaggccaaatgcggactgtgtatggcgatcacgaacgattcgtgctgacctactttaaaaccttccgcggcatgtattttaccggtgatggtgcccgtcgcgatgaagacggttactactggatcacggggcgtgtcgatgacgtcattaacgtctctggacaccgtttaggtaccgctgaagtggaaagtgcattggtatcccatgaactggttgctgaagccgctgttgtgggctatccacacgatattaaaggccaaggtatctatgcctacgtcacgctaacccgtggaacagaagaaagtgaagagctacgccaggaactgcgccaatgggtgcgtaaagagattggtgcattagcaactccagacctcatccaatgggcaagtggattacctaaaacccgttcaggcaaaattatgcgccgcttcctacgtaagattgctgctaacgaagtcaccaacttaggtgatgcatcaaccttagccgatccagcggttatcgaaaccttgattgaaacccgtttaaatcgtacagaataa

SEQ ID NO: 151253 - protein, 650 aa, Shewanella putrefaciens CN-32
MSSQSLYKVSGNIAANALVNNEQYKTMYQESIVNPEGFWREHGKRIDWIKPYTKIKKTSFDDHNLSINWFYDGTLNASANCLDRHLSEHSDRVAIIWEGDNASEQRKITYGELHADVCKFANALRSQGVRRGDIVTIYMPMVPEAAVAMLACARIGAVHSVVFGGFSPDSIASRVIDGKSKVVITSDEGMRGGRAIPLKRNIDDALNHPDVTSVEKVIVLKRTGGKIDWVEGRDVWWHSLLETASEHCQPEEMGAEDPLFLLYTSGSTGNPKGVLHTTGGYMVYASMTHEYVFDYKAGEVYWCTADVGWITGHSYMVYGPLANGATVLIHEGVPNHPSPARLGEMIDRHKVNILYTAPTLIRALMAEGKQHFDQFDGSTLRIMGSVGEPINPEAWRWYHEVIGHEHCPIVDTWWQTETGGILITPLPGATDTKPGSATRPFFGVQPALVDNMGNILEGENEGNLVLLDSWPGQMRTVYGDHERFVLTYFKTFRGMYFTGDGARRDEDGYYWITGRVDDVINVSGHRLGTAEVESALVSHELVAEAAVVGYPHDIKGQGIYAYVTLTRGTEESEELRQELRQWVRKEIGALATPDLIQWASGLPKTRSGKIMRRFLRKIAANEVTNLGDASTLADPAVIETLIETRLNRTE

SEQ ID NO: 151254 - DNA, 1962 bp, Pseudomonas mendocina ymp
  CDS (1)..(1962): transl_table=11
atgagtgctgcgtctatctatcccgtgagcccggaagcggccgccaggaccctgaccgatgaggccacctacaaggccatgtatcagcagtcggtcgtcaacccggaaggattctggcgcgagcaaggcaagcgcatcgactggatcaagccctacaccaaggtcaagcagacttccttcgacgatcaccacgtcgacatcaagtggtttgccgatggcaccctgaacgtctcctacaactgcctggaccgtcatctggaagagcgcggcgatcagatcgcgatcatctgggaaggtgacgaccccgccgagcacaaggagatcacctaccgcgagctgcacgagcaggtgtgcaagttcgccaacgccctgcgcggccaggacattcaccgcggcgacgtggtgaccatctacatgccgatgatccccgaggccgtggtggccatgctggcctgcgcccgtatcggcgccattcactcggtggtgttcggcggcttctctccggaagcgttggcgggccgtatcatcgactgccagtccaaggtggtgatcaccgccgacgaaggcgtgcgtggcggcaagaaggtggccttgaaggccaacgtcgacgacgcgctgaccaacccggaaacccacagcgtgcagaaggtcatcgtggtccagcgcaccgggtccgagatcaagtggaaccagcatcgcgacatctggtacgaagacctgatgaaggtggccggcagcgtctgcgcgccgaaggaaatgggcgccgaggaagcgctgttcatcctctacacctccggttccaccggcaagcccaagggcgtgctgcacaccaccggcggctacctggtatacgcctcgctgacccatgagcgggtgttcgactaccgtccgggcgaggtcttctggtgcaccgccgacatcggctgggtcaccggtcacagctacctggtctacggcccgctggccaacggtgccaccaccgtgatgttcgagggcgtgccgaactacccggacgtgacccgcgtcgccaagatcgtcgacaagcacaaggtcaacatcctctacaccgcaccgaccgccattcgcgccatgatggccgagggcaaggctgcagtagccggtgccgatggctccagcctgcgcctgctgggttcggtcggcgagccgatcaacccggaagcctggcagtggtactacgagaacgtcggccagagccgttgcccgatcgtcgacacctggtggcagaccgaaaccggcgcctgcctgatgaccccgctgccgggcgcgcacgccatgaagccgggctccgccgcgcgtccgttcttcggcgtgcagccggcactggtggacaacctgggcaacatcatcgaagggccggccgaaggcaacctggtgatcatcgattcctggccgggtcaggcgcgcaccctgttcggcgaccacgaccgcttcgtcgacacctacttcaagaccttcaagggcatgtacttcaccggtgacggcgcgcgccgcgacgaagacggctactggtggatcaccggtcgcgtcgacgacgtgctcaacgtttccggccaccgtatgggcaccgccgagatcgagagcgccatggtcgcccacccgaaagtggccgaggccgcggtggtcggcgtgccgcacgacatcaaggggcagggcatctacgtctacgtgaccctgaacgcgggcgaggaatcctccgagcaactgcgtcaggaactgaggaactgggtgcgcaaggaaatcggtccgatcgccacaccggacgtgatccagtgggcgccgggcctgccgaagacccgctcgggcaagatcatgcgccgcatcctgcgcaagatcgccaccgccgaatacgaggcactcggcgacatctccacgctggccgatcctggcgtggtgcagcacctcatcgatacgcatcgtcagatgcaagccgcctgcgcctga

SEQ ID NO: 151255 - protein, 653 aa, Pseudomonas mendocina ymp
MSAASIYPVSPEAAARTLTDEATYKAMYQQSVVNPEGFWREQGKRIDWIKPYTKVKQTSFDDHHVDIKWFADGTLNVSYNCLDRHLEERGDQIAIIWEGDDPAEHKEITYRELHEQVCKFANALRGQDIHRGDVVTIYMPMIPEAVVAMLACARIGAIHSVVFGGFSPEALAGRIIDCQSKVVITADEGVRGGKKVALKANVDDALTNPETHSVQKVIVVQRTGSEIKWNQHRDIWYEDLMKVAGSVCAPKEMGAEEALFILYTSGSTGKPKGVLHTTGGYLVYASLTHERVFDYRPGEVFWCTADIGWVTGHSYLVYGPLANGATTVMFEGVPNYPDVTRVAKIVDKHKVNILYTAPTAIRAMMAEGKAAVAGADGSSLRLLGSVGEPINPEAWQWYYENVGQSRCPIVDTWWQTETGACLMTPLPGAHAMKPGSAARPFFGVQPALVDNLGNIIEGPAEGNLVIIDSWPGQARTLFGDHDRFVDTYFKTFKGMYFTGDGARRDEDGYWWITGRVDDVLNVSGHRMGTAEIESAMVAHPKVAEAAVVGVPHDIKGQGIYVYVTLNAGEESSEQLRQELRNWVRKEIGPIATPDVIQWAPGLPKTRSGKIMRRILRKIATAEYEALGDISTLADPGVVQHLIDTHRQMQAACA

SEQ ID NO: 151256 - DNA, 1938 bp, Pseudomonas mendocina ymp
  CDS (1)..(1938): transl_table=11
atgttcgagatcacccgtcaccccgtggccgacgcggtgcgccagcgtgcacacctggataacgacgcctatctgcgcctgtaccagcagtccgtcgagcaacccgataccttctgggccgaacaggccaaggcctttctcacctggttcaagccctgggatcaggtccacagcagcgacctgaagcagggccgcgccgagtggttcaagggaggccagctcaacgtcgcctacaactgcatcgaccgccatctgcaacagcgcggcgagcaggtcgccatcatctgggaaggcgacaacccggccgagtcggcgcacatcacctacaacaagctgcaccacaacgtcagccgcctggccaacgtgctcaagcgccgcggcgtgaagaagggcgaccgggtatgcatctacatgccgatggtgccggaggcggcttacgccatgctcgcctgcgcgcgcatcggcgcggtgcattcggtggtgttcggcggcttctccccggatgccctgcgcgatcgcattctcgatgccgactgccgcaccgtgatcaccgccgacgagggtgtgcggggcggcaagtacatcccattgaagaacaacgtcgacaaagccctgcagagctgcccgaacgtctccaccgtggtggtggtcgagcgcacccagggcgacgtggcctgggtggaaggccgtgacctctggtatcaccaggcgctcaaggaggtcgatgccgactgcccggccgagccgatggatgccgaagacccgctgttcatcctctacacctcgggctccaccggcaaacccaagggcgtgctgcacaccaccggcggctacctgctcggcgctgccatgacccacaagtacgtgttcgactaccacgagggcgacgtctactggtgcaccgccgatgtcggctgggtcaccgggcacagctacatcgtctacggcccgctggccaacgccgccaccaccctgatgttcgaaggcgtacccaactacccggacgcctcgcgcttctggcaggtgatcgacaagcaccaggtcaacaccttctacaccgctcccactgccctgcgtgcactgatgcgcgaaggcgaggcgccggtcaaagccacctcgcgttcgagcctgcgtctgctcggcacggtgggcgagccgatcaaccccgaagcctgggaatggtatttccatgtggtcggtgacatgcgctgccccatcgtcgacacctggtggcagaccgagaccggctcgatcctgatcaccccgctgccaggcgccaccgacctcaaacccggctcggcgacccgccccttctttggcgtacagccggtgctgctcgacgagcagggcaaggagatcgaaggcccaggcgccggcgtgctggcgatcaaggccagctggccgagccagatccgcagcgtctatggcgatcaccagcgcatggtcgatacctacttcaagccctaccccggttactacttcaccggcgacggcgcgcgccgcgacgaggacggctactactggatcaccggccgtgtcgatgacgtgatcaacgtctcggggcaccgcatcggcaccgccgaggtggagagcgccctggtgctacacgacgcggtggccgaggcggcggtggtcggctacccgcatgacgtgaaaggccagggcatctacgcctatgtcaccctgatgaacggccaggaaccgtccgacgagctgaagaaggatctgctggccctggtcggcaaggagatcggcagcttcgccaagccggagctgatccagtgggcgccgggcctgcccaagacccgctcgggcaagatcatgcggcgcatcctgcgcaagatcgcctgcaacgagctggagaacatgggcgacacctcgaccctggccgaccccagcgtggtcgacagcctgatcgatcaacgcctcaaccgctga

SEQ ID NO: 151257 - protein, 645 aa, Pseudomonas mendocina ymp
MFEITRHPVADAVRQRAHLDNDAYLRLYQQSVEQPDTFWAEQAKAFLTWFKPWDQVHSSDLKQGRAEWFKGGQLNVAYNCIDRHLQQRGEQVAIIWEGDNPAESAHITYNKLHHNVSRLANVLKRRGVKKGDRVCIYMPMVPEAAYAMLACARIGAVHSVVFGGFSPDALRDRILDADCRTVITADEGVRGGKYIPLKNNVDKALQSCPNVSTVVVVERTQGDVAWVEGRDLWYHQALKEVDADCPAEPMDAEDPLFILYTSGSTGKPKGVLHTTGGYLLGAAMTHKYVFDYHEGDVYWCTADVGWVTGHSYIVYGPLANAATTLMFEGVPNYPDASRFWQVIDKHQVNTFYTAPTALRALMREGEAPVKATSRSSLRLLGTVGEPINPEAWEWYFHVVGDMRCPIVDTWWQTETGSILITPLPGATDLKPGSATRPFFGVQPVLLDEQGKEIEGPGAGVLAIKASWPSQIRSVYGDHQRMVDTYFKPYPGYYFTGDGARRDEDGYYWITGRVDDVINVSGHRIGTAEVESALVLHDAVAEAAVVGYPHDVKGQGIYAYVTLMNGQEPSDELKKDLLALVGKEIGSFAKPELIQWAPGLPKTRSGKIMRRILRKIACNELENMGDTSTLADPSVVDSLIDQRLNR

SEQ ID NO: 151258 - DNA, 1911 bp, Flavobacterium johnsoniae UW101
  CDS (1)..(1911): transl_table=11
atgagttattataaaattgaaaatttagaacaatattttaaacattacaataagtcaatacgagagccgagaaaattttggggaaaaattgctgaagaaaattttacttggtatcaacagtgggaaaaagttgttgattttaatatggccgatgccgaagtaaaatggtttacagaagcaaaggttaacattaccaaaaattgtatcgacagacacttaagcaaaagaggagataaaacggctattatttttgagccgaatgaaccttctgaagaagctttacatataacatacaacgagctttacgaaagagtttcaaaaatggcaaatgttttgcgtgaacagggaattcgtaaaggagaccgcgtgtgcatttaccttccaatgattccagaactggcagtagctgttttggcatgtgccagaattggagcaattcactcagtggtttttgcaggattttctgcttctgcagtttctgccagaattaacgactgcgaatgtaaaatggttattacatcagacggtggttacagaggaaataaaacaattgatttaaaaggaattgttgatgaagccttagatacctgtccatcagtttctaaagttttggttgtaaaaagaactaaaacagaaattgctatgaaagaaggccgtgacatttggttacagccattattagatgcagctcttgataatagtgttgcagaaattatggatgccgaagatcctttgtttattttatatacatctggatctacaggaaaaccaaaaggaatggtgcatacaacagctggatacatggtttatacagcttatacattcaaaaacgtattcagccacgaagaaaatgatatcttttggtgtacggcagatattggatggattacaggacactcttatatattatatggaccattgttaaatggaggaacaactgtaatttttgaaggcgttccttcttatcctgatttcagccgtttttgggatattatcgaaaaacataaaatcacacaattttatacagcaccaacagcgattcgttcattagcaaaagaaagtttagattatattcaaaaatatcctctaaaatctcttaaagtaattggatctgttggagaaccaatcaacgaagaagcttggcactggttcaacgaccacgttggagacaagagatgtcctgttgtagatacttggtggcagacagaaaccggtggaattatgatttcgccaattgcttttgttacgcctacaaaaccaacttatgcaactttaccattaccgggaattcagccggttttaatggatgaaaaacgcaacgaaattgaaggaaatcaagtagttggaagtttatgtattaaatttccatggcctggaatcgccagaacaatctggaataatcacgatcgttataaagaaacgtatttctctgctttccctggaaaatattttacaggagacggtgcattacgcgatgaagtaggatattacagaatcacaggtagagtagatgatgttgtaattgtttctggacataatttaggaactgctccaattgaagatgctatcaacgaacatcaagcggttgccgaatctgcaattgttggattcccacatgatattaaaggaaatgcattatatggttttgttatcctgaaagaaaccggagaagttagaaataaagaaaacttaacaaaagagatcaaccagtatatttctgatcacattggaccaattgcgaaattagataaaatccaatttgtttctggcttgccaaaaactcgttcaggaaaaattatgcgtagaattttacgtaaaattgctgaaggtgatttctctaactttggagatacaactacattattaaatcctgaagttgtagaacagattatgaaagaaagaattgcataa

SEQ ID NO: 151259 - protein, 636 aa, Flavobacterium johnsoniae UW101
MSYYKIENLEQYFKHYNKSIREPRKFWGKIAEENFTWYQQWEKVVDFNMADAEVKWFTEAKVNITKNCIDRHLSKRGDKTAIIFEPNEPSEEALHITYNELYERVSKMANVLREQGIRKGDRVCIYLPMIPELAVAVLACARIGAIHSVVFAGFSASAVSARINDCECKMVITSDGGYRGNKTIDLKGIVDEALDTCPSVSKVLVVKRTKTEIAMKEGRDIWLQPLLDAALDNSVAEIMDAEDPLFILYTSGSTGKPKGMVHTTAGYMVYTAYTFKNVFSHEENDIFWCTADIGWITGHSYILYGPLLNGGTTVIFEGVPSYPDFSRFWDIIEKHKITQFYTAPTAIRSLAKESLDYIQKYPLKSLKVIGSVGEPINEEAWHWFNDHVGDKRCPVVDTWWQTETGGIMISPIAFVTPTKPTYATLPLPGIQPVLMDEKRNEIEGNQVVGSLCIKFPWPGIARTIWNNHDRYKETYFSAFPGKYFTGDGALRDEVGYYRITGRVDDVVIVSGHNLGTAPIEDAINEHQAVAESAIVGFPHDIKGNALYGFVILKETGEVRNKENLTKEINQYISDHIGPIAKLDKIQFVSGLPKTRSGKIMRRILRKIAEGDFSNFGDTTTLLNPEVVEQIMKERIA

SEQ ID NO: 151260 - DNA, 1953 bp, Bradyrhizobium sp. ORS278; identical to SEQ ID NO: 126433
  CDS (1)..(1953): transl_table=11

SEQ ID NO: 151261 - protein, 650 aa, Bradyrhizobium sp. ORS278; identical to SEQ ID NO: 126434

SEQ ID NO: 151262 - DNA, 1986 bp, Pelotomaculum thermopropionicum SI
  CDS (1)..(1986): transl_table=11
atgaaggctgaaaaaaccggcagcgtagaatcattacttacagaaaaaagaattttcagcccgtcaagcgagtttgctgagaaggccctgcttaagagccggcagcaatatgaagaaatgtggcgaaggtcaatcgaaaagccggacgagttctgggcggaaatggctgaaaagcatattgactggtttaaaaaatgggacgccgttgaagagtacagctttaaagatgacgttttcgtgcgctatttccggggcgcaaagctcaacgcttcatataactgtctagaccgccatttaaacaactggcgcaggaataaagcggcgctaatctggcagggcgaaccggcggaggaaagcaggacctatacctaccttcagttgcaccgggaggtctgcaaatttgccagcgttctgaaaagcctcggggtaaagaaaggggaccgggtaaccgtatacatgccgatgattcccgaactggtaatcaccctgctggcctgcgcccggatcggggccatccacagcgtggtgttcgggggattcagctccgaagcgctgcgtgacagaattatcgactcccaggccgaaacgctggttaccgccaacttcggactcagggccggcaaaacgctgaactgcaaggaaaacgccgacgaggccctctccaattgccccgccgtaaagaactgcatagtggtcagaaggattgacagggactgcaatatgatgccagggcgcgactactggtggcatgagctgatgagcgcggcaacgcccgcctgcgaaccggagcaaatggacgcagaagaccccctcttcatcctctataccagcggcagcaccggaaagccaaaaggcgtcatgcatactacagggggctacatggtttacgccacaacaacattcaagtatattttcgattatcgtgacgaagatgttttctggtgcacggcagacatcggatgggttacaggtcacagttacatcgtttacggaccgctgtccgcaggagcaacctccttaatgttcgaaggcgtacctaactatcctcagccggacaggttctgggaagtcgtggaaaagtaccgcgtcaatatattctacaccgcccccaccgccatccgggccatgatgagggacggcgacagatggccgctcggcagggacctcagcagcctccggctgcttggcacggtgggcgagccaattaatcccgaggcctggatgtggtattacaaggtggtgggtaaagaaaggtgcccggttgtcgatacctggtggcagacagaaacaggaggcatcttaatttccccgctgccgggctgcattcccaccaaacccggctctgccaccgtaccgttcttcggggtaaacccgaagatcatccggcaggacgggagcgaggccgctccaaacgaaggcggctacctggttatcgacaaaccctggcccggcatcatgcgcggcgtttacggcgaccccaacaggtttaaaaacacctattttgtccagtacccgggttattactttaccggtgacggggcgcgccgggacgaagacggctatttctggctgatgggccgggtggacgatgttattaacgtatccgggcacaggctgggtacggccgaagtggaaagctcactggtggcgcacccgaaagttgctgaagcggcggtggtaggttttccgcacgagattaaaggggaaggcatttacgcctacgtcacggttaaggaaggcgtggaagcaacggaggaactgaaaaaagaacttattgcccatgtccgcaaggaaatcggccccatcgcctctccggacaaaatacagttttccagtgccctgcccaaaaccagaagcggaaaaattattagaagaatactgaggaaaattgcagccggagaaatcggtgagcttggcgacaccaccacgctggccgatcccgcagtggtggaaagcctggtggccggcaggctggaggcggtttaa

SEQ ID NO: 151263 - protein, 661 aa, Pelotomaculum thermopropionicum SI
MKAEKTGSVESLLTEKRIFSPSSEFAEKALLKSRQQYEEMWRRSIEKPDEFWAEMAEKHIDWFKKWDAVEEYSFKDDVFVRYFRGAKLNASYNCLDRHLNNWRRNKAALIWQGEPAEESRTYTYLQLHREVCKFASVLKSLGVKKGDRVTVYMPMIPELVITLLACARIGAIHSVVFGGFSSEALRDRIIDSQAETLVTANFGLRAGKTLNCKENADEALSNCPAVKNCIVVRRIDRDCNMMPGRDYWWHELMSAATPACEPEQMDAEDPLFILYTSGSTGKPKGVMHTTGGYMVYATTTFKYIFDYRDEDVFWCTADIGWVTGHSYIVYGPLSAGATSLMFEGVPNYPQPDRFWEVVEKYRVNIFYTAPTAIRAMMRDGDRWPLGRDLSSLRLLGTVGEPINPEAWMWYYKVVGKERCPVVDTWWQTETGGILISPLPGCIPTKPGSATVPFFGVNPKIIRQDGSEAAPNEGGYLVIDKPWPGIMRGVYGDPNRFKNTYFVQYPGYYFTGDGARRDEDGYFWLMGRVDDVINVSGHRLGTAEVESSLVAHPKVAEAAVVGFPHEIKGEGIYAYVTVKEGVEATEELKKELIAHVRKEIGPIASPDKIQFSSALPKTRSGKIIRRILRKIAAGEIGELGDTTTLADPAVVESLVAGRLEAV

SEQ ID NO: 151264 - DNA, 1935 bp, Acidiphilium cryptum JF-5
  CDS (1)..(1935): transl_table=11
atgtcgcagcccgaaaccattcccgtgaagccggagatcgccgctaacgcgcttgtcgatcgtgcgagatacgacgacatggcgcgccgcgcggcggaaaatcccgaggcgttctgggccgaggaatccaagcgcatcacctggatgacgccgccgacccgcatcaagaacgtcaccttcaccggcaatgtctcgatcaagtggttcgaggacggcgtgctgaacgcatcggccaactgtctcgaccggcatctcgccacccgcggcgaccaggttgcgatcatctgggaaggtgacgatcccggcgaacagaagcatgtgacctatcgcgagttgcacgccgaagtgtgccgcatggcgaatgtgttgaagtcgctcggcgtgcggaagggcgaccgcgtcaccgtctacatgccgatgatcgtcgaggcggcggtggcgattctcgcctgcgcgcgcatcggcgcggttcattccgtggtgttcggcgggttctcgccggacagcctcgccaaccgcatccaggattgcgacagctcgatcctgatcaccgccgatgaaggccgccgcggcggccgcaaggtgccgctgaaggccaatgtcgatgccgcggcgaaatcctgcccgatgctgaagaaggttgtcgtggtgaaggcgaccggcggccaggtcgacatgcaggacggccgcgacgtctggtatcacgaggcggcggcgaccatgccgctcgactgcccccccgagccgatgaatgccgaggacccgctcttcatcctctacacctccggctccaccggcaagcccaagggcgtgctgcacacgaccggtggttacatggtctgggcgagcttcacccaccagtatgtgttcgattaccatgacggcgaggtctactggtgcaccgccgatgtcggctgggtgaccggccatacctatatcgtctatggtccgctcgccaacggcgccaccacgctgatgttcgaggggattccgaactaccccgacaccagccgcttctggcaggtggtggacaagcacaaggtcaacatcttctacaccgccccgaccgcgatccgcgcgctgatgcgcgacggcgaggggccggtgaaaaagacctcgcgcgcctcgctgcgggtgctgggttcggtcggcgagccgatcaatcccgaagcgtggctttggtactatcgcgtcgtcggcgaccagcgctgcccgatcgtcgatacctggtggcagaccgaaaccggcggcatcctgatctcggcgctgcccggcgcgatcgaccagaagccgggctcggcgacgctgccgctgcccggcgtgaagccggttctggtcgatggcgacggcaacgtcctggaaggggcgactgaaggcaatctctgcctcgccgacagctggcccggccagatgcggacggtttacggcgatcacgagcggttcatccagacctatttctcgaccttccggggcttctacttctccggcgacggcgcccgccgcgacgaggatggatattactggatcaccggccgggtagacgacgtcatcaacgtctccggccaccggatgggcacggccgaggtcgagagcgcgctggtcgcgcacgccaaggtggccgaggccgcggtggtgggcttcccgcacgacatcaagggacagggcatctacgcctatgtgacgctcgtcgccggcgaggagccgaccgaggaactgcgcaaggaactggtgatgtgggtccgcaaggaaatcggcccgatcgctgcgccggatgcgatccagtgggcgcccggcctgcccaagacgcgctcgggcaagatcatgcgccgaatcctgcgcaagatcgccgcgaatgagaccgacagcctgggtgatacctcgaccctcgccgacccggcggtggtcgacgatcttgtccgcaaccggatggcctga

SEQ ID NO: 151265 - protein, 644 aa, Acidiphilium cryptum JF-5
MSQPETIPVKPEIAANALVDRARYDDMARRAAENPEAFWAEESKRITWMTPPTRIKNVTFTGNVSIKWFEDGVLNASANCLDRHLATRGDQVAIIWEGDDPGEQKHVTYRELHAEVCRMANVLKSLGVRKGDRVTVYMPMIVEAAVAILACARIGAVHSVVFGGFSPDSLANRIQDCDSSILITADEGRRGGRKVPLKANVDAAAKSCPMLKKVVVVKATGGQVDMQDGRDVWYHEAAATMPLDCPPEPMNAEDPLFILYTSGSTGKPKGVLHTTGGYMVWASFTHQYVFDYHDGEVYWCTADVGWVTGHTYIVYGPLANGATTLMFEGIPNYPDTSRFWQVVDKHKVNIFYTAPTAIRALMRDGEGPVKKTSRASLRVLGSVGEPINPEAWLWYYRVVGDQRCPIVDTWWQTETGGILISALPGAIDQKPGSATLPLPGVKPVLVDGDGNVLEGATEGNLCLADSWPGQMRTVYGDHERFIQTYFSTFRGFYFSGDGARRDEDGYYWITGRVDDVINVSGHRMGTAEVESALVAHAKVAEAAVVGFPHDIKGQGIYAYVTLVAGEEPTEELRKELVMWVRKEIGPIAAPDAIQWAPGLPKTRSGKIMRRILRKIAANETDSLGDTSTLADPAVVDDLVRNRMA

SEQ ID NO: 151266 - DNA, 1953 bp, Bradyrhizobium sp. BTAi1
  CDS (1)..(1953): transl_table=11
atgtccgagaagatctacgacgtcccggctgagtgggcgaaacgcgccttcgtcgacgacgcgaaataccaggagatgtatgcgcgctcgatcaaggatccgaacggcttctgggccgagcaggccaagcgcgtcgactgggtgaaggcgcctaccatcatcgagaacgtctcctacgcccccggcaacatctcgatcaaatggttcgaggacggcgtcctcaacgccgcctataattgcatcgaccgccacctcgccacccgcgccaaccagaccgcgatcatctgggagggcgacgatccctcgcagtccaagaacatcacctatcgcgaactgcacgacgaagtgtgcaagatggccaacatcctgcgcaaccgcaacgtcaagaagggcgaccgcgtcaccatctacctgccgatgatcccggaggcggcctatgcgatgctggcctgcgcccgcatcggcgccatccattcggtggtgttcgccggcttctcgccggattcgctcgcgcagcgcatcaaggactgcgactccaaggtcgtcatcaccgccgatgaaggcctgcgcggcggccgcaaggtgccgctgaaggccaatgtcgacgcggcgctgaacaaggtggacaatgtcgactgggtcgtcgtggtcaagcgcaccggcggcaaggtcgagatgaacccgacgcgcgacctctggtatcatgaggccgcggagatggtgacgacggagtgcccgtgcgagccgatgcatgcggaggatccgctgttcatcctctacacgtcgggctcgaccggccagcccaagggcgtgctgcacaccaccggcggctatctcgtctacgccgcgatgacgcatcaatatgtgttcgactatcacgagggcgacgtctactggtgcaccgccgatgtcggctgggtcaccggccacagctacatcctctatgggccgctggcgaacggcgcggtcacgctgatgttcgaaggcgtgccgaactatccggacaattcgcggttctggaacgtcatcgacaagcacaaggtcaacatcttctacaccgcgccgaccgcgatccgtgcgctgatgcagggcggcgatgcgcccgtgacgaagacctcgcgcgcgtcgctgcgcctgctcggctcggtcggcgagccgatcaatccggaggcctgggagtggtatcaccgcgtcgtcggcggcggccgctgcccgatcgtcgacacctggtggcagaccgagaccggcggcatcctgatcacgccgctgcccggcgcaaccaagctcaagcccggctcggcgacgcggccgttcttcggcgtggttcccgaaatcgtcgacgccgacggtaagacgctggagggcgcgaccgagggcaatctctgcctgacccgctcctggccgggccagatgcgcaccgtctatggcgaccatgcccggttcgagatgacctacttctcgacctacaagggcaagtacttcaccggcgacggctgccgccgcgatgccgatggctattactggatcaccggccgcgtcgacgacgtcatcaacgtctccggtcaccgcatgggcaccgccgaggtcgagagcgcgctggtcgcgcatgcgaaggtctcggaggccgccgtggtcggctatccgcacgacatcaagggccagggcatctacgcctatgttaccctgatggccggcgagacgccgagcgaggagctgcgcaaggagctcgtcgcctgggtgcgcaaggagatcggaccgatcgcctcgcccgaccagatccagttcgcaccgggcctgcccaagactcgctccggcaagatcatgcgccgcatcctgcgcaagatcgccgaggacgagccgagtgcgctcggcgatacgtcgaccctggccgatcccggcgtggtcgacgatctcgtgcagcaccggcagaaccgcaaggagaagcaggcctag

SEQ ID NO: 151267 - protein, 650 aa, Bradyrhizobium sp. BTAi1
MSEKIYDVPAEWAKRAFVDDAKYQEMYARSIKDPNGFWAEQAKRVDWVKAPTIIENVSYAPGNISIKWFEDGVLNAAYNCIDRHLATRANQTAIIWEGDDPSQSKNITYRELHDEVCKMANILRNRNVKKGDRVTIYLPMIPEAAYAMLACARIGAIHSVVFAGFSPDSLAQRIKDCDSKVVITADEGLRGGRKVPLKANVDAALNKVDNVDWVVVVKRTGGKVEMNPTRDLWYHEAAEMVTTECPCEPMHAEDPLFILYTSGSTGQPKGVLHTTGGYLVYAAMTHQYVFDYHEGDVYWCTADVGWVTGHSYILYGPLANGAVTLMFEGVPNYPDNSRFWNVIDKHKVNIFYTAPTAIRALMQGGDAPVTKTSRASLRLLGSVGEPINPEAWEWYHRVVGGGRCPIVDTWWQTETGGILITPLPGATKLKPGSATRPFFGVVPEIVDADGKTLEGATEGNLCLTRSWPGQMRTVYGDHARFEMTYFSTYKGKYFTGDGCRRDADGYYWITGRVDDVINVSGHRMGTAEVESALVAHAKVSEAAVVGYPHDIKGQGIYAYVTLMAGETPSEELRKELVAWVRKEIGPIASPDQIQFAPGLPKTRSGKIMRRILRKIAEDEPSALGDTSTLADPGVVDDLVQHRQNRKEKQA

SEQ ID NO: 151268 - DNA, 1884 bp, Legionella pneumophila str. Corby
  CDS (1)..(1884): transl_table=11
atgcttcccgttcatctaaagcatcctcatttaacacctacagaagaatctctatctgaattttggtctgaaattgccgcacaaaccattgactggatacaaccttggagtattaccctgcagggagggttacacaaaggcgatgtgaaatggtttcaaggcggcttactcaatgttagcgctaattgtcttgataggcatttaccccataaagcgaatcaaacggctatcatttgggaaggtgatgatgaaaaccaaaataaaaccctgacttttgcgcagctttattctgaagtatgtaaaatgagcaatgtgttaaaaagcctaaatgttcgcaaaggtgatacagtaggcatttatttgcccatgattcctgaagcagccattgccatgttggcttgcgctcgtataggggctattcataccgttgtgtttgccgggttttcggcccatgcattgcagcagcgattaacagcctcttcctgtaaatgtttaatcactgtggatgcgtttcaacgcggtggaaaaactatccctttaaagaaacaggctgacgaagccagcgtggacttaaatatcaccaagctggttgttaaaaattcaaatgttccaatggcactaaataagaacaaagaacattggtggcatgagctaaaacaaaccgtatcggatcaatgcacgccggaaccaatgaacgccgaagatcccttgtttattctctatacttccggaagcacgggacagccgaaaggagtggtacataccacaggcggctatttagtgcaggctgcttatacgcatcaactgatatttgcttgtcaggataatgaagtattttggtgtactgctgatgtcggttggattacagggcatagttatgtcgtctatggccctctctgcaatggcattaccacattgatgtttgaaggaatacccacgtggcctgacgcagcaagaaactggcgcatcattgataagcaccaagtgaatgtattttacacagctcccacagccatccgctccctgatgagagctggtgatcaatggctaaactcaagctcaagaaattctcttcgtttactgggttcagtgggtgagccaattaacccggaagcgtggaattggtatcaccaaaaagttggacaagggaaatgcccgatagtggatacatggtggcaaactgaaactggagccattatgattagtcccagagccagtgatgaagtgatcaaaccaggctctgctcgtaaacctatcccggggatcataccactcctgctaaatgagcaaggacatgaaattaatggctctggagaaggatttttagctatcaaatacccatggccttctatggcaagaaccattgcaggagatcaccaaaggtactgtaacacttatttatccaacggctattacatcactggtgatggagccaaacgagatgaggatggagattattggattacaggccgaattgatgacgtacttaatgtttccggccatcgattgggtactgctgaaattgaatcagcattagtcagccatcccaaggttgctgaagctggcgttgtaggtattccccatgatttaaaaggtcaaggaatatttgcctatgtcattctgaaacagggaaataagccggatgccaagctccaaactgaattgatggagcgagtcaaggatgaaatcagtgctatcgccaaaccagatgtcattcagtttgtaaatgatttgccgaaaacccgttcgggtaaaattatgcgccgaatactaagaaaaattgcttgtaaagaagtgtcgcacattgatgagctgggtgatttaacaactcttgctaaccctcaggtcgttgaagaactcatgaaaaatgttttgaggcagtaa

SEQ ID NO: 151269 - protein, 627 aa, Legionella pneumophila str. Corby
MLPVHLKHPHLTPTEESLSEFWSEIAAQTIDWIQPWSITLQGGLHKGDVKWFQGGLLNVSANCLDRHLPHKANQTAIIWEGDDENQNKTLTFAQLYSEVCKMSNVLKSLNVRKGDTVGIYLPMIPEAAIAMLACARIGAIHTVVFAGFSAHALQQRLTASSCKCLITVDAFQRGGKTIPLKKQADEASVDLNITKLVVKNSNVPMALNKNKEHWWHELKQTVSDQCTPEPMNAEDPLFILYTSGSTGQPKGVVHTTGGYLVQAAYTHQLIFACQDNEVFWCTADVGWITGHSYVVYGPLCNGITTLMFEGIPTWPDAARNWRIIDKHQVNVFYTAPTAIRSLMRAGDQWLNSSSRNSLRLLGSVGEPINPEAWNWYHQKVGQGKCPIVDTWWQTETGAIMISPRASDEVIKPGSARKPIPGIIPLLLNEQGHEINGSGEGFLAIKYPWPSMARTIAGDHQRYCNTYLSNGYYITGDGAKRDEDGDYWITGRIDDVLNVSGHRLGTAEIESALVSHPKVAEAGVVGIPHDLKGQGIFAYVILKQGNKPDAKLQTELMERVKDEISAIAKPDVIQFVNDLPKTRSGKIMRRILRKIACKEVSHIDELGDLTTLANPQVVEELMKNVLRQ

SEQ ID NO: 151270 - DNA, 1956 bp, Brucella ovis ATCC 25840
  CDS (1)..(1956): transl_table=11
atgtcggaaaagctttaccccgtgctgccggaggcaaagaaaaacacgctcatcgacaacgagacttatctcgaatggtatgaggagagcgtgagcgacccggatggcttctgggccaagcacggccggcgtatcgactggttcaagcctttcaccaaggtcaagaacaccgatttcaacggcgatgtaacgatcaagtggtatgaggatggcgtcaccaacgtctcatataattgcatcgaccgccatctgaagagccgcggcgacaaggtcgccatcatctgggaaggcgacaacccctatatcgacaagaagatcacctatcgcgagctttacgagaatgtctgccgcatggcgaatgtgctcaagaagcatggggtgaagaagggcgaccgcgtcacgatctatctgccgatgatcccggaagccgcctatgccatgctcgcctgcgcgcgcatcggcgccgtgcactcggtcgtctttgccggtttctcgccggaggcgctcgctggccgcatcgttgactgcgaatccactttcgtcatcaccgccgatgaaggtgtgcgcggcggcaagcctgttgcgctgaaggaaaacaccgataccgccatcgacatcgccgccaagcaatatgtgatggtcaacaaggtgctggtcgtgcgccgcaccggcggcaaggtaagctggggccgcggccgcgatctgtggtaccatcaggaagtcgcaagcgtcgaaccgcattgcgaaccggaaccgatgaatgcggaagacccgcttttcattctctacacatccggttccaccggcaagccgaagggtgtgctgcataccaccggcggctacctcgtctatgcctcgatgacgcatcaatatgtcttcgattaccatgatggcgagatctactggtgcacggcggatgtgggttgggtaacgggccactcctatatcgtctacggaccgctggccaatggcgcgacaacgctgatgtttgaaggcgtgcccaacttccccgatcagggccgtttctgggaagtcgtcgacaagcaccatgtcaatatcttctacaccgcgccaaccgcgctgcgcgcgcttatgggcgcgggcgatgaattcgtaacccgctcatcgcgttcgacgctgcgcctgctgggctcggtcggcgagccgatcaatccagaggcctgggagtggtattacaatgtcgtgggcgaccagaaatgccccatcgtcgatacctggtggcagacggaaaatggcggcatcctcatcaccccacttcccggcgcgaccgatttgaaacccggttcggcaacacgcccgttcttcggcgtcaagccggtgctggtggacaatgaaggcaatgtgcaggagggcgtagccgacggcaacctgtgcatctccgactcctggccgggccagatgcgcaccgtctatggcgaccacaagcgtttcatcgaaacctacttctccacctataaggggatgtatttttcgggcgatggctgccgccgcgacgaggacggctattactggatcaccggccgcgtcgatgacgtgctgaatatttccggccatcgcctcggcacggcggaaatcgaatcggcacttgtctcgcatcactcggtttcggaagccgccgtggtcggctatccgcacccgatcaagggacagggcatctattgctatgtcacgctgatgaccggcgcagacgcgcaggacccggacgagttgcgcaaggaactggtccagcatgtgcgcaaggaaatcggccccatcgccacaccggacaagatccagtttgcgcccggactgccgaaaacccgttccggcaagatcatgcgccgcatcctgcgcaagatcgccgaagacgagtccggcgcattgggcgacacctcaacgctcgccgatccgggcgtggtggacgacctgatcgaaaatcgccagaacaagaaatga

SEQ ID NO: 151271 - protein, 651 aa, Brucella ovis ATCC 25840
MSEKLYPVLPEAKKNTLIDNETYLEWYEESVSDPDGFWAKHGRRIDWFKPFTKVKNTDFNGDVTIKWYEDGVTNVSYNCIDRHLKSRGDKVAIIWEGDNPYIDKKITYRELYENVCRMANVLKKHGVKKGDRVTIYLPMIPEAAYAMLACARIGAVHSVVFAGFSPEALAGRIVDCESTFVITADEGVRGGKPVALKENTDTAIDIAAKQYVMVNKVLVVRRTGGKVSWGRGRDLWYHQEVASVEPHCEPEPMNAEDPLFILYTSGSTGKPKGVLHTTGGYLVYASMTHQYVFDYHDGEIYWCTADVGWVTGHSYIVYGPLANGATTLMFEGVPNFPDQGRFWEVVDKHHVNIFYTAPTALRALMGAGDEFVTRSSRSTLRLLGSVGEPINPEAWEWYYNVVGDQKCPIVDTWWQTENGGILITPLPGATDLKPGSATRPFFGVKPVLVDNEGNVQEGVADGNLCISDSWPGQMRTVYGDHKRFIETYFSTYKGMYFSGDGCRRDEDGYYWITGRVDDVLNISGHRLGTAEIESALVSHHSVSEAAVVGYPHPIKGQGIYCYVTLMTGADAQDPDELRKELVQHVRKEIGPIATPDKIQFAPGLPKTRSGKIMRRILRKIAEDESGALGDTSTLADPGVVDDLIENRQNKK

SEQ ID NO: 151272 - DNA, 1935 bp, Pseudomonas putida F1
  CDS (1)..(1935): transl_table=11
atgttcgatatccgcaaatacccccaagccctggccgtcagccagtccgccgccctcacccccgaagactaccgccgcctctaccgccagtcggtcgaagacccagacaccttctgggccgaacaggccaaacgtctggactggatcaagccttggtcaagcgtgcagcaatgcgacctgcataccggcaaggcccgctggttcgacggtgcgcaactcaacgtcagctacaactgcatcgaccgtcatctggcccagcgcggcgagcaaacggccctgctgtgggaaggcgacgaccccaaggattccaaggccatcacctatcgcgaactgcaccgtgaggtctgccgcctggccaacgcaatgaaagcgcgcggtgtgaagaaaggcgaccgggtgtgcatctacatgccaatgattcccgaggccgccttcgccatgctcgcctgcacccgcatcggcgccatccactcggtagtgttcggcggtttctcccccgatgccttgcgagaccgtattctcgatgccgactgccgcaccgtgatcaccgccgatgaaggcgtgcgtggcggcaaacgcatcccgctgaaacagaacgtcgacaaggccctggccagctgccctgcggtcagtagcgtattggtggtgcgtcgcactggcggcgatgttgcgtggaccgagggccgcgacctctggtatcacgaagcgacgaaggatgccggcgacgactgccccccagaaccgatggaggccgaagacccgctgttcatcctctacacctccggcagcaccggcaaacccaaaggggtgctgcataccaccggcggctacctgctgcaggcaacgatgaccttcaaggtggtgttcgattatcgtgacggcgaggtgttctggtgcaccgccgatgtcggctgggtgactggccacagctacatcgtctacggcccgctggccaatggcgcaatctcgctgatgttcgaaggcgtgcccaactacccggatacctcgcgcttctggcaggtggtggacaaacaccaggtgaacatcttctacaccgccccgaccgccctgcgcgcactgatgcgcgagggctctgcgccactgcagggcacctcacgcaaaagcctgcgcctgctgggcagcgtcggcgagccgatcaacccggaagcctgggaatggtatttcgaggaggtcgggcagaagcgctgcccgattgtggatacctggtggcagaccgaaaccggcggcatcatgctcaccccgctgcccggcacgcagtcactcaaacccggctgcgctacccagccaatgttcggcgtgcagccggtgctactggacgaaaaaggcaaactgatcgaaggccccggcgccggcgtgctggcgatcaaagccagctggccggggcagatccgcagtgtctacggcgaccaccagcggatggtcgacacctacttcaagcccttgcccggctactacttcacaggcgacggtgcccgccgcgatgccgatggcgactactggatcaccgggcgcatcgacgatgtgatcaacgtatccgggcaccgcatcggcaccgctgaagtggaaagcgcacttgtgctgcatgacagcgtggccgaagccgcggtggtcggttatccccacgacctcaagggccaaggcgtctacgccttcgtcacgaccatgaatggcgtgacaccagatgacacgctaaaagccgagctgctggccctggtcagcaaggaaatcggcagcttcgccaagcctgagctgattcagtgggcgccagcgctacccaagacgcgctcaggcaagatcatgcggcgtatactgcgcaaaatcgcctgcaatgagctggaaaacctgggcgatacctcgaccctggccgacccaagcgtggtacagggcctgatcgacaaacgcctcaaccagtaa

SEQ ID NO: 151273 - protein, 644 aa, Pseudomonas putida F1
MFDIRKYPQALAVSQSAALTPEDYRRLYRQSVEDPDTFWAEQAKRLDWIKPWSSVQQCDLHTGKARWFDGAQLNVSYNCIDRHLAQRGEQTALLWEGDDPKDSKAITYRELHREVCRLANAMKARGVKKGDRVCIYMPMIPEAAFAMLACTRIGAIHSVVFGGFSPDALRDRILDADCRTVITADEGVRGGKRIPLKQNVDKALASCPAVSSVLVVRRTGGDVAWTEGRDLWYHEATKDAGDDCPPEPMEAEDPLFILYTSGSTGKPKGVLHTTGGYLLQATMTFKVVFDYRDGEVFWCTADVGWVTGHSYIVYGPLANGAISLMFEGVPNYPDTSRFWQVVDKHQVNIFYTAPTALRALMREGSAPLQGTSRKSLRLLGSVGEPINPEAWEWYFEEVGQKRCPIVDTWWQTETGGIMLTPLPGTQSLKPGCATQPMFGVQPVLLDEKGKLIEGPGAGVLAIKASWPGQIRSVYGDHQRMVDTYFKPLPGYYFTGDGARRDADGDYWITGRIDDVINVSGHRIGTAEVESALVLHDSVAEAAVVGYPHDLKGQGVYAFVTTMNGVTPDDTLKAELLALVSKEIGSFAKPELIQWAPALPKTRSGKIMRRILRKIACNELENLGDTSTLADPSVVQGLIDKRLNQ

SEQ ID NO: 151274 - DNA, 1956 bp, Psychrobacter sp. PRwf-1
  CDS (1)..(1956): transl_table=11
atgaaacagtttccaattagccccgaattctcagctcaagccaacattactcctgaaaaatatgcacaaatctaccaagagtcaattgagtctcctgaaagcaatgaagctttttgggcgaaacgagcagagctaattgattggatcaaaaaacccaccaaaatcaaagacgtcaattacgacttagataattttagaattaagtggtatgaagatggtgagctgaacgtttcggtgaactgtctcgaccgtcatctggcagacaacccttacaagccggccatcatctgggaaggcgaccaccctgcactacacaagatcatctcctttaaagagctgcattcagaagtatgccgtctgggcaatgccatgcgcaaaatgggcgtgggcaaaggcgacagagtggtgttgtatctgccaatggtgccagaagctgtggtgtctatgctggcgtgtgcccgtattggggcaattcatactgtcgtatttggtggcttttcagctgaaagtttggccagtcgtattatcgatagccaagccaagttggtcatcacagcagatgaaggggtgcgtggcggcaaatacacgccgctaaaaaccaatgtagacaaagcgctcgatgttgacggcacagaatgtgtggagcgagtggttgtggtacaccgtaccggcaactcagtgccaatgagtggccgccgtgatgcttggtatcatacgctcattgataactccaatgaagactgcccacctgaaaccatgaatgctgaagacccactgttcttactgtacacctcagggtcaaccggtaagcctaagggcgtggtacacaccacgggtggttatttgacctatgccttatcgacctttcgagatgtgttcgatatcaagcaagatgatgtgttctggtgtacggctgatgtgggctgggtaaccggtcacagctatgtcacttatgggccgctggccaatggaaccaccacagtgatgttcgagggggtaccgcaatatccgacttgggcgcgtattggtcaaatcatcgacaagcatgatgtgagcatcttatataccgcaccgactgccattcgggccatgatgaaagagggggatgcttatgtacgtgagtcaaatcgtgaaagcttacgcctattaggtacggtgggtgagcctattaaccctgaagcttgggactggtatcacgctgtggttggtgaaggacgttgtcctatcgttgatacttggtggcagactgagacgggcggtatcttgatggctccgctgccaaactcagtggacatgaagccaggtgctgctatgaaccctttatatggcatcaagccggctattgttgactcagaaggcgtgcaactagagggctgctcgactgcgggtaacttaattattactgacggctggccgggtcaaatgcgcaccatttatggcgatcataagcgcttcttagagacctactataccacttatcctggcagctattttacaggtgatggcgcaatgcgtgatgaggaaggtcattactggattaccggccgtgtcgatgacgtgctgaacgtatcgggccaccgtatcggtaccgctgagattgaaagcgccttggtgtcgcacccagctgccgctgaaacggccattgtcggaatgccgcatgagctaaaaggtcaaggtatctgtgcttatatcatcttaagaaacggggaagaagataccgaaagattgcgtaatgagcttaaccgccatgtgcgtgcagaaatcggcccgattgctaacttagatgccatgtatattgttgaggcgctacctaagacccgctcgggcaaaatcatgcgccgcatcttacgtaagcttgctgccggtgagttcgatggtctaggcgatacctcaacgcttgcagatgccagcgtggttgatgacttaatcaataccgttaaggccgctcaagcctaa

SEQ ID NO: 151275 - protein, 651 aa, Psychrobacter sp. PRwf-1
MKQFPISPEFSAQANITPEKYAQIYQESIESPESNEAFWAKRAELIDWIKKPTKIKDVNYDLDNFRIKWYEDGELNVSVNCLDRHLADNPYKPAIIWEGDHPALHKIISFKELHSEVCRLGNAMRKMGVGKGDRVVLYLPMVPEAVVSMLACARIGAIHTVVFGGFSAESLASRIIDSQAKLVITADEGVRGGKYTPLKTNVDKALDVDGTECVERVVVVHRTGNSVPMSGRRDAWYHTLIDNSNEDCPPETMNAEDPLFLLYTSGSTGKPKGVVHTTGGYLTYALSTFRDVFDIKQDDVFWCTADVGWVTGHSYVTYGPLANGTTTVMFEGVPQYPTWARIGQIIDKHDVSILYTAPTAIRAMMKEGDAYVRESNRESLRLLGTVGEPINPEAWDWYHAVVGEGRCPIVDTWWQTETGGILMAPLPNSVDMKPGAAMNPLYGIKPAIVDSEGVQLEGCSTAGNLIITDGWPGQMRTIYGDHKRFLETYYTTYPGSYFTGDGAMRDEEGHYWITGRVDDVLNVSGHRIGTAEIESALVSHPAAAETAIVGMPHELKGQGICAYIILRNGEEDTERLRNELNRHVRAEIGPIANLDAMYIVEALPKTRSGKIMRRILRKLAAGEFDGLGDTSTLADASVVDDLINTVKAAQA

SEQ ID NO: 151276 - DNA, 1950 bp, Sinorhizobium medicae WSM419
  CDS (1)..(1950): transl_table=11
atggacgtcaagacctacccggtcctggaagcggccaagaaccgtacgctgctcgacaatgagacctatctgaaatggtaccaggagagcgttgccgatccggagacgttctggggcgagcatggcaagcgaatcgattggttcgagccctataccaaggtcaagaatacgaccttcgagggcgatgtctcgatcaagtggttcgaagacgggctgactaacgtctcctacaactgcatcgatcgccacctgaaagcgcatggcgacaagacggcgatcatctgggagggagacaatccctatctcgacaagaagatcacttataatgagctctacgacacggtttgccgtcttgccaacgtcttgaaaaagcatggcgtcaagaagggcgaccgcgttacaatatacatgccgatgatccccgaagcggcctatgccatgcttgcctgcacccgcatcggcgccgtccattcggtcgtattcggcggcttttcgcctgaggccctggcgggccggatcgtcgattgcgagtcgaccttcgtgatcacctgcgacgagggcgtgcgtggcggcaagcccgtggcgctgaaggagaacaccgatacggccgtggggatcgccgccaagcagaatgtcacggtcggcaaggttctggtcgtgcgccgcaccggcggcaaggtcggatgggccccggagcgcgatctctggtaccaccaggagactgcggcagtggagccgcattgccccccggaaaggatgaatgccgaggacccgctcttcattctctatacctcgggatccaccggaaagccgaagggcgtgctgcatacgaccggcggctatctggtctatgcctcgatgacgcatcaatacgtgttcgactaccaggacggcgacatctactggtgcacggccgatgtcggctgggtcaccggccactcctatatcgtctatggtccgctcgccaatgcggcgacgaccctgatgttcgagggcgtgccgaactttccggatgcgggacggttctgggaagtcgtggacaagcacaaggtcaacatcttctataccgcacccacggcaatccggtcgctgatgggcgccggcgacgatttcgtcaagcgctcctcgcgctcgtcgctgcgcctgctcggaaccgtcggcgagccgatcaatccggaagcctgggaatggtactatcacgtggtcggcgacgagcgttgtccagtcgtcgatacctggtggcagacggaaaccggcggcattctgatcacgccgctgcccggcgctacggacctcaaaccgggttccgcgacgcggccgttcttcggagtccagccgcagatcgtcgacggcgagggcaatgtcgtcgagggtgcggccgacggcaacctttgcatcatcgacagctggcccggtcagatgcggacggtctatggcgatcacgaacgctttatccagacgtatttttctacctacaagggcaagtatttcaccggagacggctgccgccgcgacgaggatggttattactggatcaccggccgcgtcgatgacgtgctcaacgtctcgggacaccggctagggacggctgaggttgaatcggcgctggtctcgcaccagctcgtctccgaggccgcggtcgtcggctatccgcattcgatcaagggtcagggcatctattgctatgtctcgctgatggcgggcgaggtcggcaacgacgaactgcgccaggcactcgtcaagcacgtacgctcggaaatcggaccgatcgcgacaccggacaagatccagttcgcgcccggcctgcccaagacgcgttcgggcaagatcatgcgccggattcttcggaagatcgccgaggacgatttcggttcgcttggcgacacttcgacgctggccgatccctcggtcgtcgatgacctgatcgccaatcgccagaaccgcgcctga

SEQ ID NO: 151277 - protein, 649 aa, Sinorhizobium medicae WSM419
MDVKTYPVLEAAKNRTLLDNETYLKWYQESVADPETFWGEHGKRIDWFEPYTKVKNTTFEGDVSIKWFEDGLTNVSYNCIDRHLKAHGDKTAIIWEGDNPYLDKKITYNELYDTVCRLANVLKKHGVKKGDRVTIYMPMIPEAAYAMLACTRIGAVHSVVFGGFSPEALAGRIVDCESTFVITCDEGVRGGKPVALKENTDTAVGIAAKQNVTVGKVLVVRRTGGKVGWAPERDLWYHQETAAVEPHCPPERMNAEDPLFILYTSGSTGKPKGVLHTTGGYLVYASMTHQYVFDYQDGDIYWCTADVGWVTGHSYIVYGPLANAATTLMFEGVPNFPDAGRFWEVVDKHKVNIFYTAPTAIRSLMGAGDDFVKRSSRSSLRLLGTVGEPINPEAWEWYYHVVGDERCPVVDTWWQTETGGILITPLPGATDLKPGSATRPFFGVQPQIVDGEGNVVEGAADGNLCIIDSWPGQMRTVYGDHERFIQTYFSTYKGKYFTGDGCRRDEDGYYWITGRVDDVLNVSGHRLGTAEVESALVSHQLVSEAAVVGYPHSIKGQGIYCYVSLMAGEVGNDELRQALVKHVRSEIGPIATPDKIQFAPGLPKTRSGKIMRRILRKIAEDDFGSLGDTSTLADPSVVDDLIANRQNRA

SEQ ID NO: 151278 - DNA, 1956 bp, Pseudomonas aeruginosa PA7
  CDS (1)..(1956): transl_table=11
atgtctgcggcatccctgtaccccgtgcacccggaagcggtggcacggaccttcaccgacgaagccacctacaagacgatgtaccagcagtccgtcgtcaaccccgacggcttctggcgcgaacaggcccagcggatcgactggatcaagccgttcgagaaggtcaagcagacctccttcgacgaccatcacgtggacatcaaatggttcgccgacggcaccctcaacgtgtcgcacaactgcctcgaccgtcacctcgccgaacgcggcgaccaggtggcgatcatctgggaaggcgacgatcccgccgaccaccaggaaatcacctaccgccagctccacgagcaggtctgcaagttcgccaacgccctgcgcgggcaggacgtgcaccgcggcgacgtggtcaccatctacatgccgatgatccccgaggccgtggtcgccatgctcgcctgcacccgcatcggcgcgatccactcggtggtcttcggcggcttctcccccgaagccctggccgggcgcatcatcgattgcaagtcgaaggtggtgatcaccgccgacgaaggcgtgcgcggcggcaagcgtactccgctgaaggccaacgtcgacgacgccctgaccaacccggaaacctccagcgtgcagaagatcatcgtctgcaagcgtaccggcgcggaaatcaagtggaaccagcaccgcgacgtctggtacgacgacctgatgaaggtcgccggcagcacctgcgcaccgaaggaaatgggcgccgaggacccgctgttcatcctctacacctccggttccaccggcaagccgaagggcgtgctgcataccaccggcggctacctggtgtacgcctcgctgacccacgagcgggtcttcgactaccgtccgggggaagtctactggtgcaccgccgacatcggctgggtcaccggccacacctacatcgtctatggcccgctggccaacggcgccaccaccattctgttcgagggcgtgccgaactaccccgacgtgacccgcgtggcgaagatcatcgacaagcacaaggtcaacatcctctacaccgcgccgaccgcgatccgcgcgatgatggccgagggcaaggcggcggtggccggtgccgatggctccagcctgcgcctgctcggctcggtgggcgagccgatcaacccggaagcctggcagtggtactacgagaccgtcggccagtcgcgctgcccgatcgtcgacacctggtggcagaccgagaccggcgcctgcctgatgaccccgctgccgggcgcccatgcgatgaagccgggctccgcggccaagccgttcttcggcgtggtgccggcgctggtggacaacctgggcaacctgatcgagggcgcggccgaaggcaacctggtgatcctcgactcctggccaggccaggcgcggaccctctacggcgaccatgatcgcttcgtcgacacctacttcaagaccttcaagggcatgtacttcaccggcgacggcgcgcgccgcgacgaggacggctactactggatcaccgggcgggtcgacgacgtgctcaacgtctccggccaccgcatgggcaccgccgaggtggaaagcgcgatggtcgcccacccgaaggtcgccgaggcggcggtggtcggcatgcagcacgacatcaaggggcagggcatctatgtctacgtcaccctcaactccggggtcgagccgagcgaggcgctgcgccaggagctgaagcagtgggtccgccgcgagatcgggccgatcgccacgccggatgtgatccagtgggcgccgggcctgccgaagacccgttcgggcaagatcatgcggcgcatcctgcgcaagatcgccgcggccgagtacgacaccctcggcgacatctccacccttgccgatccgggcgtggtccagcacctgatcgagacccatcgctcgatgcaggccgcctga

SEQ ID NO: 151279 - protein, 651 aa, Pseudomonas aeruginosa PA7
MSAASLYPVHPEAVARTFTDEATYKTMYQQSVVNPDGFWREQAQRIDWIKPFEKVKQTSFDDHHVDIKWFADGTLNVSHNCLDRHLAERGDQVAIIWEGDDPADHQEITYRQLHEQVCKFANALRGQDVHRGDVVTIYMPMIPEAVVAMLACTRIGAIHSVVFGGFSPEALAGRIIDCKSKVVITADEGVRGGKRTPLKANVDDALTNPETSSVQKIIVCKRTGAEIKWNQHRDVWYDDLMKVAGSTCAPKEMGAEDPLFILYTSGSTGKPKGVLHTTGGYLVYASLTHERVFDYRPGEVYWCTADIGWVTGHTYIVYGPLANGATTILFEGVPNYPDVTRVAKIIDKHKVNILYTAPTAIRAMMAEGKAAVAGADGSSLRLLGSVGEPINPEAWQWYYETVGQSRCPIVDTWWQTETGACLMTPLPGAHAMKPGSAAKPFFGVVPALVDNLGNLIEGAAEGNLVILDSWPGQARTLYGDHDRFVDTYFKTFKGMYFTGDGARRDEDGYYWITGRVDDVLNVSGHRMGTAEVESAMVAHPKVAEAAVVGMQHDIKGQGIYVYVTLNSGVEPSEALRQELKQWVRREIGPIATPDVIQWAPGLPKTRSGKIMRRILRKIAAAEYDTLGDISTLADPGVVQHLIETHRSMQAA

SEQ ID NO: 151280 - DNA, 1938 bp, Pseudomonas aeruginosa PA7
  CDS (1)..(1938): transl_table=11
atgttcgagatcagcgtccacccggtgccggaggccgtccgccagcgtgcctacctgaacgatgacgactaccggcgcctgtaccgccagtccgtggaaaatcccgaggaattctggggcgagcaggccaaggccttcctcgactggttcaagccctggcacagcgtccaccatggcgatctgagaaagggccaggccagctggttcaagggcggccagctgaacgtcgcctacaactgcatcgaccgccatctggagcgccgcggcgagcagatcgccatcgtctgggaaggcgacaatcccagcgaatccgcgcatatcacctaccgcaagctgcaccacaacgtctgccgcctggccaacgtgctgaagagccgcggggtggagaagggcgaccgggtctgcatctacatgccgatgattcccgaggccgcctacgccatgctcgcctgcgcccgcatcggcgcggtgcactcggtggtgttcggcggcttttcgccggactcgctgcgcgaccgcatcctcgatgccgactgccgcaccgtgatcaccgccgacgagggcgtgcgcggcggcaagtacattccgctgaaacagaatgtggaaaaggcgctggaggattgcccggaggtctccaccgtggtggtggtcgagcgcacccagggcgacatcccctgggtcgaaggtcgtgacctctggtaccacgaggcactccacgcggcttccgccgactgcccggcggaagcgatggacgccgaggacccgctgttcatcctctatacctccggcagcaccggcaagccgaagggcgtgttgcacaccaccggtggctacctgctcggcgcggcgatgacccacaagtacgtgttcgactaccacgacggcgatgtctactggtgcaccgccgacgtcggctgggtcaccgggcacagctacatcgtctacggcccgctggccaacggcgccaccaccctgatgttcgagggcgtgcccaactacccggacgcctcgcgcttctggcaagtgatcgacaagcaccaggtgaacatcttctacaccgcgccgaccgcgatccgcgccctgatgcgcgaaggcgacgggccggtgcgccagacctcgcgcagcagcctgcgcctgctcggctcggtgggcgaaccgatcaatccggaggcctgggagtggtactaccaggtggtcggcgagaagcgttgcccgatcgtggacacctggtggcagaccgagaccggcagcatcctgatcaccccgctgcccggcgccaccgcgctcaaaccgggctcggccacccggccgttcttcggcgtgcaaccggtgctgctcgacgagaaaggcaaggaaatcgacggcgcgggcagcggcgtgctggcgatcaaggccagttggccgagccagatccgcagcgtctacggcgatcaccagcggatgatcgacacctacttcaagccctacccgggctactacttcagcggcgacggcgcgcggcgcgacgaggacggctactactggatcaccggccgggtcgacgacgtgatcaacgtctccggccaccgcatcggcaccgccgaggtcgagagcgcgctggtcctgcacgacgcggtggccgaagcggcggtggtcggctgcccgcacgaggtgaagggccaggcgatctatgccttcgtcaccctgatggccggcagccagcccgacgaggcgctgcagcaggaactgctggcgctggtcggcaaggagatcggcagcttcgccaagccggaccacctgcaatgggcgcccagcctgccgaagacccgctccggcaagatcatgcggcgtatcctgcgcaagatcgcctgcaacgagctggacagtctcggcgatacctcgaccctggccgatccgggagtggtgcaggggttgatcgacaaccgcctcaaccgctga

SEQ ID NO: 151281 - protein, 645 aa, Pseudomonas aeruginosa PA7
MFEISVHPVPEAVRQRAYLNDDDYRRLYRQSVENPEEFWGEQAKAFLDWFKPWHSVHHGDLRKGQASWFKGGQLNVAYNCIDRHLERRGEQIAIVWEGDNPSESAHITYRKLHHNVCRLANVLKSRGVEKGDRVCIYMPMIPEAAYAMLACARIGAVHSVVFGGFSPDSLRDRILDADCRTVITADEGVRGGKYIPLKQNVEKALEDCPEVSTVVVVERTQGDIPWVEGRDLWYHEALHAASADCPAEAMDAEDPLFILYTSGSTGKPKGVLHTTGGYLLGAAMTHKYVFDYHDGDVYWCTADVGWVTGHSYIVYGPLANGATTLMFEGVPNYPDASRFWQVIDKHQVNIFYTAPTAIRALMREGDGPVRQTSRSSLRLLGSVGEPINPEAWEWYYQVVGEKRCPIVDTWWQTETGSILITPLPGATALKPGSATRPFFGVQPVLLDEKGKEIDGAGSGVLAIKASWPSQIRSVYGDHQRMIDTYFKPYPGYYFSGDGARRDEDGYYWITGRVDDVINVSGHRIGTAEVESALVLHDAVAEAAVVGCPHEVKGQAIYAFVTLMAGSQPDEALQQELLALVGKEIGSFAKPDHLQWAPSLPKTRSGKIMRRILRKIACNELDSLGDTSTLADPGVVQGLIDNRLNR

SEQ ID NO: 151282 - DNA, 1956 bp, Ochrobactrum anthropi ATCC 49188
  CDS (1)..(1956): transl_table=11
atgtcggaaaagctttacccggtccttgccgaggcaaagagaaacacgctcatcgacaacgcaacctatctcgaatggtatcaggaaagcgtgagcgacccggacagcttttgggcaaagcacggacggcgcatcgactggttcaagcccttcaccaaggtcaagaacaccgatttcaacggcgacgtatccatcaaatggtatgaggacggcgttaccaacgtttcctataactgtatcgaccgccacctgaagagccgtggtgatcaggttgcgatcatctgggaaggcgacaatccctatatcgacaagaagatcacctatcgcgaattgcatgagaatgtctgccgcctcgccaatgtgctgaagaagcacggcgttaagaagggcgaccgtgtcacgatctatctgccgatgatcccggaagcggcttatgcgatgctggcctgcgcgcgcatcggcgctgtgcattccgtcgtcttcgccggtttctcaccggaagcacttgccggtcgtatcgtcgactgcgaatccactttcgtcatcacggccgacgaaggcgtgcgcggcggcaagccggttccgctgaaggaaaacaccgataccgccatcgacattgcggccaagcaatatgtcatggtcaacaaggttctcaccgtgcgccgcaccggcggcaaggtaagctggggaccgggccgcgatctctggtatcatcaggaagttgctagcgtcgaaccgacctgcgacccggaaccgatgaatgcggaagacccgctcttcatcctctacacctccggctccaccggcaagccgaagggcgtgctgcacacaaccggcggctatctcgtctatgcatcgatgacgcatcaatatgtcttcgactatcatgacggcgacatctactggtgcacggcggatgtgggctgggtgacaggtcactcctatatcgtctacggcccgctcgccaacggcgcgacgacattgatgttcgagggtgtgcccaacttccccgatcagggacgtttctgggaagtcgtcgacaagcatcacgtcaatatcttctacactgcgcctacggccatccgcgccctgatgggcgccggcgatgaattcgtcacccgctcgtcgcgttcgacgctgcgcctgctcggttcggttggcgagccgatcaacccggaagcctgggaatggtattacaacgtcgttggtgaccagcggtcgccgattgtcgatacatggtggcagacggaaaccggcggcattctcatcaccccgctgcccggcgcaaccgacctcaagccaggttcggcaacacgaccgttcttcggcatcaagccggaactggtcgataatgaaggcgctgtcattgaaggtgcggtggacggtaatctctgcatcatcgacagctggccgggccagatgcgcacgctttacggcgatcacaagcgcttcatcgaagcctacttctcgacctataagggcaagtacttcaccggcgacggctgccgtcgcgacgaagacggttactactggatcacaggccgcgtcgatgacgtgctcaacatttccggccatcgcctcggcacggcagaaatcgaatcggcactcgtctcgcatcactcggtttcagaagccgctgtcgtgggctatccgcatccgatcaagggacagggcatctattgctacgtcacgctgatgaccggcgaagcagttcaggacgaagacgccctgcgcaaggagctgacccagcacgtgcgcaaggaaatcggtcctattgccacgccggacaagatccagttctcgccgggcctgccgaaaacccgctcgggcaagatcatgcgccgcatcctgcgcaagatcgccgaagacgagtttggtgcactgggcgatacctcgacgctggccgatccgggcgtcgtggacgacctgatcgaaaatcgccagaacaagaaataa

SEQ ID NO: 151283 - protein, 651 aa, Ochrobactrum anthropi ATCC 49188
MSEKLYPVLAEAKRNTLIDNATYLEWYQESVSDPDSFWAKHGRRIDWFKPFTKVKNTDFNGDVSIKWYEDGVTNVSYNCIDRHLKSRGDQVAIIWEGDNPYIDKKITYRELHENVCRLANVLKKHGVKKGDRVTIYLPMIPEAAYAMLACARIGAVHSVVFAGFSPEALAGRIVDCESTFVITADEGVRGGKPVPLKENTDTAIDIAAKQYVMVNKVLTVRRTGGKVSWGPGRDLWYHQEVASVEPTCDPEPMNAEDPLFILYTSGSTGKPKGVLHTTGGYLVYASMTHQYVFDYHDGDIYWCTADVGWVTGHSYIVYGPLANGATTLMFEGVPNFPDQGRFWEVVDKHHVNIFYTAPTAIRALMGAGDEFVTRSSRSTLRLLGSVGEPINPEAWEWYYNVVGDQRSPIVDTWWQTETGGILITPLPGATDLKPGSATRPFFGIKPELVDNEGAVIEGAVDGNLCIIDSWPGQMRTLYGDHKRFIEAYFSTYKGKYFTGDGCRRDEDGYYWITGRVDDVLNISGHRLGTAEIESALVSHHSVSEAAVVGYPHPIKGQGIYCYVTLMTGEAVQDEDALRKELTQHVRKEIGPIATPDKIQFSPGLPKTRSGKIMRRILRKIAEDEFGALGDTSTLADPGVVDDLIENRQNKK

SEQ ID NO: 151284 - DNA, 1944 bp, Parvibaculum lavamentivorans DS-1
  CDS (1)..(1944): transl_table=11
atgtccgatgaaatttttcccgttcccgccgaatggaagaagcgcgccatcgtggatgcggagaaataccgccacatgtatgaggcaagcatcaacgacccggaaagcttctggcggcgcgagggactgcgcatcgactggatgaagccctatacgaagatcaaggacacgagcttcgacccgcataatgtctcgatcaaatggttcgaggacgggacgctcaacgcaagcgtgaactgcatcgaccggcacctcgaacgccgcgccggccaggtggcgatcatctgggaaggcgacgatccctccatcgaccggaagatcacctatcgcgagcttcacgacgaggtctgccgcttcgccaatgtgcttaaagcacgcggcgtgaagaagggcgaccgcgtcacgatctacatgccgatgatcccggaagcggcctatgcgatgctcgcctgcgcgcggatcggcgcggtgcattcggtggtctttggcggcttctcgccggacagcctggcggggcgcattgtggactgcgcttccagctgcgtcatcacggcggatgaaggcgtgcgcggcggaaggaaaattccgctgaaagccaataccgacgaggcgctgaagaaatgccccggcgtcaaaagcgtgatcgtcgtgaagcataccggcggcgccgtcgccatggagaaaggacgcgacgtctggtacgcagaagaagcggcgaaggtttccgccacctgcgcgccggaagagatgaacgcggaagacccgctttttattctgtatacgtccggttcgaccggaaagccaaaaggcgtgctgcacacgaccggcggctacatggtctatgcgtcgatgacgcatcaatatgtcttcgactatcacgacggcgacatttactggtgcacggcggatgtcggctgggtgacgggccacagctacatcctctacgggccgctggcgaacggcgcgacgacgctgatgttcgagggcgtgccgaactatcccgacgcctcgcgctgctggcaggtgatcgacaagcatgaagtgaatattttctacaccgcgccgaccgcccttcgtgcattgatgcgcgaaggcgaggagccggtgaagaagacgagccgcaaatcgctgcggctcctcggctccgtcggcgaaccgatcaacccggaagcctggctctggtatcaccgcgtggtgggcgacgggcgctgcccgatcgtcgatacatggtggcagacggaaaccggcggcatattgatctcgccgctgcccggcgccatcgcgacgaagccgggctcggcaacgaagcctttcttcggcgtgcagccggtgatcgtggacgcggaaggaaacgtgcaggaaggcgcgacgaccggcaatctctgcatcgacgatagctggcccggccagatgcgcaccgtctatggcgatcatcagcgcttcgtcgaaacctatttcatccagtatcccggccgctacttcaccggcgatggctgccgccgcgacgaggacggctattactggatcaccggccgcgtcgacgacgtgctgaacgtctcgggccatcgcatgggaacggcggaagtcgaaagcgcgctggtcgcgcatccgaaagtcgcggaagccgccgtggtcggctatccgcacgacatcaagggccagggcatctatgcctatgtgacgctgatcgcgggcgaggcggcgacggaagagttgcggaaggaactggtgacctgggtgcggaaagagatcggcccgatcgcctcgccggacctcatccagttcgcgcccggcctgccgaaaacgcgctccggcaagatcatgcgccgcatcttgcgcaagatcgccgaggacgacttctccaatctcggcgacacctcgacactggccgacccctccgtcgtcaccgacctcgtggacaaccggcagaacaaggcggggtag

SEQ ID NO: 151285 - protein, 647 aa, Parvibaculum lavamentivorans DS-1
MSDEIFPVPAEWKKRAIVDAEKYRHMYEASINDPESFWRREGLRIDWMKPYTKIKDTSFDPHNVSIKWFEDGTLNASVNCIDRHLERRAGQVAIIWEGDDPSIDRKITYRELHDEVCRFANVLKARGVKKGDRVTIYMPMIPEAAYAMLACARIGAVHSVVFGGFSPDSLAGRIVDCASSCVITADEGVRGGRKIPLKANTDEALKKCPGVKSVIVVKHTGGAVAMEKGRDVWYAEEAAKVSATCAPEEMNAEDPLFILYTSGSTGKPKGVLHTTGGYMVYASMTHQYVFDYHDGDIYWCTADVGWVTGHSYILYGPLANGATTLMFEGVPNYPDASRCWQVIDKHEVNIFYTAPTALRALMREGEEPVKKTSRKSLRLLGSVGEPINPEAWLWYHRVVGDGRCPIVDTWWQTETGGILISPLPGAIATKPGSATKPFFGVQPVIVDAEGNVQEGATTGNLCIDDSWPGQMRTVYGDHQRFVETYFIQYPGRYFTGDGCRRDEDGYYWITGRVDDVLNVSGHRMGTAEVESALVAHPKVAEAAVVGYPHDIKGQGIYAYVTLIAGEAATEELRKELVTWVRKEIGPIASPDLIQFAPGLPKTRSGKIMRRILRKIAEDDFSNLGDTSTLADPSVVTDLVDNRQNKAG

SEQ ID NO: 151286 - DNA, 1956 bp, Xanthobacter autotrophicus Py2; identical to SEQ ID NO: 122098
  CDS (1)..(1956): transl_table=11

SEQ ID NO: 151287 - protein, 651 aa, Xanthobacter autotrophicus Py2; identical to SEQ ID NO: 122099

SEQ ID NO: 151288 - DNA, 1959 bp, Cronobacter sakazakii ATCC BAA-894
  CDS (1)..(1959): transl_table=11
atgagccaaatccataaacaccctattcccgcagcgattgcggaacgttgcctgattacgccggaacaatatgatgcgaaatatcagcaatccgtgcatgaccctgacgccttctggggcgaacaaggcaaaatcctcgactggatcacgccttaccagacggtgaaaaacacctctttcgcgcctggcaatgtctcgattaaatggtatgaagacggcacgctaaatctggcagcaaactgtcttgaccggcacctgagcgagcgcggcgatcagaccgccattatctgggaaggcgatgacgcgacccagagcaaacacatcagctaccgcgaactccaccgcgacgtctgccgttttgcaaacacactgacctctcttggcattaagaaaggcgacgtggtcgctatctatatgccgatggtgccggaagccgccgttgcgatgctcgcctgcgcccgcattggcgcggtgcactcggtcattttcggcggattttcgccggaagccgtcgccggacgcattatcgactccagcgcgcgtctcgttatcaccgcggatgaaggcgtgcgcgctggtcgtgcgattccgctgaagaaaaacgtcgatgacgcgctgaaaaaccccggcgtcaccagcgtggagcatgtggtggtgtttaagcgcaccggcggaaacatcgaatggcatgaaggacgcgatctctggtggagcgagctggtgaagaaagccagcgcgcaccatcagcccgtcgagatgaacgccgaagatccgctgtttattctctacacctccggctcgaccggtaaaccgaaaggcgtgctgcataccacgggcggctatctggtttatgcggccaccacattcctctacgcctttgactaccatcctggcgatatctactggtgcaccgccgatgtgggctgggtgacgggccacagctatctgctctacgggccgctcgcctgcggcgcgaccacgctgatgtttgaaggcgtcccgaactggccttccgctaaccgtatggcgcaggtggtggataaacacaaagtgaatattctctataccgcgccgacagccattcgcgcgctgatggcggaaggcgataaggctatcgacgggactgaccgttcctcactgcgcattctcgggtcggtcggtgagcctatcaacccggaagcgtgggagtggtactggaagaaaatcggtaatgaaaaatgcccggtaatcgacacctggtggcagaccgaaaccggcggcttcatgattacgccgctgccaggcgcgaccgagctaaaagccggttccgccacgcgtccgttcttcggcgtgcagccagcgctggtggataacgaaggcaatccgcaacagggtgcgacggaaggcaatctggtcattaccgactcctggccgggccaggcgcgtacgctgtttggcgatcacgaacgtttcgagcagacctatttctcaacgtttaaaaacatgtacttcagcggcgatggcgcgcgccgtgacgaagacggttactactggataaccgggcgcgtggacgatgtactcaacgtctccgggcaccgtcttggcactgccgagattgaatctgcgctggtctcgcacccgaaaatcgccgaagccgcggtggtgggcattccgcacagcatcaaaggccaggctatctacgcttacgtgacgctgaaccacggcgaagagccgtcagccgagctgtacagcgaagtgcgtaactgggtgcgtaaagagattggcccgctggcgacgccggacgtgctgcactggaccgattcgctgccgaaaacccgctccggcaaaatcatgcgccgtattttgcgcaaaatcgcggcgggcgataccagcaaccttggcgatacctcaacgctcgccgatccgggtgtggtggaaaaactgctcgaagagaagcagtccatcgcgatgccatcataa

SEQ ID NO: 151289 - protein, 652 aa, Cronobacter sakazakii ATCC BAA-894
MSQIHKHPIPAAIAERCLITPEQYDAKYQQSVHDPDAFWGEQGKILDWITPYQTVKNTSFAPGNVSIKWYEDGTLNLAANCLDRHLSERGDQTAIIWEGDDATQSKHISYRELHRDVCRFANTLTSLGIKKGDVVAIYMPMVPEAAVAMLACARIGAVHSVIFGGFSPEAVAGRIIDSSARLVITADEGVRAGRAIPLKKNVDDALKNPGVTSVEHVVVFKRTGGNIEWHEGRDLWWSELVKKASAHHQPVEMNAEDPLFILYTSGSTGKPKGVLHTTGGYLVYAATTFLYAFDYHPGDIYWCTADVGWVTGHSYLLYGPLACGATTLMFEGVPNWPSANRMAQVVDKHKVNILYTAPTAIRALMAEGDKAIDGTDRSSLRILGSVGEPINPEAWEWYWKKIGNEKCPVIDTWWQTETGGFMITPLPGATELKAGSATRPFFGVQPALVDNEGNPQQGATEGNLVITDSWPGQARTLFGDHERFEQTYFSTFKNMYFSGDGARRDEDGYYWITGRVDDVLNVSGHRLGTAEIESALVSHPKIAEAAVVGIPHSIKGQAIYAYVTLNHGEEPSAELYSEVRNWVRKEIGPLATPDVLHWTDSLPKTRSGKIMRRILRKIAAGDTSNLGDTSTLADPGVVEKLLEEKQSIAMPS

SEQ ID NO: 151290 - DNA, 1959 bp, Citrobacter koseri ATCC BAA-895
  CDS (1)..(1959): transl_table=11
atgagccaaatacataaacacgctattcccgcaaacattgcggatcgttgcctgataaacccggagcagtatgaggcgaaatatcaacaatctattaacgagccagataccttttggggtgaacagggaaagattctcgactggattacaccgtataaaaaagtgaagaacacctcctttgcgcccggcaacgtgtcgattaaatggtatgaggatggcacgctgaacctggcggcaaactgccttgaccgccatctgcaagaaaacggcgaccgtaccgccatcatctgggaaggcgatgacgccacccagagcaaacacatttcatatcgcgaattgcatcgcgatgtttgtcgtttcgccaatacgctgctggagctgggcattaagaaaggcgacgtcgtggctatttatatgccgatggtgccggaggcggcggtggcgatgctggcctgcgcgcgcattggcgcggtgcattcggtgatcttcggcggcttctcgccggaagcggttgccgggcgaatcatcgactccagctcacgtctggtgatcaccgccgatgaaggcgtgcgtgccggacgcggcatcccgctgaaaaagaacgtcgatgatgcgctgaaaaacccgaatgtgaacagcgttgaacatgtggtggttttaaaacgtactggcgggaaagtcgactggcatgaaggccgcgatctgtggtggagcgacgtgattgagaaatccagcgctgaccatcagccggaagagatgaatgcggaagacccactgtttatcctctacacctccggttcaaccggcaagccaaaaggcgtgctgcataccaccggcggctatctggtctatgccgccaccacctttaagtatgtctttgactatcacccggacgatatctactggtgcaccgcagacgtaggttgggtgaccgggcacagctacctgctgtatgggccgctggcctgcggcgcaaccaccctgatgtttgaaggcgtgccaaactggccgacgcctgcgcggatggcgcaggtggtggataagcaccaggttactattctctacaccgccccaaccgctattcgcgctctgatggcggaaggcgataaggcgattgaaggcaccgatcgctcttcgctgcgcatcctcggttccgtcggcgaaccaatcaacccggaagcgtgggaatggtactggaagaagatcggtaacgaaaaatgcccggtagtggacacctggtggcagaccgaaaccggcggattcatgatcacgccgctgcccggcgcgactgaactgaaagccggttccgccacgcgtccgttctttggcgtgcagcccgcgctggtggataacgaaggccacccgcaggaaggggcgaccgaaggcaatctggtgattaccgactcctggccgggtcaggcgcgtaccctgttcggcgatcacgagcgttttgagcagacctacttctctaccttcaaaaacatgtatttcagcggcgacggcgcgcgtcgtgacgaagatggttactactggatcaccgggcgcgtcgatgacgtactgaacgtttccggccatcgtctgggcacggcggagattgaatccgcgctggtgtcgcatccgaagattgccgaagccgcagtggtcggtattccgcacaacatcaaaggccaggccatctacgcctatgtcacgctgaatcacggcgaagatccgtcgccggagctgtataccgaagtacgcaactgggtacgtaaagaaattggcccgctggcaacaccggacgtgctgcactggacagactcactgccgaaaacgcgttccggcaaaatcatgcgccgtattttgcgcaaaatcgcagcgggcgataccagcaatctgggcgatacctcaaccctcgccgatcctggcgtggtcgagaaactgctcgaagagaagcaggccatcgcaatgccttcataa

SEQ ID NO: 151291 - protein, 652 aa, Citrobacter koseri ATCC BAA-895
MSQIHKHAIPANIADRCLINPEQYEAKYQQSINEPDTFWGEQGKILDWITPYKKVKNTSFAPGNVSIKWYEDGTLNLAANCLDRHLQENGDRTAIIWEGDDATQSKHISYRELHRDVCRFANTLLELGIKKGDVVAIYMPMVPEAAVAMLACARIGAVHSVIFGGFSPEAVAGRIIDSSSRLVITADEGVRAGRGIPLKKNVDDALKNPNVNSVEHVVVLKRTGGKVDWHEGRDLWWSDVIEKSSADHQPEEMNAEDPLFILYTSGSTGKPKGVLHTTGGYLVYAATTFKYVFDYHPDDIYWCTADVGWVTGHSYLLYGPLACGATTLMFEGVPNWPTPARMAQVVDKHQVTILYTAPTAIRALMAEGDKAIEGTDRSSLRILGSVGEPINPEAWEWYWKKIGNEKCPVVDTWWQTETGGFMITPLPGATELKAGSATRPFFGVQPALVDNEGHPQEGATEGNLVITDSWPGQARTLFGDHERFEQTYFSTFKNMYFSGDGARRDEDGYYWITGRVDDVLNVSGHRLGTAEIESALVSHPKIAEAAVVGIPHNIKGQAIYAYVTLNHGEDPSPELYTEVRNWVRKEIGPLATPDVLHWTDSLPKTRSGKIMRRILRKIAAGDTSNLGDTSTLADPGVVEKLLEEKQAIAMPS

SEQ ID NO: 151292 - DNA, 1959 bp, Escherichia coli HS
  CDS (1)..(1959): transl_table=11
atgagccaaattcacaaacacaccattcctgccaacatcgcagaccgttgcctgataaaccctcagcagtacgaggcgatgtatcaacaatctattaacgcacctgataccttctggggcgaacagggaaaaattcttgactggatcaaaccttaccagaaggtgaaaaacacctcctttgccccaggtaatgtgtccattaaatggtacgaggacggcacgctgaatctggcggcaaactgccttgaccgccatctgcaagaaaacggcgatcgtaccgccatcatctgggaaggcgacgacgccagccagagcaaacatatcagctataaagagctgcaccgcgacgtctgccgcttcgccaataccctgctcgagctgggcattaaaaaaggtgatgtggtggcgatttatatgccgatggtgccggaagccgcggttgcgatgctggcctgcgcccgtattggcgcggtgcattcggtgattttcggcggcttctcgccggaagccgttgccgggcgcattattgattccaactcacgactggtgatcacttccgacgaaggtgtgcgtgccgggcgcagtattccgctgaagaaaaacgttgatgacgcgctgaaaaacccgaacgtcaccagcgtagagcatgtggtggtactgaagcgtactggcgggaaaattgactggcaggaagggcgcgacctgtggtggcacgacctggttgagcaagcgagcgatcagcaccaggcggaagagatgaacgccgaagatccgctgtttattctctacacctccggttctaccggtaagccaaaaggtgtgctgcatactaccggcggttatctggtgtacgcggcgctgacctttaaatatgtctttgattatcatccgggtgatatctactggtgcaccgccgatgtgggctgggtgaccggacacagttacttgctgtacggcccgctggcctgcggtgcgaccacgctgatgtttgaaggcgtacccaactggccgacgcctgcccgtatggcgcaggtggtggacaagcatcaggtcaatattctctataccgcacccacggcgatccgcgcgctgatggcggaaggcgataaagcgatcgagggtaccgaccgttcgtcgctgcgcattctcggttccgtgggcgagccaattaacccagaagcgtgggagtggtactggaaaaaaatcggcaacgagaaatgtccggtggtcgatacctggtggcagaccgaaactggcggtttcatgatcacgccgctgcctggcgctaccgagctgaaagccggttcggcaacacgtccgttcttcggcgtgcaaccggcgctggtcgataacgaaggtaacccgctggaaggcgctaccgaaggcagcctggtgatcaccgactcctggccgggtcaggcgcgtacgctgtttggcgatcacgaacgttttgaacagacctacttctccaccttcaaaaatatgtatttcagcggcgacggcgcgcgtcgcgatgaagatggctattactggatcaccgggcgtgtggacgacgtgctgaacgtctccggtcaccgtctggggacggcagagattgagtcggcgctggtggcgcatccgaagattgccgaagccgccgtagtaggtattccgcacaatattaaaggtcaggcgatctacgcctacgtcacgcttaatcacggggaggaaccgtcaccagaactgtacgcagaagtccgcaactgggtgcgtaaagagattggcccgctggcgacgccagacgtgctgcactggaccgactccctgcctaaaacccgttccggcaaaattatgcgccgtattctgcgcaaaattgcggcgggcgataccagcaacctgggcgatacctcgacgcttgccgatcctggcgttgtcgagaagctgcttgaagagaagcaggctatcgcgatgccatcgtaa

SEQ ID NO: 151293 - protein, 652 aa, Escherichia coli HS
MSQIHKHTIPANIADRCLINPQQYEAMYQQSINAPDTFWGEQGKILDWIKPYQKVKNTSFAPGNVSIKWYEDGTLNLAANCLDRHLQENGDRTAIIWEGDDASQSKHISYKELHRDVCRFANTLLELGIKKGDVVAIYMPMVPEAAVAMLACARIGAVHSVIFGGFSPEAVAGRIIDSNSRLVITSDEGVRAGRSIPLKKNVDDALKNPNVTSVEHVVVLKRTGGKIDWQEGRDLWWHDLVEQASDQHQAEEMNAEDPLFILYTSGSTGKPKGVLHTTGGYLVYAALTFKYVFDYHPGDIYWCTADVGWVTGHSYLLYGPLACGATTLMFEGVPNWPTPARMAQVVDKHQVNILYTAPTAIRALMAEGDKAIEGTDRSSLRILGSVGEPINPEAWEWYWKKIGNEKCPVVDTWWQTETGGFMITPLPGATELKAGSATRPFFGVQPALVDNEGNPLEGATEGSLVITDSWPGQARTLFGDHERFEQTYFSTFKNMYFSGDGARRDEDGYYWITGRVDDVLNVSGHRLGTAEIESALVAHPKIAEAAVVGIPHNIKGQAIYAYVTLNHGEEPSPELYAEVRNWVRKEIGPLATPDVLHWTDSLPKTRSGKIMRRILRKIAAGDTSNLGDTSTLADPGVVEKLLEEKQAIAMPS

SEQ ID NO: 151294 - DNA, 1959 bp, Serratia proteamaculans 568
  CDS (1)..(1959): transl_table=11
atgagccaagtgcataaacacgctattccttctgcaattgcagaacacgccctgattaatccgacgcaatatcaacaatattatcaacagtctgtgcaagacccggaaacgttttggggcgagcagggaaaaatcctggactggataaaaccttatagccgggtgaaaaacacctcgttcgatccaggccatatcagcattcgctggtttgaagacggcacccttaacctggcggccaactgcctcgatcgccacttggccgaacgcggcgaccaaaccgccattatctgggaaggtgacgatcccacccagtcaaaacaggtgacctacaaacaactgcaccacgatgtctgccaattcgccaacgtgctgaaaaagctgggcgtcaagaaaggcgacgtcgtggcgatctatatgcccatggtgccggaagccgctgtcgccatgctggcctgcgcccgtatcggggccgtgcattcggtgatctttggtggtttctcgccggaagccgtagccggacgtattatcgattccaactctaaactggttatcaccgccgacgaaggcctgcgcgccgggcgtgccgttccgctgaagaaaaacgtcgatgacgcgctgaaaaatccaggcgtgaaaagcatcaccaacgtggtggtattccagcgtaccggcaaaccgggttactggcaggaaggccgcgatctgtggtggcatgaactgactgcgggggtttccgccgactgcccaccagaagagatgaatgcggaagacccgctgtttatcctttatacctccggctcgaccggtaaacccaagggcgtgctgcacaccaccggcggttatctggtgtatgccgccatgacctttaaatacgtattcgattaccacgacggcgacgtgtactggtgtaccgccgacgtcggttgggtcaccggccatagctatctgctgtacggcccgctggcctgcggtgccattaccctgatgtttgaaggggtgccgaactaccctggcgttaaccgtctgtcacaggtgatcgacaagcaccaggtcaatatcctgtataccgcccctactgccattcgtgccctgatggccgaaggtgacaaggcgatcgaaggcaccaaacgcgattcgctgcgcatcatgggctcggtcggcgagccgatcaacccggaagcctgggagtggtattacaataaaatcggcaacgccaaatgcccgatcgtcgacacctggtggcagaccgaaaccggcggctttatgatcactccgctgcccggtgccaccgagttgaaagccggttccgctacgcggccgttcttcggtgttcaaccggcactggtcgataatatcggcactgtgcaggagggcgcctgtgaaggcaacctggtgatcaccgactcctggccaggccaggctcgcacgttgttcggtgaccacgatcgtttcgaacaaacctacttctccacctttaagggcatgtatttcagcggtgacggcgcacgccgtgatgaagacggatactactggatcactggccgtgtcgatgacgtgcttaacgtctccggtcaccgtctgggcaccgccgagattgagtcggccctggtttcccacccgaaaatcgccgaagcggcggtggtcggcatccctcataacatcaagggccaggcgatttacgcctatatcacactgaaccacggtgaagaaccgacgcctgagctatataccgaagtacgtaactgggtacgtaaagaaataggaccgatcgccacgccggacgtgctgcactggacagactccctgccaaaaacgcgttccggcaagatcatgcgtcgcatcctgcggaaaattgccgccggtgataccagcaatttgggagatacctcaacgctggcggatccggccgtagtcgacaagctgttggaagaaaaacaatcaatgaaagttccgtcgtaa

SEQ ID NO: 151295 - protein, 652 aa, Serratia proteamaculans 568
MSQVHKHAIPSAIAEHALINPTQYQQYYQQSVQDPETFWGEQGKILDWIKPYSRVKNTSFDPGHISIRWFEDGTLNLAANCLDRHLAERGDQTAIIWEGDDPTQSKQVTYKQLHHDVCQFANVLKKLGVKKGDVVAIYMPMVPEAAVAMLACARIGAVHSVIFGGFSPEAVAGRIIDSNSKLVITADEGLRAGRAVPLKKNVDDALKNPGVKSITNVVVFQRTGKPGYWQEGRDLWWHELTAGVSADCPPEEMNAEDPLFILYTSGSTGKPKGVLHTTGGYLVYAAMTFKYVFDYHDGDVYWCTADVGWVTGHSYLLYGPLACGAITLMFEGVPNYPGVNRLSQVIDKHQVNILYTAPTAIRALMAEGDKAIEGTKRDSLRIMGSVGEPINPEAWEWYYNKIGNAKCPIVDTWWQTETGGFMITPLPGATELKAGSATRPFFGVQPALVDNIGTVQEGACEGNLVITDSWPGQARTLFGDHDRFEQTYFSTFKGMYFSGDGARRDEDGYYWITGRVDDVLNVSGHRLGTAEIESALVSHPKIAEAAVVGIPHNIKGQAIYAYITLNHGEEPTPELYTEVRNWVRKEIGPIATPDVLHWTDSLPKTRSGKIMRRILRKIAAGDTSNLGDTSTLADPAVVDKLLEEKQSMKVPS

SEQ ID NO: 151296 - DNA, 2007 bp, Azorhizobium caulinodans ORS 571
  CDS (1)..(2007): transl_table=11
atgaggaaacaagcgggcttcagcgtccgcgaaccgggaggcaagacggtgtccgagcagaattatttccacgtgccggccgaatgggcctcgcgggcctttgtggacaaggcgggttacgaggccatgtacaaggcctccgtcgaaaatccggaggccttctgggccgagcagggcaagcgcatcgactggttcgagccctacacgaaggtgaagaacacctcgttcatccccggcgccgtctctatcaaatggttcgaggatggcgtcaccaacatcgcccataattgcgtggaccggcatctggagaagcgcggcgatcaggtggcgatcatctgggagggcgatagcccgaccgagagccgcaagatcacctatcgcgagcttgcctccgaggtgaacaagttcgccaacgtgctgcgcaaccgcgatgtgcagaagggcgaccgcgtcaccatctatctgcccatgatccccgaggcggcgttcgcgatgctcgcctgcgcgcgccttggagccgtgcattccatcgtcttcgccggcttctcgccggacagcctcgcgggccgcatttccgactgcggctccaaggtggtgatcaccgccgacgagggcctgcgtggcggccgcaaggtgccgctgaaggccaatgtggacgccgccatcgagcgcctgcccgagccggtggaccatgtgatcgtcgtgcgccgcacgggcgcgaccgtcgccatggagccgggccgcgacgtctggtaccacgaggccgccgagatggtgaccgacgagtgcccggccgagccgatgaatgcggaagatccgctgttcatcctctacacctccggctccaccggaaagccaaagggcgtcctgcacaccaccggcggctatctcgtctatgccgccatgacgcaccagtatgtcttcgattatcacgagggcgacatctactggtgcacggccgacgtgggatgggtgaccggccactcctacatcgtctacggcccgctcgcgaacggcgccacgacgctgatgttcgagggcgtgcccaattatccgtcgaacgcccgcttctgggaggtgatcgacaagcatcaggtcaacatcttctacaccgcccccaccgccatccgcgcgctgatgcaggcgggcgaggatccggtgaagaagaccagccgcgcctcgctgcgcctgctcggctcggtgggcgagcccatcaatccggaagcctggcactggtatcaccgcgtggtgggcgagggccgctgccccatcgtggacacctggtggcagacggagaccggaggcatcctcatcaccccgctgccgggtgcgaccgctctgaagccgggctccgccacgcgccccttcttcggcatcgtgccgcagctggtggatgcggagggccgcgtgctggacggcgcggcggaaggcaatcttgtgatcgctgacagctggccgggccagatgcgcacggtctatggcgaccatgagcgcttcgagcagacctatttctccacctatcccggcaagtatttcaccggcgacggctgccgccgcgacgaggacggctattactggatcaccggccgcgtggacgatgtgatcaacgtctcgggccaccgcatgggcacggccgaggtggagagtgcgcttgtcgcccaccccaaggtctcggaagcagcggtggtggggttcccgcacgacatcaagggccagggcatctatgcctatgtcaccctcatggcgggcgagaacccgtccgaggaactccgcaaggagctggtggcctgggtgcgcaaggagatcggaccgatcgcctcgccggacctcatccagttcgcgcccggcctgcccaagacgcgctcgggcaagatcatgcgccggatcctgcgcaagatcgccgaggatcagttcgagaatctgggcgacacctccacgctcgccgatcctggcgtggtggaggatctggtcagcaatcgccagaacaagcgcgaggcggcggcctga

SEQ ID NO: 151297 - protein, 668 aa, Azorhizobium caulinodans ORS 571
MRKQAGFSVREPGGKTVSEQNYFHVPAEWASRAFVDKAGYEAMYKASVENPEAFWAEQGKRIDWFEPYTKVKNTSFIPGAVSIKWFEDGVTNIAHNCVDRHLEKRGDQVAIIWEGDSPTESRKITYRELASEVNKFANVLRNRDVQKGDRVTIYLPMIPEAAFAMLACARLGAVHSIVFAGFSPDSLAGRISDCGSKVVITADEGLRGGRKVPLKANVDAAIERLPEPVDHVIVVRRTGATVAMEPGRDVWYHEAAEMVTDECPAEPMNAEDPLFILYTSGSTGKPKGVLHTTGGYLVYAAMTHQYVFDYHEGDIYWCTADVGWVTGHSYIVYGPLANGATTLMFEGVPNYPSNARFWEVIDKHQVNIFYTAPTAIRALMQAGEDPVKKTSRASLRLLGSVGEPINPEAWHWYHRVVGEGRCPIVDTWWQTETGGILITPLPGATALKPGSATRPFFGIVPQLVDAEGRVLDGAAEGNLVIADSWPGQMRTVYGDHERFEQTYFSTYPGKYFTGDGCRRDEDGYYWITGRVDDVINVSGHRMGTAEVESALVAHPKVSEAAVVGFPHDIKGQGIYAYVTLMAGENPSEELRKELVAWVRKEIGPIASPDLIQFAPGLPKTRSGKIMRRILRKIAEDQFENLGDTSTLADPGVVEDLVSNRQNKREAAA

SEQ ID NO: 151298 - DNA, 1956 bp, Brucella canis ATCC 23365
  CDS (1)..(1956): transl_table=11
atgtcggaaaagctttaccccgtgctgccggaggcaaagaaaaacacgctcatcgacaacgagacttatctcgaatggtatgaggagagcgtgagcgacccggatggcttctgggccaagcacggccggcgtatcgactggttcaagcctttcaccaaggtcaagaacaccgatttcaacggcgatgtaacgatcaagtggtatgaggatggcgtcaccaacgtctcatataattgcatcgaccgccatctgaagagccgcggcgacaaggtcgccatcatctgggaaggcgacaacccctatatcgacaagaagatcacctatcgcgagctttacgagaatgtctgccgcatggcgaatgtgctcaagaagcatggggtgaagaagggcgaccgcgtcacgatctatctgccgatgatcccggaagccgcctatgccatgctcgcctgcgcgcgcatcggcgccgtgcattcggtcgtctttgccggtttctcgccggaggcgctcgctggccgcatcgttgactgcgaatccactttcgtcatcaccgccgatgaaggtgtgcgcggcggcaagcctgttgcgctgaaggaaaacaccgataccgccatcgacatcgccgccaagcaatatgtgatggtcaacaaggtgctggtcgtgcgccgcaccggcggcaaggtaagctggggccgcggccgcgatctgtggtaccatcaggaagtcgcaagcgtcgaaccgcattgcgaaccggaaccgatgaatgcggaagacccgcttttcattctctacacatccggttccaccggcaagccgaagggtgtgctgcataccaccggcggctacctcgtctatgcctcgatgacgcatcaatatgtcttcgattaccatgatggcgagatctactggtgcacggcggatgtgggttgggtaacgggccactcctatatcgtctacggaccgctggccaatggcgcgacaacgctgatgtttgaaggcgtgcccaacttccccgatcagggccgtttctgggaagtcgtcgacaagcaccatgtcaatatcttctacaccgcgccaaccgcgctgcgcgcgcttatgggcgcgggcgatgaattcgtaacccgctcatcgcgttcgacgctgcgcctgctgggctcggtcggcgagccgatcaatccagaggcctgggagtggtattacaatgtcgtgggcgaccagaaatgccccatcgtcgatacctggtggcagacggaaaatggcggcatcctcatcaccccacttcccggcgcgaccgatttgaaacccggttcggcaacacgcccgttcttcggcgtcaagccggtgctggtggacaatgaaggcaatgtgcaggagggcgtagccgacggcaacctgtgcatctccgactcctggccgggccagatgcgcaccgtctatggcgaccacaagcgtttcatcgaaacctacttctccacctataaggggatgtatttttcgggcgatggctgccgccgcgacgaggacggctattactggatcaccggccgcgtcgatgacgtgctgaatatttccggccatcgcctcggcacggcggaaatcgaatcggcacttgtctcgcatcactcggtttcggaagccgccgtggtcggctatccgcacccgatcaagggacagggcatctattgctatgtcacgctgatgaccggcgcagacgcgcaggacccggacgagttgcgcaaggaactggtccagcatgtgcgcaaggaaatcggccccatcgccacaccggacaagatccagtttgcgcccggactgccgaaaacccgttccggcaagatcatgcgccgcatcctgcgcaagatcgccgaagacgagttcggcgcattgggcgacacctcaacgctcgccgatccgggcgtggtggacgacctgatcgaaaatcgccagaacaagaaatga

SEQ ID NO: 151299 - protein, 651 aa, Brucella canis ATCC 23365; identical to SEQ ID NO: 122169

SEQ ID NO: 151300 - DNA, 1944 bp, Bartonella tribocorum CIP 105476
  CDS (1)..(1944): transl_table=11
atgactgaaaaaatttatccgatatcagaagagatcaaaaaaaatactttgctcgatgaggaaacttatcaaaaatggtatcgagaaagcatcaatgatccagaaagcttctgggcaaaacatggtcaatgtattgaatggtttaaaccctttacaaaagtaaaaaacacttcttttaacgatggtgtatcaattcaatggtacgaggatgggataacaaatgtagcctataattgcattgatcgtcatctgaaaacccatggcgatcaaattgcgctcatttgggaaggggataatccttatcatgataaaaaaataacctataacgaactttatgaacatgtttgtcgttttgccaatcttttaaaaaaccacggtgtcaaaaaaggcgataaagtaaccatttatcttcctatgattcccgaagcagcctatgccatgctcgcttgtgcccgcattggtgctgttcattcggttatttttgcaggcttttctgctgaagccatagcaggacgcattgttgactgtgaatcgaccttcatcattactgctgatcacggcttgcggggtggcaaacgaattaacttaaaagacaatgttgaccatgctattgaaatagccgcccgccaaaatgtgcgtgtcgatcaagttatggttatacggcggacttgcggaccaattgattggatagaggggcgtgatttttggtaccacgaagaaatcactcatgcaaaaacaaactgtccagcagaaccaatgaatgctgaagatccgctttttattctttatacttcaggctcaaccggcaaacccaaaggtgttttgcatagcacagggggctatcttgtttatgccgcaataacccacaaatatgtttttgattatcaccctggtgaaatttactggtgtacagctgatattggttggattacggggcattcttacttggtttatggtcctttatgcaacggagccaccactttaatgtttgaaggcacaccaacctttcctgataagggaagattttgggaaattgtcgacaaacacaaagtcaatacgctctatacagcaccaacagctatccgcgccttaatgggtgcgggaaattcatttgttgaacactcaaaaagaacatccttacgtcttttaggaaccgtaggtgaacccattaatccagaagcatgggaatggttttatcacaccgttggaaatgaccgttgtccgattctcgatacatggtggcaaacagaaacagggggacatatgatcacccccctccccggtgccacgccccttaaagcaggctccgccacacgtcccttttttggggttcaactgcaaatcatagacgagcaaggaaatattctggaaggagaagcagaaggcaatctttgtattattgactcatggccaggacaaatgcgcacgctctataaggatcacgagcgctttatcgaaacctatttttccacctataaagggaaatattttacaggtgatggctgtagacgcgatagtgatggctattattggattacagggcgcgttgatgacattctcaatgtctcaggacacagacttggaacagcagaaattgaatctgcccttgttttgcaccctgctgtttctgaagccgctgttgttggttaccctcaccccattaaaggacagggggtctacagttttgtcaccctcatggaaggaacagcgccaagtgaagaattgcaaaaagaccttatcaagcatgtcagaaaggaaataggttccattgctatattggataaaattcagtttgctccgcagcttcccaaaacgcgatcaggaaaaattatgagacgtattttacgaaaaatcgctgaaaataatttcgataatttaggagatatttcaacccttgccgaaccacaagttgttgaagatctaattgccaaccgacaaaattaa

SEQ ID NO: 151301 - protein, 647 aa, Bartonella tribocorum CIP 105476
MTEKIYPISEEIKKNTLLDEETYQKWYRESINDPESFWAKHGQCIEWFKPFTKVKNTSFNDGVSIQWYEDGITNVAYNCIDRHLKTHGDQIALIWEGDNPYHDKKITYNELYEHVCRFANLLKNHGVKKGDKVTIYLPMIPEAAYAMLACARIGAVHSVIFAGFSAEAIAGRIVDCESTFIITADHGLRGGKRINLKDNVDHAIEIAARQNVRVDQVMVIRRTCGPIDWIEGRDFWYHEEITHAKTNCPAEPMNAEDPLFILYTSGSTGKPKGVLHSTGGYLVYAAITHKYVFDYHPGEIYWCTADIGWITGHSYLVYGPLCNGATTLMFEGTPTFPDKGRFWEIVDKHKVNTLYTAPTAIRALMGAGNSFVEHSKRTSLRLLGTVGEPINPEAWEWFYHTVGNDRCPILDTWWQTETGGHMITPLPGATPLKAGSATRPFFGVQLQIIDEQGNILEGEAEGNLCIIDSWPGQMRTLYKDHERFIETYFSTYKGKYFTGDGCRRDSDGYYWITGRVDDILNVSGHRLGTAEIESALVLHPAVSEAAVVGYPHPIKGQGVYSFVTLMEGTAPSEELQKDLIKHVRKEIGSIAILDKIQFAPQLPKTRSGKIMRRILRKIAENNFDNLGDISTLAEPQVVEDLIANRQN

SEQ ID NO: 151302 - DNA, 1956 bp, Brucella suis ATCC 23445
  CDS (1)..(1956): transl_table=11
atgtcggaaaagctttaccccgtgctgccggaggcaaagaaaaacacgctcatcgacaacgagacttatctcgaatggtatgaggagagcatgagcgacccggatggcttctgggccaagcacggccggcgtatcgactggttcaagcctttcaccaaggtcaagaacaccgatttcaacggcgatgtaacgatcaagtggtatgaggatggcgtcaccaacgtctcatataattgcatcgaccgccatctgaagagccgcggcgacaaggtcgccatcatctgggaaggcgacaacccctatatcgacaagaagatcacctatcgcgagctttacgagaatgtctgccgcatggcgaatgtgctcaagaagcatggggtgaagaagggcgaccgcgtcacgatctatctgccgatgatcccggaagccgcctatgccatgctcgcctgcgcgcgcatcggcgccgtgcattcggtcgtctttgccggtttctcgccggaggcgctcgctggccgcatcgttgactgcgaatccactttcgtcatcaccgccgatgaaggtgtgcgcggcggcaagcctgttgcgctgaaggaaaacaccgataccgccatcgacatcgccgccaagcaatatgtgatggtcaacaaggtgctggtcgtgcgccgcaccggcggcaaggtaagctggggccgcggccgcgatctgtggtaccatcaggaagtcgcaagcgtcgaaccgcattgcgaaccggaaccgatgaatgcggaagacccgcttttcattctctacacatccggttccaccggcaagccgaagggtgtgctgcataccaccggcggctacctcgtctatgcctcgatgacgcatcaatatgtcttcgattaccatgatggcgagatctactggtgcacggcggatgtgggttgggtaacgggccactcctatatcgtctacggaccgctggccaatggcgcgacaacgctgatgtttgaaggcgtgcccaacttccccgatcagggccgtttctgggaagtcgtcgacaagcaccatgtcaatatcttctacaccgcgccaaccgcgctgcgcgcgcttatgggcgcgggcgatgaattcgtaacccgctcatcgcgttcgacgctgcgcctgctgggctcggtcggcgagccgatcaatccagaggcctgggagtggtattacaatgtcgtgggcgaccagaaatgccccatcgtcgatacctggtggcagacggaaaatggcggcatcctcatcaccccacttcccggcgcgaccgatttgaaacccggttcggcaacacgcccgttcttcggcgtcaagccggtgctggtggacaatgaaggcaatgtgcaggagggcgtagccgacggcaacctgtgcatctccgactcctggccgggccagatgcgcaccgtctatggcgaccacaagcgtttcatcgaaacctacttctccacctataaggggatgtatttttcgggcgatggctgccgccgcgacgaggacggctattactggatcaccggccgcgtcgatgacgtgctgaatatttccggccatcgcctcggcacggcggaaatcgaatcggcacttgtctcgcatcactcggtttcggaagccgccgtggtcggctatccgcacccgatcaagggacagggcatctattgctatgtcacgctgatgaccggcgcagacgcgcaggacccggacgagttgcgcaaggaactggtccagcatgtgcgcaaggaaatcggccccatcgccacaccggacaagatccagtttgcgcccggactgccgaaaacccgttccggcaagatcatgcgccgcatcctgcgcaagatcgccgaagacgagttcggcgcattgggcgacacctcaacgctcgccgatccgggcgtggtggacgacctgatcgaaaatcgccagaacaagaaatga

SEQ ID NO: 151303 - protein, 651 aa, Brucella suis ATCC 23445
MSEKLYPVLPEAKKNTLIDNETYLEWYEESMSDPDGFWAKHGRRIDWFKPFTKVKNTDFNGDVTIKWYEDGVTNVSYNCIDRHLKSRGDKVAIIWEGDNPYIDKKITYRELYENVCRMANVLKKHGVKKGDRVTIYLPMIPEAAYAMLACARIGAVHSVVFAGFSPEALAGRIVDCESTFVITADEGVRGGKPVALKENTDTAIDIAAKQYVMVNKVLVVRRTGGKVSWGRGRDLWYHQEVASVEPHCEPEPMNAEDPLFILYTSGSTGKPKGVLHTTGGYLVYASMTHQYVFDYHDGEIYWCTADVGWVTGHSYIVYGPLANGATTLMFEGVPNFPDQGRFWEVVDKHHVNIFYTAPTALRALMGAGDEFVTRSSRSTLRLLGSVGEPINPEAWEWYYNVVGDQKCPIVDTWWQTENGGILITPLPGATDLKPGSATRPFFGVKPVLVDNEGNVQEGVADGNLCISDSWPGQMRTVYGDHKRFIETYFSTYKGMYFSGDGCRRDEDGYYWITGRVDDVLNISGHRLGTAEIESALVSHHSVSEAAVVGYPHPIKGQGIYCYVTLMTGADAQDPDELRKELVQHVRKEIGPIATPDKIQFAPGLPKTRSGKIMRRILRKIAEDEFGALGDTSTLADPGVVDDLIENRQNKK

SEQ ID NO: 151304 - DNA, 1980 bp, Bordetella petrii DSM 12804
  CDS (1)..(1980): transl_table=11
atgtccaataccatcgaatccgtcctggtcgaaacgcgcgtgtttccaccgcccgaacgcgccgcacaaggcgcgcgcatcggcagcatggacgcctaccgcgcgctatgccaggaagtcgaacaggatttcgacggcttctggacgcgccaggcgcgcgagaacctgacctggtccaagcccttcacccaggtgctcgacgaatccaacgcgcctttctaccgctggttcggcgacggcgaactcaacgtatcggccaactgcctcgacgttcacctgaacaatggcaacgccgacaagaccgccatcatcttcgagtccgatgacggcaaggtcgacaaggtcacctaccgcgaattgctggcgcgcgtgtgccgcttcgccaatggcctgaaatcgctgggctacaaaaagggcgatcgcgccatcatctacatgcccatgtccatccaggccgtggtggccatgcaggcctgcgcgcggctgggagtgacgcattcggtggtgttcggcggcttttccgccaagagcctgcaggaacgcatcgtcgacgtgggcgcgtcgctggtcatcaccgccgatgaacaagtgcgcggcggcaagaccatcccgctcaagccggcggtcgaagaagccatcggcatgggcggctgcgacgcggtcaccaagatcgtcgtctacaagcgcaccggcggcaacgtgccctggcaagacggacgcgacctctggatgcacgatgtcgaggccggccagcccgacacctgcgaaccggtgccggtcaacgccgagcatccgctgttcatcctgtacacgtcgggctccaccggcaagcccaagggcgtgcagcattcgtcgggcggctacctgctgtgggcgttgctcacggtgaaatggaccttcgacgcccgccccgacgacgtctactggtgcacggccgacgtgggctgggtcaccggccatacctacatcacctacggcccgctggccgcgggcctgacgcaaatcgtcttcgaaggcgtgcccacctatcccgatgcgggacgcttctgggacatgatcgcgcggcacaaggtcaccacgttctacacggcgcccaccgccatccgctcgctgatcaaggcctccgaagccacgccggccgcgcatccgcgcaactacgacttgaacagtctgcgcatcatcggcacggtgggcgaacccatcaaccccgaggcctgggtctggtaccacaagaacgtcggccaggaacgctgccccatcgtcgatacctggtggcagaccgaaaccggcggccacatgatcaacccgctgcccggcgccacgcccaccaagcccggttcgtgcacgttgccgctgcccggcatcgccgcgaccgtggtcgatgaaaccggggccgaggtcgagcccggcaatggcggcttcctggccatcaagcgtccctggcccgccatgatccgcaccatctggggcgatccggaacgcttcaagaaaagctacttcccgcccgaattgcgcggctactacctggcgggcgacggcgcgcagcgcgacgccgacggctacttctggatcatgggccgcatcgacgacgtgctgaacgtctcgggccaccgcctgggcaccatggaagtcgaatccgcgctggtgtcgcacgaactggtggccgaggccgccgtggtgggccgccccgacgacaccaccggcgaagccgtggtggccttcgtggtgctcaagcgcgcgcgtcccgaaggcgacgaggcccaggccatcgccaaacagttgcgcgactgggttggcaaggaaatcggccccatcgccaagcccaaggacatccgcttcggcgacaacctgcccaagactcgctcgggcaagatcatgcggcgcctgctgcgcgtcgtggccaagggcgagcagatcacgcaagacgtttccacgctcgaaaaccccgccatccttgaccagcttgccaagtcggtctga

SEQ ID NO: 151305 - protein, 659 aa, Bordetella petrii DSM 12804
MSNTIESVLVETRVFPPPERAAQGARIGSMDAYRALCQEVEQDFDGFWTRQARENLTWSKPFTQVLDESNAPFYRWFGDGELNVSANCLDVHLNNGNADKTAIIFESDDGKVDKVTYRELLARVCRFANGLKSLGYKKGDRAIIYMPMSIQAVVAMQACARLGVTHSVVFGGFSAKSLQERIVDVGASLVITADEQVRGGKTIPLKPAVEEAIGMGGCDAVTKIVVYKRTGGNVPWQDGRDLWMHDVEAGQPDTCEPVPVNAEHPLFILYTSGSTGKPKGVQHSSGGYLLWALLTVKWTFDARPDDVYWCTADVGWVTGHTYITYGPLAAGLTQIVFEGVPTYPDAGRFWDMIARHKVTTFYTAPTAIRSLIKASEATPAAHPRNYDLNSLRIIGTVGEPINPEAWVWYHKNVGQERCPIVDTWWQTETGGHMINPLPGATPTKPGSCTLPLPGIAATVVDETGAEVEPGNGGFLAIKRPWPAMIRTIWGDPERFKKSYFPPELRGYYLAGDGAQRDADGYFWIMGRIDDVLNVSGHRLGTMEVESALVSHELVAEAAVVGRPDDTTGEAVVAFVVLKRARPEGDEAQAIAKQLRDWVGKEIGPIAKPKDIRFGDNLPKTRSGKIMRRLLRVVAKGEQITQDVSTLENPAILDQLAKSV

SEQ ID NO: 151306 - DNA, 1950 bp, Methylobacterium extorquens PA1
  CDS (1)..(1950): transl_table=11
atgagcgagaaggtcatcgacgttcaagatgcctggcgggaccgggctctgatcgacgaagccaagtacaaggaaatgtacgaggcctccgtttctggtcctgagacgttctggggcgagcatggcaaacggatcgactggtcgacgccgttcagcaaagtcaagaatacgagctttgcgccgggtgacgtatcgatcaaatggttcgaggacggcaagaccaacgtcgcgctaaactgcattgaccgtcacctcgcgacccgcggcgaccagaccgcgatcatctgggagggcgacgaccccaacgagtcgaagcacatcacctaccggcagttgcacgccgaagtgtgccggatggccaacgtcctgcgcaatcgcggcgtcggcaagggtgatcgcgtcacgctctatcttccgatgatccccgaggccgcctacgccatgctggcctgtgcgcgtctgggcgccatccacgccattgtcttcggcggcttctcgcccgactcgttggcgagccggatcaagggctgcggctcgaaactcgtcatcacggccgacgagggtctgcgcggcgggcgcaaggtgccgctcaaggccaacgtggacgaggcgatcaagcgcctcgacaaggatctcgtggaccacgtgatcgtggtcaagcgcacgggcggcaacgtggcgatggagccgggccgcgacgtctattaccacgaggccgccgagcaggtgaccgacgaatgccccgcggaggccgtcgaggccgagcacccgctcttcatcctctacacctcgggctcgaccggccagccgaagggcgtggtgcacaccaccggcggctacctcgtctacgcttcgatgacccaccaatacgtcttcgactaccacgatggcgacgtctactggtgcacggccgatgtgggctgggtcaccgggcacagctacatcgtctacggtccgctcgcgaacggcgcgaccacgctgatgttcgagggcatccccacctatccgtcgaattcccgcttctgggaggtgatcgacaagcacaacgtcaacatcttctacaccgcgccgaccgcgatccgctcgctcatgggcggcggtgagggcccggtgaagaagacctcgcgccaatccctgcgggtgctgggttcggtcggcgagccgatcaacccggaggcgtgggattggtactaccgcgtcgtcggcgattcccgctgcccgatcgtcgacacgtggtggcagaccgagaccggcggcatcctcatcaccccgctgccgggggcgacgcggctgaagcccggctcggccacgcttccgttcttcggcgtgcagccggtgatggtcgatgccgaggggaagatcctggacggcgcttgcgagggcaacctctgcatcaaggacagctggcctggccagatgcgtacggtctacggcgaccacgagcgcttcgagcagacctacttctcgacctacaaggatctctacttcaccggcgacggagcccggcgcgacgcggacggctattactggatcaccggccgcgtggacgacgtcatcaacgtctcgggccaccgcatgggcacggcggaggtcgaatcctccctcgtcgcccatccgaaggtctcggaagcggcggtcgtcggctatccgcacaacgtgaagggccagggcatctacgcctacgtcactctcaacgagggtgaggagggcacggacgaattgcgcaaggagctggtcacctgggtccgcaaggatatcggcccgatcgcctcgcccgatctgcttcagttcgcgccggggctgcccaaaacccgctccggcaagatcatgcgccgcatcctgcgcaagatcgccgaggacgatttcggctcgctcggcgacacctcgaccctggccgagccggccgtggtcgatgacctgatcgagaaccgccaaaaccgctcggcctga

SEQ ID NO: 151307 - protein, 649 aa, Methylobacterium extorquens PA1
MSEKVIDVQDAWRDRALIDEAKYKEMYEASVSGPETFWGEHGKRIDWSTPFSKVKNTSFAPGDVSIKWFEDGKTNVALNCIDRHLATRGDQTAIIWEGDDPNESKHITYRQLHAEVCRMANVLRNRGVGKGDRVTLYLPMIPEAAYAMLACARLGAIHAIVFGGFSPDSLASRIKGCGSKLVITADEGLRGGRKVPLKANVDEAIKRLDKDLVDHVIVVKRTGGNVAMEPGRDVYYHEAAEQVTDECPAEAVEAEHPLFILYTSGSTGQPKGVVHTTGGYLVYASMTHQYVFDYHDGDVYWCTADVGWVTGHSYIVYGPLANGATTLMFEGIPTYPSNSRFWEVIDKHNVNIFYTAPTAIRSLMGGGEGPVKKTSRQSLRVLGSVGEPINPEAWDWYYRVVGDSRCPIVDTWWQTETGGILITPLPGATRLKPGSATLPFFGVQPVMVDAEGKILDGACEGNLCIKDSWPGQMRTVYGDHERFEQTYFSTYKDLYFTGDGARRDADGYYWITGRVDDVINVSGHRMGTAEVESSLVAHPKVSEAAVVGYPHNVKGQGIYAYVTLNEGEEGTDELRKELVTWVRKDIGPIASPDLLQFAPGLPKTRSGKIMRRILRKIAEDDFGSLGDTSTLAEPAVVDDLIENRQNRSA

SEQ ID NO: 151308 - DNA, 1962 bp, Pseudomonas putida GB-1
  CDS (1)..(1962): transl_table=11
atgagtgcggctccactgtatcccgttcgtcccgaggttgcggccactaccctgaccgacgaggccacctacaaggccatgtaccagcagtcggtgatcaacccggacggcttctggcgcgagcaggcccagcgcatcgactggatcaagccgttcaccaaggtcaagcagacctccttcgacgaccaccatgtcgatatcaaatggttcgccgacggcactctgaacgtttcctccaactgcctggaccgccaccttgaagagcgcggcgaccagttggccatcatctgggaaggcgacgacccttccgaacaccgcaacatcacctaccgcgaactgcacgagcaggtctgcaagttcgccaacgccctgcgcggccaggacgtgcaccggggtgacgtagtcaccatctatatgccaatgatccccgaggctgtggttgccatgctggcctgtgcccgtatcggtgcgattcattcggtggtgtttggcggtttctcgcccgaggcgctggccggccgtatcatcgactgcaagtccaaggtggtgatcaccgccgatgaaggcgtgcgtggcggccgtcgtaccccgctcaaggctaacgtcgacctggcactgaccaaccctgaaaccagcagtgtgcagaaaatcatcgtgtgcaagcgcaccggtggcgacattgcctggcaccaacaccgcgacatctggtacgaagacctgatgaaagtggcctccagccactgcgcgccgaaagagatgggtgccgaagaagcgctgttcatcctttatacctccggctccaccggcaaaccgaagggcgtgctgcacaccaccggcggttacctggtgtacgcggcactgacccatgagcgcgttttcgactaccgcccgggcgaggtgtactggtgcaccgccgacgtcggttgggtcaccggccacagctacatcgtctacggcccgctggccaacggcgccactaccttgctgttcgagggcgtgcctaactacccggacatcacccgcgtgtcgaagatcgtcgacaaacacaaggtcaacatcctctacaccgcgccaactgccatccgcgccatgatggccgaagggcaagcggctgtagagggagcagacggctccagcctgcgccttctgggttcggtgggtgagccgatcaacccagaagcctggaactggtactacaagaccgtaggcaaggagcgttgcccgatcgtcgacacctggtggcagactgaaaccggcggcattttgatcagcccgctgcctggcgccaccggcttgaaaccggggtcggcaacccgtccgttctttggtgtggtgccggcattggtcgataacctgggcaacctgatcgaaggtgccaccgaaggtaacctggtaattctggactcctggccgggccagtcgcgttcgctgtacggcgaccacgaccgcttcgtcgacacctacttcaagaccttccgtggcatgtacttcaccggcgacggtgcgcgccgtgacgaggatggctactactggatcaccggccgtgtggacgacgtgctcaacgtctccggccaccgcatgggcactgccgagatcgaaagtgcgatggtcgcgcatacgaaggttgccgaggccgcagtggttggcgtgccgcacgacatcaaggggcagggcatctatgtctatgtcaccctcaatgccggtatcgaggccagcgagcaattgcgtctggagctgaagaactgggtgcgcaaggaaatcggcccgatcgcttcgccggatgtgatccagtgggcgcctgggttaccgaagactcgctcgggcaagatcatgcgtcggatcctgcgcaagatcgccaccggtgagtacgatgccctgggcgatatctcgaccttggccgaccctggcgtggtgcagcacctgatcgacactcataaggcgatgaacctggcttctgcctga

SEQ ID NO: 151309 - protein, 653 aa, Pseudomonas putida GB-1
MSAAPLYPVRPEVAATTLTDEATYKAMYQQSVINPDGFWREQAQRIDWIKPFTKVKQTSFDDHHVDIKWFADGTLNVSSNCLDRHLEERGDQLAIIWEGDDPSEHRNITYRELHEQVCKFANALRGQDVHRGDVVTIYMPMIPEAVVAMLACARIGAIHSVVFGGFSPEALAGRIIDCKSKVVITADEGVRGGRRTPLKANVDLALTNPETSSVQKIIVCKRTGGDIAWHQHRDIWYEDLMKVASSHCAPKEMGAEEALFILYTSGSTGKPKGVLHTTGGYLVYAALTHERVFDYRPGEVYWCTADVGWVTGHSYIVYGPLANGATTLLFEGVPNYPDITRVSKIVDKHKVNILYTAPTAIRAMMAEGQAAVEGADGSSLRLLGSVGEPINPEAWNWYYKTVGKERCPIVDTWWQTETGGILISPLPGATGLKPGSATRPFFGVVPALVDNLGNLIEGATEGNLVILDSWPGQSRSLYGDHDRFVDTYFKTFRGMYFTGDGARRDEDGYYWITGRVDDVLNVSGHRMGTAEIESAMVAHTKVAEAAVVGVPHDIKGQGIYVYVTLNAGIEASEQLRLELKNWVRKEIGPIASPDVIQWAPGLPKTRSGKIMRRILRKIATGEYDALGDISTLADPGVVQHLIDTHKAMNLASA

SEQ ID NO: 151310 - DNA, 1935 bp, Pseudomonas putida GB-1; identical to SEQ ID NO: 126793
  CDS (1)..(1935): transl_table=11

SEQ ID NO: 151311 - protein, 644 aa, Pseudomonas putida GB-1; identical to SEQ ID NO: 126794

SEQ ID NO: 151312 - DNA, 1944 bp, Francisella philomiragia subsp. philomiragia ATCC 25017
  CDS (1)..(1944): transl_table=11
atgtcatattcaaattttcaagtttcagaagagtttatagctcaagctaatgttaatgccgagcaatatgaagctatgtatcaagaatcaatagaaaatccagaagcattttggtcgaagcaggctaattatattagctggcataaaccttttgataaggcttttgcaagtagctttgatcctgtagatattcaatggttcaaaggtggtgagctaaatgtttgttataactgtgttgacaggcatttagtagacaaggcgaacaaggttgcttttgtatggcaagctgatgacccgtatcacactaagaatattacgtacagagatctctatcatagagtatgtgagatggctaatatacttgaggcaaatggtgtcaaaaaaggagatgtcgtaactatatatatgccaatgataccagaggcaatatatgcgatgcttgcttgtgcgcgtataggagctatgcactcagttgtatttggaggtttctcagcagaagcacttaagcagagaattataaatgcaaatagtaaatttgtaattacggcagatgaaagtattagatcaggaaagagaatacctcttaaaaaaagtgtagatagagcaatctctggtttagacttcgttagaaatgtcctagttgtgagtagaactaagacaaaagatatggtttggaacgacatagatctttgttatgaaaaagagtgtgctaaggtctccgatgagcataagatagaattctttgatgcagaaactccattgtttatgctatatacttcaggctcaactggtactccaaaaggtcttgttcatacctcaggaggctatcttgtttacgcaagtatgactcataaattagcttttgatctaaaagatgatgatgtatattggtgtaccgctgatattggttggattactgggcatagttatgctgtttatggtccgcttgctaatggttgtacctctctaatctttgaaggtgttccaacatacccagatgcttctagaatgtggaaagaagttgatagacataatgtgaaatccctatatacagccccaactttgatcagattattaatcaaagctggagatcagtaccttaaagattcagatagaacttcattaagagtattaggatctgttggagaacctattaatccagaagcatggaactggtttgtagagaagggcgcaaataatcaagcacctcttgttgatacttggtggcaaactgaaactggtggacatatgattctgccattaccaggtgctcataaactaaaaccaggatcggcatctaaacctttctttggtgttgacgtggctttattagatactgatggtaaagagattgaaggggttggcaaaggagctctatgtattagaactgcgactcctggtatggctagaactatttatggtgaccatgatagatatattcaaacatactttagcagtttcaaaggtttctatttctcaggtgatgcagccagaagagatgaagatggttatatatggatagaaggtcgtatggatgatgttattaacgtatcaggccatagaatggcaactgctgaaatagaagctgtattgaatactcattctagcgttgcagaatcagctgtagttggtatgcctcatgatatcaaaggtgaagcaatttatgtctattgcatactaaaagatggtcatgatggcaaaggtgctggagatgagtatcttgatagtatcagaaaaacattagtatcttatattagacaagagattggtccagtagcaagtccagatgtgattcagtttactccagatttaccaaaaactcgttctggtaaaattatgagaagaattttgagaaaaatagctgcaaatgattttgataatttaggtgacacatctacacttttagatccgagtatagtagagtatctgataaaaaacaggtag

SEQ ID NO: 151313 - protein, 647 aa, Francisella philomiragia subsp. philomiragia ATCC 25017
MSYSNFQVSEEFIAQANVNAEQYEAMYQESIENPEAFWSKQANYISWHKPFDKAFASSFDPVDIQWFKGGELNVCYNCVDRHLVDKANKVAFVWQADDPYHTKNITYRDLYHRVCEMANILEANGVKKGDVVTIYMPMIPEAIYAMLACARIGAMHSVVFGGFSAEALKQRIINANSKFVITADESIRSGKRIPLKKSVDRAISGLDFVRNVLVVSRTKTKDMVWNDIDLCYEKECAKVSDEHKIEFFDAETPLFMLYTSGSTGTPKGLVHTSGGYLVYASMTHKLAFDLKDDDVYWCTADIGWITGHSYAVYGPLANGCTSLIFEGVPTYPDASRMWKEVDRHNVKSLYTAPTLIRLLIKAGDQYLKDSDRTSLRVLGSVGEPINPEAWNWFVEKGANNQAPLVDTWWQTETGGHMILPLPGAHKLKPGSASKPFFGVDVALLDTDGKEIEGVGKGALCIRTATPGMARTIYGDHDRYIQTYFSSFKGFYFSGDAARRDEDGYIWIEGRMDDVINVSGHRMATAEIEAVLNTHSSVAESAVVGMPHDIKGEAIYVYCILKDGHDGKGAGDEYLDSIRKTLVSYIRQEIGPVASPDVIQFTPDLPKTRSGKIMRRILRKIAANDFDNLGDTSTLLDPSIVEYLIKNR

SEQ ID NO: 151314 - DNA, 1941 bp, Caulobacter sp. K31
  CDS (1)..(1941): transl_table=11
gtgagcgacggacaggtttttccgattcccgacgactgggcgggcaaggcccatatcgacgccgccggctatgaggccgccctggcgcgggtcgaggccgatcccgagggctactggcgcgatctggccgggcggctggactggatccgggctccgacccagatcaaggacgtctcgttcgccaaggatgacttccgcattcactggtacgccgacggggtgctgaacgtctcagccaactgcatcgaccgccacctgccccatcgcaaggacgaggtcgccctgatcttcgagggggacgagccgggcgtctcctcgaccctgacctacggtcagttgcacgaggaggtttgccgcatggccaacgtcctcaaggtgcaaggcgtgcgcaagggtgaccgggtgacgatctatctgccgatgatcccgatcgccgccgtggccatgctggcctgcgccaggatcggagcggtgcactcggtggtgttcggcggcttctcacccgacagcatcgccggccgcatccaggattgcggctcgcacttcgtgatcaccgccgacgagggccggcgcggtggcaagcgcgtgccgctgaaggccaacatcgacaaggcgctcgagcactgcccatgggtgagcaaggtgctgatggtgcgctggaccggggcggagacgacgctggtacgtcaccgcgacgtggtctgggaggacgtcaaggacagcgtctcggccgactgcccgcccgagccgatgaacgccgaggatccgctgttcatcctctacacctccggctcgaccggaaagcccaagggcgtgctgcacaccaccggcggctacctggcctgggccgcctggacccatgaggcggtgttcgactatcggcccggcgaagtgttctggtgcaccgccgatgtgggttgggtgaccggccacagctacgtggtctacggcccgctggccaatggcgggaccagcctgatcttcgagggcgtgcccaactatcccaccccggcccggttctgggaggtggtcgacaagcaccaggtcgagatcttctacaccgcccccacggccctgcgcgccctgatgcgcgagggcgacgactgggtcacgaagaacgacctgtccagcttgcgcctgctgggcagcgtcggcgaaccgatcaatcccgaggcctggctgtggtaccaccgcgtggtcggcaaggaccgcctgccgatcgtcgacacctggtggcagaccgagaccggaggcgtcctggtctcgcccctgcccggcgccacggccctcaagcccggttcggccaccaagcccctgcccggcgtcaagctgcagctggtcgacgccgagggccatgtgctggagggcgccaccgagggcaaccttctcatcaccgacagctggccgggccagatgcgcaccgtctatggcgatcacggccggttcttcgacacctatttcagcgcctatccgggcaagtacttcaccggcgatggctgccggcgcgacgcggacggctattactggatcaccggccgggtcgatgacgtgatcaacgtctcgggccaccgtctgggcaccgccgagatcgagagcgccctggtggcccacgacacggtcgccgaggccgccgtggtgggctatccgcacgacatcaagggccagggcgtctatgcctatgtcacgctcagggcgggggtggagccgaccgactcgctgcgcaaggacctgatgctctgggtgcgccaggaaatcgggccgttcgccgcgccggacgtgctgcaatgggcgcccggcctgcccaagacccgctcgggcaagatcatgcgccgcatcctgcgcaagatcgccgagaacgaactgggcagcctgggcgacatctcgaccctggccgacccctcggtggtcgatgacctggtgaaaaatagggccaacagctga

SEQ ID NO: 151315 - protein, 646 aa, Caulobacter sp. K31
MSDGQVFPIPDDWAGKAHIDAAGYEAALARVEADPEGYWRDLAGRLDWIRAPTQIKDVSFAKDDFRIHWYADGVLNVSANCIDRHLPHRKDEVALIFEGDEPGVSSTLTYGQLHEEVCRMANVLKVQGVRKGDRVTIYLPMIPIAAVAMLACARIGAVHSVVFGGFSPDSIAGRIQDCGSHFVITADEGRRGGKRVPLKANIDKALEHCPWVSKVLMVRWTGAETTLVRHRDVVWEDVKDSVSADCPPEPMNAEDPLFILYTSGSTGKPKGVLHTTGGYLAWAAWTHEAVFDYRPGEVFWCTADVGWVTGHSYVVYGPLANGGTSLIFEGVPNYPTPARFWEVVDKHQVEIFYTAPTALRALMREGDDWVTKNDLSSLRLLGSVGEPINPEAWLWYHRVVGKDRLPIVDTWWQTETGGVLVSPLPGATALKPGSATKPLPGVKLQLVDAEGHVLEGATEGNLLITDSWPGQMRTVYGDHGRFFDTYFSAYPGKYFTGDGCRRDADGYYWITGRVDDVINVSGHRLGTAEIESALVAHDTVAEAAVVGYPHDIKGQGVYAYVTLRAGVEPTDSLRKDLMLWVRQEIGPFAAPDVLQWAPGLPKTRSGKIMRRILRKIAENELGSLGDISTLADPSVVDDLVKNRANS

SEQ ID NO: 151316 - DNA, 2031 bp, Clavibacter michiganensis subsp. sepedonicus
  CDS (1)..(2031): transl_table=11
atgacgatgtccacgaacccccgatcgaccgagcacggagccccgaggcccgccgcgcgcgaacaggacgaggaggggacgaccgctcccccgccgtcgcccgacccggggcccgtccacccgccgtcggaggccttctgcgcgacccgggtcgccgacgagtccctcgccgcatccgccgccgcagaccgcctcggcttctgggccgaccgggcccgcgagctcgtcacctgggagaccccgttcgagacggtgctcgactggtcggacgcccccgtggcccgctggttccccgagggccgcctcaacgtggcctacaactgcctcgaccggcacgtgctcgccgggcacggtgaccgcgtcgcgctgcactgggagggcgagcccggcgacacccgcgacctcacctacgccgagctcaccgcggaggtcaagcgcgcggcgaacgccctgcgcgacctgggcgtcgtcgcgggagaccgcgtcgcgatctacctcccgatgatcccggaggccgtgatcgcgatgctggccgtggctcgcatcggcgccgtccactcggtcgtgttcggcgggttcagcgccgagagcctgcgggcgcgcatcgacgacgccgcggcgcgcatcgtgatcaccgcggacggcggctggcgcaagggcaaggtcttcccgctgaagtccgcggtagacgccgcgctcgtgggatccgccggatccgtcgaacacgtcctcgtcgtgcggcgcggcgagaacgaggtggagtgggacgacgcccgcgacctctggtggcacgaacgcgtcgccgccgcggatccggagcacgtggcggaggcgttcgaggccgagcacccgctcttcatcctttacacgagcggcacgaccgggaagccgaagggcatcctgcacacctcgggcggctacctcacgcaggtcgcgtacacccaccgcaacgtcttcgacctgcaccccgagaccgacgtctactggtgcacggccgacgtcggctggatcaccggccacagctacgtggtctacggcccgctcgccaacggcgccacccaggtcatctacgagggcacgcccgactcccccgcgcccggccgctggtgggacatcgtcgagaggcacggggtgacgatcctctacgcggcgcccaccgccatccgctccttcatgaagaccggccgcgagatcccggacgcgcgcgacctctcctccatccggctgctcggctcggtcggcgagcccatcaacccggaggcgtggcgctggtaccgcgacgtgatcggcggcggcgacgtgcccgtcgtcgacacgtggtggcagacggagaccggcggcatcatgatctccgcgctccccggggtcaccgccacgaagcccgggtccgcgcagtcccccatccccggcatccaggtcgccgtggtcgacgaccagggcgagcccgtggcccgcggcgagagcggcctcctcgtggtcaccgagccgtggcccggcatgctccgcggcatctggggcgatcccgagcggtaccgcgagacgtactgggaccgcttcggcgaccgctacttcgcgggcgacggcgcgcggctcgacgaggacggcgacatctggctgctcggccgggtcgacgacgtgatgaacgtctccgggcaccgcctctcgaccgcggagatcgagtcctcgctcgtcgcccatccgtacgtcgcggaggccgccgtggtgggcgcgtccgatgaggcgaccggccaggccgtcgtggccttcgtgatcctccgctcggccgaggcgagcgcgctcggcgatgaggacccgaacgaggtcctccgcaagcacgtgtccgaccagatcggtgccatcgccaagccgcgccgcgtgttcgtggtgcaggagctgccgaagacgcgctcgggcaagatcatgcgccggctgctgcgcgacgtggccgagggccgggcgatcggcgacacgaccacgctggccgacacgcaggtgatgcaggtcatcagcgaccggatgagcgcgggctga

SEQ ID NO: 151317 - protein, 676 aa, Clavibacter michiganensis subsp. sepedonicus
MTMSTNPRSTEHGAPRPAAREQDEEGTTAPPPSPDPGPVHPPSEAFCATRVADESLAASAAADRLGFWADRARELVTWETPFETVLDWSDAPVARWFPEGRLNVAYNCLDRHVLAGHGDRVALHWEGEPGDTRDLTYAELTAEVKRAANALRDLGVVAGDRVAIYLPMIPEAVIAMLAVARIGAVHSVVFGGFSAESLRARIDDAAARIVITADGGWRKGKVFPLKSAVDAALVGSAGSVEHVLVVRRGENEVEWDDARDLWWHERVAAADPEHVAEAFEAEHPLFILYTSGTTGKPKGILHTSGGYLTQVAYTHRNVFDLHPETDVYWCTADVGWITGHSYVVYGPLANGATQVIYEGTPDSPAPGRWWDIVERHGVTILYAAPTAIRSFMKTGREIPDARDLSSIRLLGSVGEPINPEAWRWYRDVIGGGDVPVVDTWWQTETGGIMISALPGVTATKPGSAQSPIPGIQVAVVDDQGEPVARGESGLLVVTEPWPGMLRGIWGDPERYRETYWDRFGDRYFAGDGARLDEDGDIWLLGRVDDVMNVSGHRLSTAEIESSLVAHPYVAEAAVVGASDEATGQAVVAFVILRSAEASALGDEDPNEVLRKHVSDQIGAIAKPRRVFVVQELPKTRSGKIMRRLLRDVAEGRAIGDTTTLADTQVMQVISDRMSAG

SEQ ID NO: 151318 - DNA, 2025 bp, Clavibacter michiganensis subsp. sepedonicus
  CDS (1)..(2025): transl_table=11
atgacctcgcagcgcaccgagcaggccgagaccgcacccgccgccgagcaggacctcttcccgccgcccgccgcgctcgccgcgtcggcgaacgtcacggcggaggcgtacgtgcgcgccgaggcggatccggtcgccttctgggaggaggccgcccgccgcctcgactgggagacgccctggcacacggcgcacacgtggatcccgccggtcgccgccgacggcaccccgcaggtccccgccgccacgtggttcgcgggcggccggctcaacgtcgccgccaactgcgtcgaccgccacgtcgcggcgggccggggcgagaaggtcgcgctgcacttcgagggcgagcccggcgaccggcgcacggtcacctaccgcgacctccaggaggaggtgtcccgcgccgccaacgccctcaccgcgctcggcgtcggccccggcgaccgcgtcgtgatctacctgcccgtgctcgtggagacgatcgtcgcgaccctggcggtggcgcgcatcggcgccgtccactcgctcgtcttcggcggcttctccgcggaggcgctgcgcttccgggtggaggacacgggcgcgaagctcctcatcacgagcgacgggcagaaccgccgcggatccgccgtcgccacgaagccgcaggccgacgaggccgtggcgggcgtcgcgtcgatcgagcacgtgctcgtcgtccgccgcaccggccaggacgtgccgtggaccgcgggccgcgacgtctggtggcacgacgccgtgggatccgcgtcgcccgagcacgagccgcgcgccttcgacgccgagcatccgctcttcatcatctacacgtccggcaccacgggccgccccaagggcctcgtgcacacctccggcggctacctcgcccacgcgtcctgggcgcactgggcgcacttcgacgcgaggcccgacgacgtgcactggtgcacggccgacctcgcgtgggtcaccgcgcacacctacgagatctacgggccgctgtccaacggcctcacgcaggtgatctacgagggcacgcccgacacgccccaccgcggccggcacctcgaggtcatcgagcggtacggcgtcacgacctactacacggcgcccacgctcatccgctcgctcatgggctggtaccccgacggcgtcgccgggcacgacctgtcgagcatccggctgctgggatcggtgggggaggccatcaaccccgcggcctggcgctggttccaccgcgagatcggcggaggatccgcgcccgtcgtcgacacgtggtggcagtcggagacgggggccgccgtcatcgcgccgctgcccggcgtctcgaccctcaagcccggagccgccggccgcgccctgcccggcttccgggtcgacgtggtcgacgacgacggcgaacccacggcgccgggcgaggccggcctcctcgtgatccagcgtccctggcccggcatggcccgcacggtgtggggcgacccggccaggtaccgcagcgcctactgggagcgcttcgccgaccgcggctggttcctcgccggcgacggcgcccggcgcgacgccgacggcgacatcgcgctccagggtcggatcgacgaggtcgtcaacgtctccgggcaccggctgtccaccatcgagatcgagtcggcgctcgtcgcgcacccgcgggtgggggaggcgggcgtgacgggcgtcgccgacgacctcaccggccagcgcgtggtcgcgttcgtcgtcccgcgcggcgacgaccgccccgcggacgacgacgcggccggctgggccgcgctcgccgcggagctcgggcccgtcctcacggcccacgtcgcgcgcgccatcgggccggtcgcgaagccccgccgcatcgtcgccgtgccggacgtgccgaagacgcgctcgggcaagatcatgcgccgcctcctcgccgacctggtcgagggccggaccctcggcgacgccaccagcctgcaggacgcggccgtgctgggccggatccgcgcggtgctcgacgcgtccgcgcgctga

SEQ ID NO: 151319 - protein, 674 aa, Clavibacter michiganensis subsp. sepedonicus
MTSQRTEQAETAPAAEQDLFPPPAALAASANVTAEAYVRAEADPVAFWEEAARRLDWETPWHTAHTWIPPVAADGTPQVPAATWFAGGRLNVAANCVDRHVAAGRGEKVALHFEGEPGDRRTVTYRDLQEEVSRAANALTALGVGPGDRVVIYLPVLVETIVATLAVARIGAVHSLVFGGFSAEALRFRVEDTGAKLLITSDGQNRRGSAVATKPQADEAVAGVASIEHVLVVRRTGQDVPWTAGRDVWWHDAVGSASPEHEPRAFDAEHPLFIIYTSGTTGRPKGLVHTSGGYLAHASWAHWAHFDARPDDVHWCTADLAWVTAHTYEIYGPLSNGLTQVIYEGTPDTPHRGRHLEVIERYGVTTYYTAPTLIRSLMGWYPDGVAGHDLSSIRLLGSVGEAINPAAWRWFHREIGGGSAPVVDTWWQSETGAAVIAPLPGVSTLKPGAAGRALPGFRVDVVDDDGEPTAPGEAGLLVIQRPWPGMARTVWGDPARYRSAYWERFADRGWFLAGDGARRDADGDIALQGRIDEVVNVSGHRLSTIEIESALVAHPRVGEAGVTGVADDLTGQRVVAFVVPRGDDRPADDDAAGWAALAAELGPVLTAHVARAIGPVAKPRRIVAVPDVPKTRSGKIMRRLLADLVEGRTLGDATSLQDAAVLGRIRAVLDASAR

SEQ ID NO: 151320 - DNA, 1935 bp, Pseudomonas putida W619
  CDS (1)..(1935): transl_table=11
atgttcgatatccgcgactacccccaggccctggccgtcagccaggccgccagcctttctaccgacgactacagccgcctctaccgccagtcggtcgaagaccccgacaccttctgggccgaacaggccaaacgcctggactggatcaaaccgtggtccagcgtacagcaatgcgaccttaagaccggcgaagcccgctggttcgcaggtgcccagctgaacgtcagctacaactgcatcgatcgccatctggcccagcgcggcgagcagaccgcactgctgtgggaaggcgacgaccctgcggactccaaggccatcacctaccaagagttgcaccgccaggtctgtcgcttggccaatgcactcaaggcacgtggcgtgaagaaaggcgaccgggtatgcatctatatgccgatgattcccgaagctgcctacgccatgcttgcctgcacgcggatcggcgcgatccactcggtggtgttcggcggcttctccccggatgcgttgcgcgaccgcattctcgatgctgactgccgcaccgtgatcaccgccgatgagggtgtacgcggcggcaaacgcatcccgctcaagcagaatgtcgacaaggcaatggccagttgcccggacgtcagcagcgtattggtggtgcgccgcaccggtaccgatgtggcctggagcgagggccgcgacctctggtatgaccaggcaacggaaaacgccggcgacgactgcccacctgaacccatggaggccgaagacccgctgttcatcctttatacctccggcagcaccggcaagcccaagggcgtgctgcacaccactgccggttacctgctgcaggccaccatgaccttcaaggtagtgttcgactaccgtgacggcgaggtgttctggtgcaccgccgacgtgggctgggtcaccggccacagttacatcgtctatggtccgctggccaacggcgcggtttcactgatgttcgagggcgttcccaactacccggacacctcgcggttctggcaggtggtagacaagcacaaggtcaatatcttctacaccgcgcccaccgcactgcgggcactgatgcgtgaaggctccggcccgttgcaggggacgtcacgcaagagcctgcgcctgctgggcagcgtcggcgagccaatcaacccagaggcgtgggaatggtacttcgaggaagtcggccaaaaacgctgccccatcgttgacacctggtggcagaccgaaaccggcggcatcatgctcaccccgctgcccggcacgcagaggctcaagccagggtgtgcgacacaacccatgttcggcgtgcaaccggtgctgctggatgacaaaggcaagctgatcgaagggcccggcgccggcttgctggcgataaaggccagttggccggggcagatccgcagcgtctacggcgaccaccaacgcatgatcgacacctacttcaaacctatgcccggctattatttcaccggcgacggtgcccgccgcgatgccgatggcgactactggatcaccggccgcatcgatgatgtgatcaacgtttccggccaccgcatcggcaccgctgaagtggaaagcgcactggtattgcacgaaagcgtcgccgaggccgcagtggtcggttacccccatgacctcaagggtcagggtgtgtatgccttcgtgacgaccatgaatggcgtaacagcggacgatgccctgaaggccgaactgttggcactggtcagcaaggaaatcggcagcttcgccaaacccgagctgatccagtgggcgccggccttgcccaagacccgctcgggcaagatcatgcggcgtatactgcgcaagatcgcctgcaacgaactcgacaccctgggcgatacctcgaccctggcagacccaagcgtggtgcaggggttgatcgacaaacgcctcaaccaatag

SEQ ID NO: 151321 - protein, 644 aa, Pseudomonas putida W619
MFDIRDYPQALAVSQAASLSTDDYSRLYRQSVEDPDTFWAEQAKRLDWIKPWSSVQQCDLKTGEARWFAGAQLNVSYNCIDRHLAQRGEQTALLWEGDDPADSKAITYQELHRQVCRLANALKARGVKKGDRVCIYMPMIPEAAYAMLACTRIGAIHSVVFGGFSPDALRDRILDADCRTVITADEGVRGGKRIPLKQNVDKAMASCPDVSSVLVVRRTGTDVAWSEGRDLWYDQATENAGDDCPPEPMEAEDPLFILYTSGSTGKPKGVLHTTAGYLLQATMTFKVVFDYRDGEVFWCTADVGWVTGHSYIVYGPLANGAVSLMFEGVPNYPDTSRFWQVVDKHKVNIFYTAPTALRALMREGSGPLQGTSRKSLRLLGSVGEPINPEAWEWYFEEVGQKRCPIVDTWWQTETGGIMLTPLPGTQRLKPGCATQPMFGVQPVLLDDKGKLIEGPGAGLLAIKASWPGQIRSVYGDHQRMIDTYFKPMPGYYFTGDGARRDADGDYWITGRIDDVINVSGHRIGTAEVESALVLHESVAEAAVVGYPHDLKGQGVYAFVTTMNGVTADDALKAELLALVSKEIGSFAKPELIQWAPALPKTRSGKIMRRILRKIACNELDTLGDTSTLADPSVVQGLIDKRLNQ

SEQ ID NO: 151322 - DNA, 1947 bp, Methylobacterium radiotolerans JCM 2831
  CDS (1)..(1947): transl_table=11
atggaaggcaaggtgatcgaggtccaatccgcgtggcgcgagggtgcgcacgtggacgatgccaagtaccgggagatgtacgcggcttccgtcgccgatcccgacgcgttctgggccgagcacggcaagcgcatcgactggatgaagccgttctcgaccgtgaagaacaccagcttcgagcccggcaaggtctcgatcaagtggttcgaggacggcacgaccaacgtcgcccacaactgcatcgatcgccatctcgagacccggggcgaccagaccgcgatcatctgggagggcgacaaccccgacgaggccaagcacatcagctaccgcgagctgcacgcgcaggtctgccggatggccaacgtgctgcgcaaccgcggcgtcggtaagggcgaccgcgtcacactctacatgccgatgattccggaggccgcctacgcgatgctcgcctgcgcgcggctcggcgcgatccacgccatcgtgttcggcggcttctcgccggactccctcgcctcgcgcatccagggctgcggctcgaaggtggtgatcaccgccgacgagggcctgcgcggcggccgcaaggtgccgctgaaggccaatgtcgacgaggcgatcaagcgcctcgacgcggacttggtcgaccacgtgatcgtcgtgcgccgcaccggcggcagcgtcgccatggaggcgggccgcgacgtctactacgacgaggccgccgagcaggtgacggacgagtgccccgccgtggcggtggatgccgagcacccgctcttcatcctctacacctcgggctcgaccggtcagccgaagggcgtggtgcacaccacaggcggatacctcgtctacgcgtcgatgacgcacgaatacgtcttcgattaccgcgagggcgacgtttactggtgcacggccgatgtcggctgggtcaccggccacagctacatcgtctacgggccgctcgcgaacggcgccacgacgctgatgttcgagggcatcccgacctacccgtcgacctcccggttctgggaagtggtcgacaagcacaaggtcaacatcttctacacggcaccgaccgcgatccgctcgctgatgggcggcggcgagggcccggtcaagaagacctcgcggcagtcgctgcgggttctgggctccgtcggcgagccgatcaacccggaagcctgggaatggtactacaacgtcgtcggcgacaggcgctgctcgatcgtcgacacgtggtggcagaccgagaccggcggcatcctgatcacgccgctgccgggcgccaccgcgctcaagccgggctcggccacacgcccgttcttcggcgtgaagccccagatggtcgacgccgagggcaaggtgctggaagggccgtgcgagggcaatctctgcatcgccgattcctggccgggccagatgcgcacggtctacggcgaccatgagcgcttcgagcagacctacttctcgacctatccgggcaagtacttcaccggcgacggcgcccggcgggacgccgacggctactactggatcaccggccgagtggacgacgtcatcaacgtctcgggtcaccgcatgggcaccgccgaggtcgagtcgtcgctggtcgcccacccgaaggtcgccgaggcggcggtggtgggatacccgcacaacgtgaagggccagggcatctacgcctacgtgaccctcaacgacggcgaggagggcgacgacgccctgcgcaaggagctcgtgacctgggtccgcaaggacatcgggccgatcgcctcgccggacctgatccagttcgcccccggcctgcccaagacccgttcgggcaagatcatgcgccggatcctgcgcaagatcgccgaggacgatttcagctcgctcggcgacacctcgacgctggccgagccggccgtcgtcgacgacctgatcgagaaccggcagaaccggggctga

SEQ ID NO: 151323 - protein, 648 aa, Methylobacterium radiotolerans JCM 2831
MEGKVIEVQSAWREGAHVDDAKYREMYAASVADPDAFWAEHGKRIDWMKPFSTVKNTSFEPGKVSIKWFEDGTTNVAHNCIDRHLETRGDQTAIIWEGDNPDEAKHISYRELHAQVCRMANVLRNRGVGKGDRVTLYMPMIPEAAYAMLACARLGAIHAIVFGGFSPDSLASRIQGCGSKVVITADEGLRGGRKVPLKANVDEAIKRLDADLVDHVIVVRRTGGSVAMEAGRDVYYDEAAEQVTDECPAVAVDAEHPLFILYTSGSTGQPKGVVHTTGGYLVYASMTHEYVFDYREGDVYWCTADVGWVTGHSYIVYGPLANGATTLMFEGIPTYPSTSRFWEVVDKHKVNIFYTAPTAIRSLMGGGEGPVKKTSRQSLRVLGSVGEPINPEAWEWYYNVVGDRRCSIVDTWWQTETGGILITPLPGATALKPGSATRPFFGVKPQMVDAEGKVLEGPCEGNLCIADSWPGQMRTVYGDHERFEQTYFSTYPGKYFTGDGARRDADGYYWITGRVDDVINVSGHRMGTAEVESSLVAHPKVAEAAVVGYPHNVKGQGIYAYVTLNDGEEGDDALRKELVTWVRKDIGPIASPDLIQFAPGLPKTRSGKIMRRILRKIAEDDFSSLGDTSTLAEPAVVDDLIENRQNRG

SEQ ID NO: 151324 - DNA, 1950 bp, Methylobacterium sp. 4-46
  CDS (1)..(1950): transl_table=11
atgactcaacggatcgtcgcggtgccggccgccgtcaaggagcgggcatatatcgatgaggccaagtatcgcgcttggtatgaggcttcgattaacgatcccgaaggattctggcgcgagcacggcaagcggatcgactggttcaagccctacaccaaggtgaaggagaccgatttcggtccgggcaacgtctcgatccgctggttcgcggacggcgtcaccaacgtcgcgcacaattgcatcgaccgccacctggccacgcgcggtgatcaggtcgcgatcatctgggagggcgacgatccctccgagtcccgcagcatcacctaccgcgaactgcacgcggaggtctgccggatggcgaacgtcctgcgcaaccgcggcgtcggcaagggcgaccgggtcaccatctacttgccgatgattcccgaggcggccttcgccatgctggcctgcgcgcggctcggcgccatccactcgatcgtcttcggcggcttctcgcccgattcgctcgccggccgcatcgagggctgcgcctccaagctggtgatcaccgcggacgagggcctgcgcggcggccgcaaggtgccgctcaaggccaatgtcgacgcggcgatccagcgcctgccgcgggacagcgtcgaccacgtcatcgtggtgcgccgcaccggcggcagcgtcgccatggaggcggggcgcgacgtctactacgacgacgccgcccgcgaggtcaccgacgagtgcccggtggagcacgtcgaggccgagcacccgctcttcctgctctacacgtcgggctcgaccggccagccgaagggcgtcgtccacaccaccggcggctacctcgtctacgcctcgatgacgcaccaatacgtcttcgactatcacgagggcgaggtctactggtgcacggccgatgtcggctgggtgacgggccattcctacatcgtgtacgggccgctcgcgaacggcgccacgaccctgatgttcgagggcatcccgacctacccctcggtctcccggttctgggacgtggtcgacaagcacaaggtcaacatcttctacaccgccccgaccgccatccgctccctgatgggcgcgggcgaggagccggtgaagaaggcctcgcggtcgacgctgcgcgtcctcggctcggtcggcgagccgatcaaccccgaggcctgggaatggtactaccgggtcgtcggcgacgagcgctgcccgatcgtcgacacgtggtggcagaccgagaccggcggcatcctgatctcgccgctgcccggggccaccgccctcaagcccggctcggccacccagcccttcttcggcgtcaagccggtggtggtggacggcgacaacaaggtgctggagggcgcctgcgagggcaacctctgcctcgccgattcctggccgggccagatgcgcaccgtctggggcgaccacgagcgcttcgtgcagacctacttctcgaccttcccgggccgctacttctcgggcgacggctgccgccgcgacgaggacggctactactggatcacgggccgggtcgacgacgtcatcaacgtctcgggccaccgcatgggcacggccgaggtggaatcctcgctggtggcgcatccgaaagtctcggaagccgcggtggtgggctatccccacagcctcaagggccagggcatctacgcctacgtcaccctgatgaacggcgaggagccgaccgaggcgctgcgcaaggaactggtcgcctgggtgcgcaaggatatcgggccgatcgcctcgccggacctgatccagttcgcccccggcctgcccaagacccgctcgggcaagatcatgcggcgcatcctgcgcaagatcgccgaggacgacttctcctcgctgggtgacacctcgaccctcgccgatcccggcgtggtcgacgacctgatcgagaaccggcagaaccgcgccggctga

SEQ ID NO: 151325 - protein, 649 aa, Methylobacterium sp. 4-46
MTQRIVAVPAAVKERAYIDEAKYRAWYEASINDPEGFWREHGKRIDWFKPYTKVKETDFGPGNVSIRWFADGVTNVAHNCIDRHLATRGDQVAIIWEGDDPSESRSITYRELHAEVCRMANVLRNRGVGKGDRVTIYLPMIPEAAFAMLACARLGAIHSIVFGGFSPDSLAGRIEGCASKLVITADEGLRGGRKVPLKANVDAAIQRLPRDSVDHVIVVRRTGGSVAMEAGRDVYYDDAAREVTDECPVEHVEAEHPLFLLYTSGSTGQPKGVVHTTGGYLVYASMTHQYVFDYHEGEVYWCTADVGWVTGHSYIVYGPLANGATTLMFEGIPTYPSVSRFWDVVDKHKVNIFYTAPTAIRSLMGAGEEPVKKASRSTLRVLGSVGEPINPEAWEWYYRVVGDERCPIVDTWWQTETGGILISPLPGATALKPGSATQPFFGVKPVVVDGDNKVLEGACEGNLCLADSWPGQMRTVWGDHERFVQTYFSTFPGRYFSGDGCRRDEDGYYWITGRVDDVINVSGHRMGTAEVESSLVAHPKVSEAAVVGYPHSLKGQGIYAYVTLMNGEEPTEALRKELVAWVRKDIGPIASPDLIQFAPGLPKTRSGKIMRRILRKIAEDDFSSLGDTSTLADPGVVDDLIENRQNRAG

SEQ ID NO: 151326 - DNA, 1938 bp, Beijerinckia indica subsp. indica ATCC 9039
  CDS (1)..(1938): transl_table=11
atgtccgataaaacctatcccgtgagtgcctattggaacgaacgcgcctacatcaatgccgctaaatacaaggatatgtataaacgctcgatcgaggagcctgatcttttctggggagaagaaggtaagcggatcgattggatcaaaccttacaccaaggtcaagaatacttccttcgacccggccaatgtcgatatccgctggttcgaggatggtatcaccaatgtcgcatataattgcatcgaccggcatctagcgacgcgcggcgaccagacggccattctgttcgagggggacgacccggccgattcccgcgccatcacctataaagaattgcacgattccgtttgccgcctggccaatgtcctcaaggcccatggcgtcggcaagggtgatacggtctcgctctatctgcccatgattccggaagccgctttcgccatgctggcctgcgcccggatcggtgccattcattcggtgatttttggcggtttctcacccgattctctcgccggccgcatcgagggctgccgctccaaagtgctcatcactgccgatgaaggcctgcgcggcggccgcaaggttccactgaaagccaatgcggatctggccatcgcaaaaaccggcgatatcgttcagaccatgatcgtcgtcacacggaccggtggtgcggtggattgggtcgagggtcgcgatgtccgctacgaggaagccattgccgccgcctcgcccgaatgccccctcaccgaggtcgaggccgaacatccgttgttcatcctctatacgtctggatcaaccggcgcgcccaagggcgtcgtgcattgcaccggcggttatctcgtctatgcgtcgatgacgcatcaatatgttttcgactatcacgatggcgacgtctattggtgcaccgccgatgtcggctgggtgaccgggcacagctatatcgtctatggcccgcttgccaatggcgcgacaaccctgatgttcgagggtgtgccgaattatccgagcgtctcgcgtttctgggaagtcatcgacaaacacaaggtcacgatcttctataccgcgccaacggcgatccgcgccctgatgggttcgggcgaggctccggtcaagaagaccagccgcgcctcgctccgtctgctcggctcggtcggcgaaccgatcaatccggaagcctgggagtggtaccatcgcgtcgtgggtgaggagcgctgccccatcgtcgatacctggtggcagaccgagaccggcggtattctcatcacgcccctgccgggcgcgacgcccgaaaagccgggttcggcaaccctaccctttttcggcgtcaagccacaggtcgtcgatgccaccggcgctgtcctcgaaggcgtctgcgagggcaatctggtcatcgccgattcctggcccggccagatgcgcaccatttttggcgatcatgatcgcttcgtgcagagctatttctcgacctatccgggcaagtatttcaccggtgacggctgtcgccgcgatgccgatggttattattggatcactggccgtgtcgatgatgtcatcaatgtttcgggccataggctcggcaccgccgaggtcgaaagctcgctcgtcgcgcatgaactcgtctcggaagccgcggtcgtcggctatccgcatgatatcaagggccagggcatttatgcctatgtcaccttgatgaatggcatcgagcccagcgacaggctccgcaccgaactggtgacctgggtccgcaaggatatcggcccgatcgccacccccgatgtggtgcatttcgcgaccggcctgccaaaaacacgttccggcaagatcatgcgccgcattctgcgcaaaattgccgaaaaggagttttcggcgctgggcgatgtttcgacattggccgacccaaccattgtcgacgatctgatccgtaaccgcctgggataa

SEQ ID NO: 151327 - protein, 645 aa, Beijerinckia indica subsp. indica ATCC 9039
MSDKTYPVSAYWNERAYINAAKYKDMYKRSIEEPDLFWGEEGKRIDWIKPYTKVKNTSFDPANVDIRWFEDGITNVAYNCIDRHLATRGDQTAILFEGDDPADSRAITYKELHDSVCRLANVLKAHGVGKGDTVSLYLPMIPEAAFAMLACARIGAIHSVIFGGFSPDSLAGRIEGCRSKVLITADEGLRGGRKVPLKANADLAIAKTGDIVQTMIVVTRTGGAVDWVEGRDVRYEEAIAAASPECPLTEVEAEHPLFILYTSGSTGAPKGVVHCTGGYLVYASMTHQYVFDYHDGDVYWCTADVGWVTGHSYIVYGPLANGATTLMFEGVPNYPSVSRFWEVIDKHKVTIFYTAPTAIRALMGSGEAPVKKTSRASLRLLGSVGEPINPEAWEWYHRVVGEERCPIVDTWWQTETGGILITPLPGATPEKPGSATLPFFGVKPQVVDATGAVLEGVCEGNLVIADSWPGQMRTIFGDHDRFVQSYFSTYPGKYFTGDGCRRDADGYYWITGRVDDVINVSGHRLGTAEVESSLVAHELVSEAAVVGYPHDIKGQGIYAYVTLMNGIEPSDRLRTELVTWVRKDIGPIATPDVVHFATGLPKTRSGKIMRRILRKIAEKEFSALGDVSTLADPTIVDDLIRNRLG

SEQ ID NO: 151328 - DNA, 1965 bp, Leptospira biflexa serovar Patoc strain 'Patoc 1 (Paris)'
  CDS (1)..(1965): transl_table=11
atgccgaaagaaagaatcgtggcaccatccaaagaatttgccaaacttgcaaacgttagcttaaaagaatacaaatccaaatacaaagaatccattgaaaaaccagagaaattttgggcagaacaagcaaaacgcctaacatggtttaaaaaatggaccaaagttctgagacacgactttgcaaaagcaaaagtagaatggtttgtggggggaaaactcaatgtctcttataattgtttagaccgccaccttgactctcccttaaaaaacaaagccgctctcatatgggaaggtgacaatcccgacgaatccaaagtcctcacctatcacgacttacatagagaagtgaatcactttgccaatgtactaaaaaaattcaaagtgaagaaaggagaccgagttctcatctaccttccgatggtcccagaacttgccatcgccacacttgcttgtactcgcatcggggccgtgcattccgttgtctttgggggattttctccagaagcactccttggtcgtatcgaagattgtaaaccaactcttgtcatcacagccgatggtggataccgtggtggcaaacccatcgaactgaaaaaaaatgtcgatgctgccctcgctgaaaccaaattcaaagtgaatgatgtgattgtcgtcaaacgaacgggtgatgaaggcaatctcaattggaaagaaggtcgtgaccattggtatcactacctcatgaaagaccctgaagtgaaaaaagaatgccccgctgttcctatggaatcggaagacccactcttcatcctttacacatctggttccacgggaaaaccaaaaggggtcctccataccaccgccgggtatttgttaggtgccaatctaacattcgctactatctttgattacaaagacacggatacatactggtgtacggcagacattggttggatcacgggtcatagttatatattgtatggaccactctccaatggtgctacttccttgatgttcgaaggggttccgagttaccctgacatgggtcgattttgggatgtgattgataaatacaaagtcaccgtattttataccgcaccgacggccattcgggcactcatgcgagaaggtctagagcatatcaaaaagcgatcactcgcatcactgcggttacttggttctgtgggagaacccattaacccagaagcttgggaatggtattatgctaatattggaaaatcgaaatgcccgattgtggatacatggtggcaaacagaaactggatccattatgatctcagggattccgggagccattccgcaaaaaccaggatcggccagttggccattttatggaatccaaccagtacttgtggacaacgaaggggtggaactgaaaggcaaaggtgaaatttcaggcaatctttgtatcgcgaaaccttggccttcgatgatgcgcggagtgtatggagatccgaaacgattctttgatacctacttctctcaattcaaaggctattatttcacaggggatggggccaatcgtgataaagaaggatactttcgcatcacagggcgagtcgatgatgtcctcaatgtctcagggcatcggattggatcggcagaagtggaaagtgcccttgtggaacacaaatcggtggcggaagcggctgttgtgggtttcccacatgacatcaaaggccagggaatttatgcctatgtcacggtgaaacaaggggttgtcacaaacgacctactgaaaaaagaactcattgcgatggtggaaaaggtgattggaaaaatagcgaggccagatgtgatccattgggccccaggacttcctaaaactcggtctggtaaaatcatgcgtcgaattttacggaagattgccaataacgaatttgatacgttaggtgacattagtacacttgccgatccatccgttgtccaatcgttaattgatgataagaagaaataccatagttaa

SEQ ID NO: 151329 - protein, 654 aa, Leptospira biflexa serovar Patoc strain 'Patoc 1 (Paris)'
MPKERIVAPSKEFAKLANVSLKEYKSKYKESIEKPEKFWAEQAKRLTWFKKWTKVLRHDFAKAKVEWFVGGKLNVSYNCLDRHLDSPLKNKAALIWEGDNPDESKVLTYHDLHREVNHFANVLKKFKVKKGDRVLIYLPMVPELAIATLACTRIGAVHSVVFGGFSPEALLGRIEDCKPTLVITADGGYRGGKPIELKKNVDAALAETKFKVNDVIVVKRTGDEGNLNWKEGRDHWYHYLMKDPEVKKECPAVPMESEDPLFILYTSGSTGKPKGVLHTTAGYLLGANLTFATIFDYKDTDTYWCTADIGWITGHSYILYGPLSNGATSLMFEGVPSYPDMGRFWDVIDKYKVTVFYTAPTAIRALMREGLEHIKKRSLASLRLLGSVGEPINPEAWEWYYANIGKSKCPIVDTWWQTETGSIMISGIPGAIPQKPGSASWPFYGIQPVLVDNEGVELKGKGEISGNLCIAKPWPSMMRGVYGDPKRFFDTYFSQFKGYYFTGDGANRDKEGYFRITGRVDDVLNVSGHRIGSAEVESALVEHKSVAEAAVVGFPHDIKGQGIYAYVTVKQGVVTNDLLKKELIAMVEKVIGKIARPDVIHWAPGLPKTRSGKIMRRILRKIANNEFDTLGDISTLADPSVVQSLIDDKKKYHS

SEQ ID NO: 151330 - DNA, 2019 bp, Xanthomonas campestris pv. campestris str. B100
  CDS (1)..(2019): transl_table=11
atgcggcacactgattgtctacggggcgcgcgcaagcggccctcttccgacaagttgatcgcaagtgagggtgccatggctgatgtttatcccgtcgatcccgcgttcgccgctgatgcgcgcattacgcgcgagcagtacgcaacgctgtaccgcgaatcgatcgaacaccccgagcagttctggggcaaggccgcgcagcggctggactggttcaagcaacccacccagatcaaggacgtcagcttcgcgctggacgacttccacgtgcgctggttcggcgacggcgaactcaatgccagcgtcaactgcctggaccgccagctggccacccgcggcgacaagaccgcgctgctgttcgaacccgacagcccggattcgccgtcctacccggtcacctaccgcgagctctatgagcgcgtgtgcaagctgggcaacgcgctgcgcaacctgggcgtcaagaagggcgaccgggtcaccatctatctgccgatgatcgtcgatgcggccgtggcgatgctcgcctgcgcgcgcatcggtgcggtgcactcggtggtgtttggcggctttgcggccaactccatcgccgaccgcgtgatcgactgccagagcaagctgatcatcaccgccgacgaaggcctgcgcggcggcaagaagatcccgctcaaggcgaacgtggacgcggcgctgaagatccccggcaccaacacggtcgaaaccgtgctggtggtgcgccacaccggcggtgcagtggacatgcaggccccgcgcgaccgctggttccatgacgtggtcgatggccagccggccgagtgcgaacccgagcgcatgaacgcggaagacccgttgttcatcctctacacctccgggtccacaggcaagcccaagggcgtgctgcacaccaccgccggctacctgctgtttgccagctatacgcatgaagtggtgttcgacctgcgcgaggacgacatctactggtgcaccgccgacgtgggctgggttaccggccacagctacatcgtctacggcccgctggccaacggcgccaccgcggtgatgttcgaaggcgtgccgaattaccccaacgtctcgcgtttctgggaagtgatcgacaagcaccaggtcaccatcttctacaccgcgcccaccgccatccgcgcgttgatgcgcgaaggcgaagcaccggtcaagaagacctcgcgcagcagcctgcgcctgctcggcagcgttggcgagccgatcaatcccgaagcctggcgctggtactacgaggtggtcggcgacagccgctgcccgatcgtggacacctggtggcagaccgaaaccggcggcatcctgatctcgccgctggccggcgcagtggacctcaagcccggctcggccaccctgccgttcttcggcgtgcagccggccctggtcgatgccgaaggcaagatcctggaaggcgccaccgagggcaacctggtgctgctggattcgtggccgggccagatgcgcaccgtctatggcgaccaccagcgcttcatcgacacctacttccgcacctaccccggcagctacttcaccggtgacggctgccgccgcgacgccgatggctactactggatcaccggccgcgtggacgacgtgatcaacgtctccggccaccgcatcggcaccgccgaggtggaaagcgcgctggtctcgcacccgaaggtggctgaagcggccgtggtcggcttcccgcacgacgtcaagggccagggcatctacgcctacgtgaccctgatcgccggcgagacgcccagcgaagagctgcacaaggaactggtgagctgggtgcgcaaggagatcggcccgatcgcctcgccggaccatctgcagtgggccccaggcctgccgaagacccgctcgggcaagatcatgcgccgcatcctgcgcaagatcgccgaaaacgccccggatcagctgggcgacacctccacgctggccgatccatcggtggtggattcgctggtcaatgagcggctgacgcgctga

SEQ ID NO: 151331 - protein, 672 aa, Xanthomonas campestris pv. campestris str. B100
MRHTDCLRGARKRPSSDKLIASEGAMADVYPVDPAFAADARITREQYATLYRESIEHPEQFWGKAAQRLDWFKQPTQIKDVSFALDDFHVRWFGDGELNASVNCLDRQLATRGDKTALLFEPDSPDSPSYPVTYRELYERVCKLGNALRNLGVKKGDRVTIYLPMIVDAAVAMLACARIGAVHSVVFGGFAANSIADRVIDCQSKLIITADEGLRGGKKIPLKANVDAALKIPGTNTVETVLVVRHTGGAVDMQAPRDRWFHDVVDGQPAECEPERMNAEDPLFILYTSGSTGKPKGVLHTTAGYLLFASYTHEVVFDLREDDIYWCTADVGWVTGHSYIVYGPLANGATAVMFEGVPNYPNVSRFWEVIDKHQVTIFYTAPTAIRALMREGEAPVKKTSRSSLRLLGSVGEPINPEAWRWYYEVVGDSRCPIVDTWWQTETGGILISPLAGAVDLKPGSATLPFFGVQPALVDAEGKILEGATEGNLVLLDSWPGQMRTVYGDHQRFIDTYFRTYPGSYFTGDGCRRDADGYYWITGRVDDVINVSGHRIGTAEVESALVSHPKVAEAAVVGFPHDVKGQGIYAYVTLIAGETPSEELHKELVSWVRKEIGPIASPDHLQWAPGLPKTRSGKIMRRILRKIAENAPDQLGDTSTLADPSVVDSLVNERLTR

SEQ ID NO: 151332 - DNA, 1956 bp, Erwinia tasmaniensis Et1/99
  CDS (1)..(1956): transl_table=11
atgagccagtcacatatttacccgataccagccaacattgcgcaaaatacgctgattaatccccagcagtatcagtcaatgtaccagaagtctatacaggatcccgacgcattttggggagagcaaggcaagatacttgactggataaaaccttacgttacggttaagaacacctctttttcccccggcaatatctccattcgttggtatgaagacggcaccttaaaccttgcggctaactgcctggaccggcatctggcaagccggggcgaccatccggcgattatctgggaaggtgatgatgccagcgaaagcaaaacccttacctaccgtgaactgcatcgcgacgtatgccgctttgccaatacgctaaaaacgctgggcattcataaaggggatgtggtggcgatttatatgcccatggtgcctgaagctgccgtggcgatgctggcctgcgcgcgcatcggcgccgtacattcggttatttttggcggcttttcaccggaagcggtcgccgggcgtattatcgactgtcatgcccgcctggtgatcaccgccgacgaaggcgtgcgcgccgggcgcaccattccgttaaagaaaaacgttgatgacgcgctcaataatcctggcgtgaccagcgtggacaaggtggttgttctcaggcgtaccggcacagagacagcctggcaccacgaccgcgatctgtggtggcacgaactggtgagcgtggccagcgagcagcatcagcctgaagagatgaacgcggaagacccgttatttatcctgtatacctccggctctaccggtaagccgaagggcgtgctgcataccacgggcggttacctggtgtatgccgcgtccacctttaaatatgtttttgattatcaaccacaagatatctactggtgtaccgccgacgtcggttgggtcaccggtcacagctatctgctgtatggcccgctggcctgcggtgccaccaccctgatgtttgaaggggtgccaaactggccaaagccgagccgtatgggtgaagtcgttgataaacatagggttaccatcctgtataccgcccccacggcggtgcgtgcactgatggccgaaggggataaagcgattgaaggcaccgatcgctccaccctgcgcattctgggttcggtgggtgaaccgattaatccggaagcctgggagtggttccatcaaaaaatcggtaacggcaaatgccccatttcagatacctggtggcagacggaaacgggcggatttatgatcgccccactgcccggagcaacggcgctgaaacccggttcggcaacccatccattttttggcgtccggccggcgctggtcgataacgaaggcaatttgcaagaaggtgcctgcgaggggaatctggtcatcgttgactcctggccaggccaggcacgcacgttattcggcgatcaccagcgctttgagcaaacttacttctccaccttcagaaactgctatttcagcggtgacggcgctcgccgcgatgaggacggctattactggataaccggacgcgtcgatgacgtactgaatgtttccggccatcgtctgggtacggcggagatagaatccgcgctggtctcgcatccgaaaattgctgaggcagcggtagtgggcataccacacgccctgaaaggccaggcgatctacgcctatattacgctaaatagcggtgaggaaccgtcaccggagctgtatagcgaagtacgtagctgggtgcgtaaagagattggccctattgccacaccggacgtgctgcactggaccgactcattaccgaaaacccgctcgggaaaaattatgcgtcgtattctgcgtaaaattgccacgggtgataccagcaacctcggtgatacttctacgctggccgatccgggcgtggtagaaaaattacttgaagagaaacagtcgatcaaaatgccataa

SEQ ID NO: 151333 - protein, 651 aa, Erwinia tasmaniensis Et1/99
MSQSHIYPIPANIAQNTLINPQQYQSMYQKSIQDPDAFWGEQGKILDWIKPYVTVKNTSFSPGNISIRWYEDGTLNLAANCLDRHLASRGDHPAIIWEGDDASESKTLTYRELHRDVCRFANTLKTLGIHKGDVVAIYMPMVPEAAVAMLACARIGAVHSVIFGGFSPEAVAGRIIDCHARLVITADEGVRAGRTIPLKKNVDDALNNPGVTSVDKVVVLRRTGTETAWHHDRDLWWHELVSVASEQHQPEEMNAEDPLFILYTSGSTGKPKGVLHTTGGYLVYAASTFKYVFDYQPQDIYWCTADVGWVTGHSYLLYGPLACGATTLMFEGVPNWPKPSRMGEVVDKHRVTILYTAPTAVRALMAEGDKAIEGTDRSTLRILGSVGEPINPEAWEWFHQKIGNGKCPISDTWWQTETGGFMIAPLPGATALKPGSATHPFFGVRPALVDNEGNLQEGACEGNLVIVDSWPGQARTLFGDHQRFEQTYFSTFRNCYFSGDGARRDEDGYYWITGRVDDVLNVSGHRLGTAEIESALVSHPKIAEAAVVGIPHALKGQAIYAYITLNSGEEPSPELYSEVRSWVRKEIGPIATPDVLHWTDSLPKTRSGKIMRRILRKIATGDTSNLGDTSTLADPGVVEKLLEEKQSIKMP

SEQ ID NO: 151334 - DNA, 1950 bp, Methylobacterium populi BJ001
  CDS (1)..(1950): transl_table=11
atgagcgagaaggtcatcgacgttcaggatgcctggcgggaacgggctttgatcgacgacgccaagtacaaggagatgtacgccgcgtccgtttccgatcctgagacgttctgggccgagcacggtcggcggatcgactggtccacgcccttcagcaaggtcaagaatacgagcttcgcgcccggcaacgtctcgatcaaatggttcgaggacggcaagaccaacgtcgcgctcaactgcatcgaccggcacctcgagacccgcggcgaccagaccgcgatcatctgggaaggcgacgatcccaacgagtcgcagcacatcacctacaagcagttgcacgcggaagtgtgccggatggccaacgtcctgcgcaaccgcggcgtcggcaagggggaccgcgtcacgctctacctgccgatgatccccgaggccgcctacgcgatgctggcctgcgcccggctcggggccatccacgccatcgtcttcggcggcttctcgcccgattccctcgcgagccggatcaaaggctgcggctccaagctcgtcatcaccgccgacgagggcctgcgcggcgggcgcaaggtgcctctcaaggccaatgtcgacgaggcgatcaagcgcctcgatgcggacctcgtggatcacgtcatcgtggtgaagcgcaccggcggcaacgtggcgatggagccgggccgcgacgtctattaccatgaggccgccgagcaggtgaccgacgagtgcccggccgaggcggtcgaggccgagcatccgctcttcattctctacacctcgggctcgaccggccagccgaagggcgtggtgcacaccaccggcggctatctcgtctatgcctcgatgacccaccaatacgtgttcgactaccacgacggcgacgtctactggtgcacggcggatgtgggctgggtcaccggccacagctacatcgtctacggcccgctcgcgaacggcgcgaccacgctgatgttcgaggggatcccgacctacccgtcgaactcccgcttctgggaagtcatcgacaagcacaaggtcaacatcttctacaccgcgccgaccgcgatccgctcgctcatgggcggcggcgagggcccggtgaagaagacctcgcgcgcctcgctgcgggtgctgggctcggtcggcgagccgatcaacccggaagcctgggactggtactaccgcgtggtcggcgattcccgctgctccatcgtcgatacgtggtggcagaccgagaccggcggcatcctcatcaccccgctgcccggcgcgaccaagctcaagcccggctctgcgacccggcccttcttcggcgtgcagccggtgatggtcgatgccgagggcaaggaactcgacggcgcctgcgagggcaacctctgcatcaaggacagctggccgggccagatgcgcaccgtctacggcgaccacgagcgcttcgagcagacctacttctcgacctataagaacctctacttcaccggcgacggggcgcggcgcgacgccgacggctactactggatcacgggtcgcgtggacgacgtcatcaacgtctccggccaccgcatgggcacggcggaagtcgaatcctcgctcgtcgcccatccgaaggtctccgaggccgcggtggtgggctatccccacaacgtgaagggccagggcatctacgcctacgtcaccctcaacgagggcgaggacggctccgacgagctgcgcaaggaactcgtcacctgggtgcgcaaggatatcggcccgatcgcctcgccggatctgatccagttcgcgccgggcctgcccaagacccgctcgggcaagatcatgcgccgaatcctgcgcaagatcgccgaggacgatttcggttcgctcggcgacacctcgaccctggccgagccggcggtggtcgacgacctgatcgagaaccgccagaaccgctcggcctga

SEQ ID NO: 151335 - protein, 649 aa, Methylobacterium populi BJ001
MSEKVIDVQDAWRERALIDDAKYKEMYAASVSDPETFWAEHGRRIDWSTPFSKVKNTSFAPGNVSIKWFEDGKTNVALNCIDRHLETRGDQTAIIWEGDDPNESQHITYKQLHAEVCRMANVLRNRGVGKGDRVTLYLPMIPEAAYAMLACARLGAIHAIVFGGFSPDSLASRIKGCGSKLVITADEGLRGGRKVPLKANVDEAIKRLDADLVDHVIVVKRTGGNVAMEPGRDVYYHEAAEQVTDECPAEAVEAEHPLFILYTSGSTGQPKGVVHTTGGYLVYASMTHQYVFDYHDGDVYWCTADVGWVTGHSYIVYGPLANGATTLMFEGIPTYPSNSRFWEVIDKHKVNIFYTAPTAIRSLMGGGEGPVKKTSRASLRVLGSVGEPINPEAWDWYYRVVGDSRCSIVDTWWQTETGGILITPLPGATKLKPGSATRPFFGVQPVMVDAEGKELDGACEGNLCIKDSWPGQMRTVYGDHERFEQTYFSTYKNLYFTGDGARRDADGYYWITGRVDDVINVSGHRMGTAEVESSLVAHPKVSEAAVVGYPHNVKGQGIYAYVTLNEGEDGSDELRKELVTWVRKDIGPIASPDLIQFAPGLPKTRSGKIMRRILRKIAEDDFGSLGDTSTLAEPAVVDDLIENRQNRSA

SEQ ID NO: 151336 - DNA, 1959 bp, Agrobacterium rhizogenes
  CDS (1)..(1959): transl_table=11
atgtcggacaagatttatccggtcaccaaaccggtggagagccatgcgctgatcaataaggccgagtaccaggaatggtacgaggagagtgtcgctagccccgagcagttctggggcaaacacggcaagcgcatcgactggttcaagccttacacccgcgtaaaggacacctcttttaccggggatgtctcgatcaaatggttcgaggacggtgagaccaatgtctcctacaactgcatcgaccggcacctcgcaacaaacggtgatcaggtcgccatcatatgggaaggtgacgatccatcgctcgacaggaaggtcacctaccgcgagctttacgagcacgtctgtcgtatggcgaacgtcttgaagaagcacggggtcaagaagggcgatcgtgtcactatctacatgccgatggtgccggaagcggcctatgcgatgctcgcctgcgcccgcatcggcgcaatccattccgtggtgtttggcggcttcagtcccgaggcgctgggtggccgcatcgtcgattgtgaatcgaccttcgtcatcacctgcgatgagggcctgcgcggcggcaagccggttccgttgaaagccaatgtcgacaaggcgatcgacatcgccgcgcgcggtcatgtcatggtcaagaacgtgctcgtcatccgccgcaccggcagcccgctcagttgggcgccgggccgcgacctctggcatcacgaggaagcagccaccgtttcggccgactgcccgcccgagccaatgaacgccgaggatccactgttcatcctctatacttcaggctcgaccggcaaaccgaagggcgttctccacaccaccggcggctatctcgtctacgcctcgatgacccacgaatatgtcttcgattaccagcacggcgatatctactggtgcactgccgacgtcggctgggtcacgggacactcctatatcgtctacggaccgctcgccaactgcgcaacgacgctgatgttcgaggggatcccgacattccccgatgccggccggttctgggatgtgatcgataagcacaaggtcaacatcttctataccgccccgaccgcaatccgttcgctgatgggcgccggcgatgatttcgtcaaacgatccagccgatccagcctgtggttgcttggctcggtcggcgagccgatcaaccccgaagcctgggaatggtactatcacacggtcggcgacgggcgctgccctgttgtcgatacctggtggcagacggaaaccggcggcatcatgatcacgccgctgccgggtgcgaccgacctgaagccaggctcggccactcggcccttcttcggcatcaggccggagctcgtcgatgccgaaggcaagcccatcgaaggggccgccgacggcaatctctgcatcgccgacagctggccaggtcaggcgcgttccgtctatggcgatcacaagcgcttcatccagacctacttctccacctacgagggcaagtatttcaccggcgacggctgtcgccgtgatgccgacggctattattggatcacaggtcgcgtcgacgacgtcctcaatgtctccggccaccggctggggacggcggaagtcgagtccgccctggtttcgcatcacctcgtgtccgaagccgctgtcgtcggctatccacacaacatcaagggccagggcatctattgctatgtcacgctgatggcgggcagcgaagggtccgaggagttgcgccagcagctggtcaagcatgtccgcgcggaaatcggcccgatcgcgtcgcctgataagatccagttcgcgccgggcctgccgaagacccgctcgggaaagatcatgcgccgcattctgcgcaagatcgccgaggacgatttcgggtcgctcggcgacacctcgacgcttgccgatcccgctgtcgtcgacgatctgatcgtcaaccgccagaacagggccgaggcggcctag

SEQ ID NO: 151337 - protein, 652 aa, Agrobacterium rhizogenes
MSDKIYPVTKPVESHALINKAEYQEWYEESVASPEQFWGKHGKRIDWFKPYTRVKDTSFTGDVSIKWFEDGETNVSYNCIDRHLATNGDQVAIIWEGDDPSLDRKVTYRELYEHVCRMANVLKKHGVKKGDRVTIYMPMVPEAAYAMLACARIGAIHSVVFGGFSPEALGGRIVDCESTFVITCDEGLRGGKPVPLKANVDKAIDIAARGHVMVKNVLVIRRTGSPLSWAPGRDLWHHEEAATVSADCPPEPMNAEDPLFILYTSGSTGKPKGVLHTTGGYLVYASMTHEYVFDYQHGDIYWCTADVGWVTGHSYIVYGPLANCATTLMFEGIPTFPDAGRFWDVIDKHKVNIFYTAPTAIRSLMGAGDDFVKRSSRSSLWLLGSVGEPINPEAWEWYYHTVGDGRCPVVDTWWQTETGGIMITPLPGATDLKPGSATRPFFGIRPELVDAEGKPIEGAADGNLCIADSWPGQARSVYGDHKRFIQTYFSTYEGKYFTGDGCRRDADGYYWITGRVDDVLNVSGHRLGTAEVESALVSHHLVSEAAVVGYPHNIKGQGIYCYVTLMAGSEGSEELRQQLVKHVRAEIGPIASPDKIQFAPGLPKTRSGKIMRRILRKIAEDDFGSLGDTSTLADPAVVDDLIVNRQNRAEAA

SEQ ID NO: 151338 - DNA, 1944 bp, Stenotrophomonas maltophilia K279a
  CDS (1)..(1944): transl_table=11
atggctgatatctaccccgtcgatccgcagttcgccgccaaggcacgcatcgacaagacgtcgtacgaacagcagtaccaggcttcggtgaccgacccggatggtttctggggcaaggccgccgagcgcctgcagtggatgcgcaagccgaccaggatcaagaacgtcagctacgacctgtccgacttccacatcaagtggttcgaggatggcgagctcaatgccagcgtgaactgcctggaccgccagctggaaacgcgcggcgacaagaccgccctgctgttcgagccggacggcccggatgcaccggcccagcacgtgacctatcgcgagctgtacgagcgcacctgccgcctcggcaacgcgctgcgcaacctcggggtcaagaagggcgaccgcgtcaccatctacctgccgatgatcgtcgacgccgcggtggccatgctggcctgcgcgcgcatcggggcgatccactcggtggtgttcggtggcttcgcaccgaactcgatcgccgaccgcgtcagcgactgccagagcaagctgatcatcaccgccgacgagggcctgcgcggtggccgcaggattccgctcaaggccaacgtcgatgccgcgctgaagctgccgggcaccaataccgtggaaaccgtgctggtggtgcgccacaccggcggtgccgtggacatgcaggccccgcgcgaccgctggttccacgatgtggtggacagccagccggccacctgcgaaccggaacgcatgaacgcggaagacccgctgttcatcctctacacctccggttccaccggcaagccgaagggcgtgctgcacaccaccggcggttacctgctgtacgcggcctacacccatgaagcggtgttcgacctgcgcgaggacgacatctactggtgcaccgccgacgtcggctgggtcaccggccacagctacatcgtgtacgggccactggccaacggcgcgacctcgctgatgttcgaaggcgtgccgaactacccggacacctcgcgcttctggaacgtcatcgacaagcacaaggtgaccatcttctataccgccccgaccgccatccgtgcgctgatgcgcgaaggcgaggagccggtgaagaagacctcgcgcgcctcgctgcgcctgctcggcagcgtcggcgagccgatcaacccggaagcctggcgctggtactacgaggtggtcggcgacagccgctgcccgatcgtcgatacctggtggcagaccgagaccggcggcatcctgatctcgccgctggccggcgcgatggacctcaagccgggttcggccaccctgcccttcttcggcgtgcagccggcgctggtcaatgccgatggcgagatccaggacggcccgaccgagggcaacctgatcatccgtgattcctggccgggccagatgcgcacggtgtacggcgaccaccagcgtttcatcgatacgtatttccgcacctacccgggcagctacttcaccggcgacggctgccgacgcgacgaggacggctattactggatcaccggccgcgtcgacgacgtgatcaacgtgtctggccaccgcatcggcaccgcagaagtggaaagcgcgctggtttcgcacccgaaggtggccgaggcggccgtggtcggcttcccgcacgacgtgaagggccagggcatctacgcctacgtcaccctggtggccgaagaggcaccgagcgacgagctgcacaaggagctgatcgcctgggtgcgcaaggagatcggcccgatcgccacgccggaccacctgcagtgggcgccgggcctgccgaagacccgctcgggcaagatcatgcgccgcatcctgcgcaagatcgccgagaacgcgccggaccagctcggcgacacttcgaccctggccgatccgtcggtggtggcgtcactggtggacgagcgcaaggtgcgctga

SEQ ID NO: 151339 - protein, 647 aa, Stenotrophomonas maltophilia K279a
MADIYPVDPQFAAKARIDKTSYEQQYQASVTDPDGFWGKAAERLQWMRKPTRIKNVSYDLSDFHIKWFEDGELNASVNCLDRQLETRGDKTALLFEPDGPDAPAQHVTYRELYERTCRLGNALRNLGVKKGDRVTIYLPMIVDAAVAMLACARIGAIHSVVFGGFAPNSIADRVSDCQSKLIITADEGLRGGRRIPLKANVDAALKLPGTNTVETVLVVRHTGGAVDMQAPRDRWFHDVVDSQPATCEPERMNAEDPLFILYTSGSTGKPKGVLHTTGGYLLYAAYTHEAVFDLREDDIYWCTADVGWVTGHSYIVYGPLANGATSLMFEGVPNYPDTSRFWNVIDKHKVTIFYTAPTAIRALMREGEEPVKKTSRASLRLLGSVGEPINPEAWRWYYEVVGDSRCPIVDTWWQTETGGILISPLAGAMDLKPGSATLPFFGVQPALVNADGEIQDGPTEGNLIIRDSWPGQMRTVYGDHQRFIDTYFRTYPGSYFTGDGCRRDEDGYYWITGRVDDVINVSGHRIGTAEVESALVSHPKVAEAAVVGFPHDVKGQGIYAYVTLVAEEAPSDELHKELIAWVRKEIGPIATPDHLQWAPGLPKTRSGKIMRRILRKIAENAPDQLGDTSTLADPSVVASLVDERKVR

SEQ ID NO: 151340 - DNA, 1956 bp, Rhizobium etli CIAT 652
  CDS (1)..(1956): transl_table=11
atgtcggataagatccatccggtgccgaagcaggtgaaggcgcaggccctcatcgataaggaaaagtacctgaaatggtacgaggaaagcgtcgagaacccggacaagttctggggcaagcacggcaagcggatcgactggttcaagccctataccaaggtcaagaacacctcctttaccggcaaggtctcgatcaaatggttcgaggacggccagaccaacgtttcctataattgcatcgaccgccatctgaagacgaacggcgaccaggtggcgatcatctgggaaggcgacaacccctatatcgataagaagatcacctataacgagctctacgagcacgtctgccggatggcgaatgtgttgaagaagcacggcgtcaagaagggcgatcgcgtcaccatctatatgccgatgatccccgaggcggcttacgcgatgctcgcctgcgcccgcatcggcgcggtgcattcggtcgtcttcggcggtttctcccccgaggcgctggccgggcgcatcgtcgactgcgaatccaccttcgtcatcacctgcgacgaaggtctgcgcggcggcaagccggtgccgctgaaggacaacaccgatacggcgatccatatcgccgctcgccagcatgtgcatgtcagcaaggtgctggtcgtgcgccgcaccggcggcaagaccggctgggcgccgggccgcgatctctggtatcaccaggaagtcgccaccgtgaaagccgaatgcccgccggtaaagatgaaagcggaagatccgctgttcattctttatacgtcaggttcgaccggcaagccgaagggcgtgctgcatacgacgggcggttatctcgtctatgcttccatgactcatgaatatgtcttcgactatcatcatggcgacatctactggtgcaccgccgatgtcggctgggtcaccggccattcctacatcgtctacgggccgctcgccaactgcgccacgacgctgatgttcgaaggcgtgccgaatttccccgatcagggccgcttctgggaagtcatcgacaaacacaaggtcaatatattctataccgcaccgacggcgatccgctcgctgatgggcgccggcgacgacttcgtcacgcgctcttcgcgctcttcgctgcgcctgctcggcacggtcggcgagccgatcaacccggaagcctgggagtggtattacaatgtcgtcggcgacaagcgctgccctgtcatcgatacctggtggcagacggagaccggcggccacatgatcacgccgctgccgggtgcgatcgatctgaaacccggttcggcgacggtgccgttcttcggcgtcaagccgcagctggtcgataatgagggcaaggtgctggaaggggcagccgacggcaatctctgcatcaccgacagctggccgggccagatgcgcacggtctatggcgatcacgagcgcttcatccagacctatttctcgacttacaagggcaagtacttcaccggcgacggctgccggcgcgacgaagacggctattactggatcaccggccgtgtcgacgacgtgctgaacgtctccggccaccggctcggcaccgcggaggtggaatcggcgctcgtctcgcacaatctggtttcggaagccgcggtcgtcggttatccgcatgcgatcaagggccaggggatctattgctatgtgacgctgatggccggccacgaagggacggacacccttcgccaggaactggtgaagcatgtccgcgccgaaatcgggccgatcgcctcgcccgacaagatccagtttgcgcccggcctgccgaagacccgctcgggcaagatcatgcgccgcatcctgcgcaagatcgctgaggatgatttcggcgctctcggcgatacctcgacacttgccgatcccgcggtcgtcgatgatctgatcgccaaccggcagaacaaggcgacggcctga

SEQ ID NO: 151341 - protein, 651 aa, Rhizobium etli CIAT 652
MSDKIHPVPKQVKAQALIDKEKYLKWYEESVENPDKFWGKHGKRIDWFKPYTKVKNTSFTGKVSIKWFEDGQTNVSYNCIDRHLKTNGDQVAIIWEGDNPYIDKKITYNELYEHVCRMANVLKKHGVKKGDRVTIYMPMIPEAAYAMLACARIGAVHSVVFGGFSPEALAGRIVDCESTFVITCDEGLRGGKPVPLKDNTDTAIHIAARQHVHVSKVLVVRRTGGKTGWAPGRDLWYHQEVATVKAECPPVKMKAEDPLFILYTSGSTGKPKGVLHTTGGYLVYASMTHEYVFDYHHGDIYWCTADVGWVTGHSYIVYGPLANCATTLMFEGVPNFPDQGRFWEVIDKHKVNIFYTAPTAIRSLMGAGDDFVTRSSRSSLRLLGTVGEPINPEAWEWYYNVVGDKRCPVIDTWWQTETGGHMITPLPGAIDLKPGSATVPFFGVKPQLVDNEGKVLEGAADGNLCITDSWPGQMRTVYGDHERFIQTYFSTYKGKYFTGDGCRRDEDGYYWITGRVDDVLNVSGHRLGTAEVESALVSHNLVSEAAVVGYPHAIKGQGIYCYVTLMAGHEGTDTLRQELVKHVRAEIGPIASPDKIQFAPGLPKTRSGKIMRRILRKIAEDDFGALGDTSTLADPAVVDDLIANRQNKATA

SEQ ID NO: 151342 - DNA, 1938 bp, Cellvibrio japonicus Ueda107
  CDS (1)..(1938): transl_table=11
atgtcagaagcaaacctgtatccggtccccgaacatttcaagaaaaacgccgctattgatctggctcgttacaaggctatgtatgagcagtcggtcaactcacccgacaccttttgggcggaacaagccacgtccttcctgacgtggcagcagccttggacccaggtcaccaacagcaacctgcgtaaaggcgaagtggcctggtttattaacggcaaattgaatgtcagtgttaattgtatcgatcgccacctgccagcccgagccaatcaaaccgctattatttgggaaggcgatgatccggcggaagatcaattcattacctatcaggaattgcacgaccaggtgtgccgcttgaccaatgccctgcgcgaacgcggtgtcaagaagggcgatcgcgtttgtatctacatgcccatgattcccgaagccagctatgcaatgctggcctgtgcccggatcggtgccatccattcagtcgtatttggcggtttttcaccagaggcgctgaaggatcgtatccaggatgccgattgccaggtggtcattaccgctgatgaaggcctccggggcggcaagcgggttcccctcaaaaagaatactgatatcgcacttaaccactgcccgaaggtacatacctgtatcgtggtaaagcgtactggcggcgatgtccagtggcgtgaagggcgcgatttctggtacgaggatttggttgctcaccagcccagtgaggcagagtccgccatcgtcgattccgaagatccgctgtttatcctttatacctctggctctaccggaaaacccaaaggggtattgcacacaacgggcggttacttgttgcaagccgctatgactcacaagtatgtgtttgattatcaggaaggcgacatctactggtgcactgccgatgtgggctgggtgaccggccatagctatatcgtctatgggccgttggctaatggtgcaaccacactgatgtttgaaggtgtgcccacctatcccgatgcttcccgctgctggcaagtcatcgataagcatggcgtgaatattttctacaccgcgcctaccgcgatccgcgcacttatgggggctggcaatgactatgtcaccaaaacctcgcgcgctagcctgaaggtattgggtagcgtcggtgaacccattaacccggaagcctgggaatggtattaccgcgtggttggcgacagccgctgtccgatcatggatacctggtggcagacggaaaccggtgcccatatgctgacgcccttgcccggggccattgatctcaagccgggctcggcgactgtgcctttcttcggtgtccaacccgtattgctcgatgcagacggtaaggaagttgtcggcgccggtgagggtaacctgtgcattaaggcagcatggccgggccagattcgcaccgtattcggcgatcaccaacgctgtgtcgacacctattacagcacctatcccggctactactttaccggcgatggcgcccgccgcgatgctgatggttactactggatcaccggccgtgtggacgatgtgcttaatgtatccggtcaccgtatggggactgccgaagtggagagcgcactggtgctccacgacaaggtcgctgaagcggcggtagtggggtatccgcatgacatcaaggggcagggcatctacgcttacgtcaccttgatggccggcgagcaacccagtgatgaattgaaaaaagaattgctggcgctggtggtgaaagagattggtgccattgcgcgcccggatattatccagtgggcgccgggcttgccgaaaacccgttcgggcaagatcatgcgccgcatactgcgcaaaatcgctgccaatgagttggatagcctgggcgacacctccaccctggctgacccggcggtggtgaatgagttaattgataatcgcgctaaccagtag

SEQ ID NO: 151343 - protein, 645 aa, Cellvibrio japonicus Ueda107
MSEANLYPVPEHFKKNAAIDLARYKAMYEQSVNSPDTFWAEQATSFLTWQQPWTQVTNSNLRKGEVAWFINGKLNVSVNCIDRHLPARANQTAIIWEGDDPAEDQFITYQELHDQVCRLTNALRERGVKKGDRVCIYMPMIPEASYAMLACARIGAIHSVVFGGFSPEALKDRIQDADCQVVITADEGLRGGKRVPLKKNTDIALNHCPKVHTCIVVKRTGGDVQWREGRDFWYEDLVAHQPSEAESAIVDSEDPLFILYTSGSTGKPKGVLHTTGGYLLQAAMTHKYVFDYQEGDIYWCTADVGWVTGHSYIVYGPLANGATTLMFEGVPTYPDASRCWQVIDKHGVNIFYTAPTAIRALMGAGNDYVTKTSRASLKVLGSVGEPINPEAWEWYYRVVGDSRCPIMDTWWQTETGAHMLTPLPGAIDLKPGSATVPFFGVQPVLLDADGKEVVGAGEGNLCIKAAWPGQIRTVFGDHQRCVDTYYSTYPGYYFTGDGARRDADGYYWITGRVDDVLNVSGHRMGTAEVESALVLHDKVAEAAVVGYPHDIKGQGIYAYVTLMAGEQPSDELKKELLALVVKEIGAIARPDIIQWAPGLPKTRSGKIMRRILRKIAANELDSLGDTSTLADPAVVNELIDNRANQ

SEQ ID NO: 151344 - DNA, 1953 bp, Rhodopseudomonas palustris TIE-1
  CDS (1)..(1953): transl_table=11
atgtccgagaagatctacgacgtgcccgcagagtgggcgagccgcgccttcgtcgacgacgccaaatatcgccagatgtacgagcgctcggtcacggatccgaccggattctgggcggagcacgccaagcgcgtcgactggatcaaggcgccgaccaagatcgacaactggtcgttcgcgcccggaaacgtttcgatcaagtggttcgaggacggcgtcctcaacgccgcctacaactgcatcgaccgccacctcgacaagcgcggcgaccaggtcgcgatcatctgggaaggcgacgatccttcgcagtcgcgcagcatcacctatcgcgagctgcacgacgaagtctgcaagttcgccaacatcctgcgcaaccgcaatgtcggcaagggcgaccgcgtcaccatctatctgccgatgattccggaagccgcgttcgcgatgctggcctgcgcccggatcggcgcgatccactcggtggtattcgccggcttctcgccggacagcctcgcgggccgcatcaacgactgcaactcgaagatcgtcatcaccgccgacgaaggcctgcgcggcggccgcaaggtgccgctgaaggccaatgtcgatgcggcgctgaagaagtgcgacggcgtcgactgggtgatggtggtcaaacgcaccggagccgcggtcgaaatggatgacgtccgcgacttctggtaccacgaagccgccgaggtggtgacgaccgagtgcccggtcgagcacatgcatgccgaagacccgctgttcatcctctacacctcgggctcgaccggccagccgaagggcgtgctgcataccactggcggctatctggtgttcgcctcgatgacgcaccaatacgtcttcgattatcacgacggcgacatctactggtgcaccgccgacgtcggctgggtcaccggccacagctacatcctgtacgggccgctcgccaacggcgccacgacgctgatgttcgaaggcgtgccgaactatccgaccaattcccggttctgggaagtgatcgacaagcacaaggtcaacatcttctacaccgcaccgaccgcgatccgcgcgctgatgcaggccggcgacgagccggtgaagaagacctcgcgcaagtcgctccgcctgctcggctcggtcggcgagccgatcaatccggaagcctgggagtggtaccaccgcgtcgtcggcgaggaccgctgcccgatcgtcgacacctggtggcagaccgagaccggcggcatcctgatcaccccgctgcccggcgccaccaagctgaagcccggctctgcgacccggccgttcttcggcgtggtacccgagatcctcgatccggaaggcaacgttctggaaggcgaatgcaccggcaacctctgcctcgcccgctcctggccgggacagatgcggaccgtgtacggcgaccatgcccgattcgagcagacctacttctcggcctacaagggcaagtacttcaccggtgacggctgccggcgcgacgccgacggcttctactggatcaccggccgggtcgacgacgtcatcaacgtctcgggtcaccgcatgggcaccgccgaggtcgaatcctcgctggtggcgcatccgaaggtgtccgaggcggcggtggtcggctatccgcacgacatcaagggccagggcatctacgcctatgtgaccctgatggccggcgaagagccgaccgaggacctgcgcaaggaactggtcgcctgggtccgcaaggacatcggcccgatcgcctcgcccgacctgatccagttcgcgcccggcctgcccaagacccgctccggcaagatcatgcgccgaatcctacgcaagatcgcggaggacgaaccgtcctcgctcggcgacacctcgacgctggccgatcccgcggtggtcgacgatctggtcgagcatcgccagaacaagcaccacaaggcgagctga

SEQ ID NO: 151345 - protein, 650 aa, Rhodopseudomonas palustris TIE-1
MSEKIYDVPAEWASRAFVDDAKYRQMYERSVTDPTGFWAEHAKRVDWIKAPTKIDNWSFAPGNVSIKWFEDGVLNAAYNCIDRHLDKRGDQVAIIWEGDDPSQSRSITYRELHDEVCKFANILRNRNVGKGDRVTIYLPMIPEAAFAMLACARIGAIHSVVFAGFSPDSLAGRINDCNSKIVITADEGLRGGRKVPLKANVDAALKKCDGVDWVMVVKRTGAAVEMDDVRDFWYHEAAEVVTTECPVEHMHAEDPLFILYTSGSTGQPKGVLHTTGGYLVFASMTHQYVFDYHDGDIYWCTADVGWVTGHSYILYGPLANGATTLMFEGVPNYPTNSRFWEVIDKHKVNIFYTAPTAIRALMQAGDEPVKKTSRKSLRLLGSVGEPINPEAWEWYHRVVGEDRCPIVDTWWQTETGGILITPLPGATKLKPGSATRPFFGVVPEILDPEGNVLEGECTGNLCLARSWPGQMRTVYGDHARFEQTYFSAYKGKYFTGDGCRRDADGFYWITGRVDDVINVSGHRMGTAEVESSLVAHPKVSEAAVVGYPHDIKGQGIYAYVTLMAGEEPTEDLRKELVAWVRKDIGPIASPDLIQFAPGLPKTRSGKIMRRILRKIAEDEPSSLGDTSTLADPAVVDDLVEHRQNKHHKAS

SEQ ID NO: 151346 - DNA, 1980 bp, Chlorobaculum parvum NCIB 8327
  CDS (1)..(1980): transl_table=11
atggctactgagcaaacgaaaggccagtcctctgaatcgatcagttcggttctctccgagcggaggaagtttccaccgccggaagcgttctcttcccagtcgcacatttcaagcatggagcagtacgaaaaactctatgccgatgcagccgcagatcccgacaagtactggggcgatctggcggaacagttccactggttcaagaaatgggactcggtgcttcaatggaatgctccgtatgccaaatggttcaatggcggcacgaccaacatcgcctacaactgccttgacgtacacgtcaacagctggcgcaagaacaaggcggccatcatgtgggaaggcgaagagggcaacgagcgcatcctcacctatggcgaactgcaccgccaggtcagcaaattcgccaacgtcctgaaaatcgccggtatcaaaccgggtgacaaagttgccatctacatgggcatggtgcccgaactggtcatcgccgtgctcgcctgtgctcgtgtcggtgcagtgcacaacgtgatcttcgccggcttctcggcacactccatcaccgagcgcgtcaacgactcccacgccaagctggtcatctgctccgacggcacccgccgccgtggtggcaccatcaacctcaagaatatcgtcgacgaagcgatcgtcaacactccttcggtcaaaaacgtcatcgtcctcaaagtgaccggcgaagagatccacatgcacgacggcatggatcactggtggcacgacctgatgggcctggccatggacgaatgcgaaccggcacaggtcgattccgagcacccgctctttttgctctacaccagcggctcaaccggcaaaccgaaaggcatcctgcacaccaccgccggctatatggtgcacgctgccagctcgttcaaatatgtgttcgacatcaaggacgaagacatttacttctgcaccgccgacatcggctggatcaccggccacacctacatgatctacggcccgctgctcaacggcgcgaccgtcttcatgtacgaaggtgcgccgaactacccgcagtgggatcgcttctgggacatcatcaaccgccacaagatcacgattctctacaccgctccaacggccatccgtgccttcatccgcgccggtaacgagtgggtcaccaagcacgacctcagctcgctcaggctgctcggcacggtcggcgaaccgatcaaccccgaggcctggatgtggtatcacaagtatgtcggtcaggagaagtgccccatcgtggacacctggtggcagaccgaaaccggcggcatcatggtctccccgatgccgggcgcaaccccgaccaagccgggcacggccacccgcccgctgccgggcatcatggtcgatgtcgtgcgcaaggacggcacgccgtgcaacgccaacgaaggcggctacctggtcgtcaaacacccgtggccctcgatgctccgcaccatttacggcgataacgagcgctacgaaaagacctactggtcggagttccccggcatctacttcaccggcgacggtgcgcgcaaggacgatgacggctacgtctggatcatgggtcgcgtcgatgacgtggtcaacgtctccggccaccgcctcggcaccagcgaggtcgagagcgctctcgtctcccacgaagcggtcgcggaagccgccgtggtcagccgtccggacgacatcaagggcaacgcgctggtcgcattcgtgacgctgaaggatggctacgaaggcgatgccaaactgcgcgactcgctcggcaagcatgttgccaaggagatcggcgccatcgccaagccggacgaaatccgctgggccaaaggtctgccgaaaacccgcagcggcaaaatcatgcgccgcctgcttcgcgagctcgccacctccaacgagatcaaaggcgacgtcaccaccctcgaagaccttggcgtcatcgagaacctccgcgaacaggaagacgaaggctga

SEQ ID NO: 151347 - protein, 659 aa, Chlorobaculum parvum NCIB 8327
MATEQTKGQSSESISSVLSERRKFPPPEAFSSQSHISSMEQYEKLYADAAADPDKYWGDLAEQFHWFKKWDSVLQWNAPYAKWFNGGTTNIAYNCLDVHVNSWRKNKAAIMWEGEEGNERILTYGELHRQVSKFANVLKIAGIKPGDKVAIYMGMVPELVIAVLACARVGAVHNVIFAGFSAHSITERVNDSHAKLVICSDGTRRRGGTINLKNIVDEAIVNTPSVKNVIVLKVTGEEIHMHDGMDHWWHDLMGLAMDECEPAQVDSEHPLFLLYTSGSTGKPKGILHTTAGYMVHAASSFKYVFDIKDEDIYFCTADIGWITGHTYMIYGPLLNGATVFMYEGAPNYPQWDRFWDIINRHKITILYTAPTAIRAFIRAGNEWVTKHDLSSLRLLGTVGEPINPEAWMWYHKYVGQEKCPIVDTWWQTETGGIMVSPMPGATPTKPGTATRPLPGIMVDVVRKDGTPCNANEGGYLVVKHPWPSMLRTIYGDNERYEKTYWSEFPGIYFTGDGARKDDDGYVWIMGRVDDVVNVSGHRLGTSEVESALVSHEAVAEAAVVSRPDDIKGNALVAFVTLKDGYEGDAKLRDSLGKHVAKEIGAIAKPDEIRWAKGLPKTRSGKIMRRLLRELATSNEIKGDVTTLEDLGVIENLREQEDEG

SEQ ID NO: 151348 - DNA, 1944 bp, Stenotrophomonas maltophilia R551-3
  CDS (1)..(1944): transl_table=11
atggctgatatctaccccgtcgatccgcagttcgccgccaaggcacgcatcgacaagacgtcctatgaacagcagtaccaggcttcggtcaccgacccggatggtttctggggcaaggccgccgagcgcctggagtggatgcgcaagccgacgaagatcaagaacgtcaactacgacctgtccgacttccacatcaagtggttcgaggatggcgagctcaatgccagcgtgaactgcctggaccgccagctggagacgcgtggcgacaagaccgccctgctgttcgagccggacggcccggacgcaccggcgcagcacgtgacctatcgcgagctgtacgagcgtacctgccgcctcggcaatgcgctgcgcaacctcggcgtcaagaagggcgaccgggtcaccatctacctgccgatgatcgtcgacgccgccgtggccatgctggcctgcgcgcgcatcggtgcgatccactcggtggtgttcggtggcttcgcgccgaactcgatcgccgaccgcgtcagcgactgccagagcaagctgatcatcaccgccgacgaaggtctgcgcggtggtcgcaggattccgctgaaggccaatgttgatgccgcgctgaagctgcccggcaccaacaccgtcgaaaccgtgctggtggtgcgtcacaccggtggcgcggtggacatgcaggccccgcgcgaccgctggttccacgacgtggtggacagccagcctgccatctgcgagccggaacgcatgaacgcggaagacccgctgttcatcctctacacctccggttccaccggcaagccgaagggcgtgctgcacaccaccggtggctacctgctgtacgcggcctacacccatgaagcggtgttcgacctgcgcgaggacgacatctactggtgcaccgccgacgtcggctgggtcaccggccacagctacatcgtgtacggcccgctggccaacggcgcgacctcgctgatgttcgaaggcgtgccgaactacccggatacctcgcggttctggaacgtgatcgacaagcacaaggtgtcgatcttctataccgcgccgaccgccatccgtgcactgatgcgcgagggcgaggagccggtgaagaagacctcgcgtgcctcgctgcgcctgcttggcagcgttggcgaaccgatcaacccggaagcctggcgctggtactacgaagtggttggcgacagccgctgcccgatcgtcgatacctggtggcagaccgagaccggcggcatcctgatttcgccgctggccggcgcgatggatctcaagccgggttcggccaccctgcccttcttcggcgtgcagccggcgttggtcaatgccgatggcgagatcaaggacggcccgaccgagggtaacctgatcatccgtgattcctggccgggccagatgcgcacggtgtacggcgaccaccagcgcttcatcgatacctatttccgtacctacccgggcagctacttcaccggcgacggttgccgccgcgatgaagacggctactactggatcacgggccgcgtcgatgatgtgatcaacgtgtccggccaccgcatcggcaccgccgaagtggaaagcgcgctggtctcgcacccgaaggtggccgaagccgccgtggttggtttcccgcacgacgtgaagggccagggcatctatgcctacgtaaccctggtggccgaagaggcgccgaccgatgagctgcacaaggagctgatcgcgtgggtgcgcaaggagatcggcccgatcgccacgccggaccacctgcagtgggcgccgggcctgcccaagacccgctcgggcaagatcatgcgccgcatcctgcgcaagatcgccgagaacgcaccggaccagctcggcgacacctcgaccctggccgatccgtcggtggtggcgtcgctggtggacgagcgcaaggtgcgctga

SEQ ID NO: 151349 - protein, 647 aa, Stenotrophomonas maltophilia R551-3
MADIYPVDPQFAAKARIDKTSYEQQYQASVTDPDGFWGKAAERLEWMRKPTKIKNVNYDLSDFHIKWFEDGELNASVNCLDRQLETRGDKTALLFEPDGPDAPAQHVTYRELYERTCRLGNALRNLGVKKGDRVTIYLPMIVDAAVAMLACARIGAIHSVVFGGFAPNSIADRVSDCQSKLIITADEGLRGGRRIPLKANVDAALKLPGTNTVETVLVVRHTGGAVDMQAPRDRWFHDVVDSQPAICEPERMNAEDPLFILYTSGSTGKPKGVLHTTGGYLLYAAYTHEAVFDLREDDIYWCTADVGWVTGHSYIVYGPLANGATSLMFEGVPNYPDTSRFWNVIDKHKVSIFYTAPTAIRALMREGEEPVKKTSRASLRLLGSVGEPINPEAWRWYYEVVGDSRCPIVDTWWQTETGGILISPLAGAMDLKPGSATLPFFGVQPALVNADGEIKDGPTEGNLIIRDSWPGQMRTVYGDHQRFIDTYFRTYPGSYFTGDGCRRDEDGYYWITGRVDDVINVSGHRIGTAEVESALVSHPKVAEAAVVGFPHDVKGQGIYAYVTLVAEEAPTDELHKELIAWVRKEIGPIATPDHLQWAPGLPKTRSGKIMRRILRKIAENAPDQLGDTSTLADPSVVASLVDERKVR

SEQ ID NO: 151350 - DNA, 1947 bp, Alteromonas macleodii 'Deep ecotype'
  CDS (1)..(1947): transl_table=11
atgaccgccggcaaaacttatcctgtacctgagaatatccttcagtctacacatcttaatgcgtcgcaatatgacgaaatgtacaagcaatctatagatcaacccgaagcgttttggggcgaacatgcgtctattcttgagtggtaccaaaagccaaccaaaattaaaaacacgcattttggtgaaaacgacgtgtctatcaaatggtttgaagacggtgagctaaacgccagctataactgtatcgaccgccatcttgctaataatgccactaaggttgcctttcattgggaaggtgactctcctgaagatagtcaagatattacctaccaagaagtgcactacgaagtatgtaagttagcgaatgcactgaaaggcatgggcgtagcaaaaggtgaccgtgtagctatctatatgccaatggtgccagaggcggcttacgctatgcttgcctgtgcccgaataggggctgttcactcggtgatctttggcggcttctcgccaaacgccattgccgatcgcattaacgacagcagtgcaaaagtcgttattacggctgatgaaggacgccgtgctggaagaagcattcccttaaaagcgaatgtagataaagcgctggcaggcgatgcatgcccgtcgattactcacgtactggtccataaacttactggtggtgacgttgattggaacgaaaagcatgatgtgtggtggcaagatgccgtagacggcatgtctgcccagtgtgagccagaggtaatgaacgcggaagacccgctatttattctttatacatcaggttcaacgggaacgcccaaaggcgtggtgcataccacaggggggtacctgttgtattctgccatgacctttaaatatgcattcgactataaagacgatgatgtttactggtgtacggctgatgtgggttggattacaggccacagctacatggtgtacggccctatggttaacgccgcttcgcaagtcttttttgagggggttccgacgtacccagatgttaagcgcattgctcaagtggtagagaagtacaaagtaaatagcctttacactgcgcctacggctattcgtgcgctaatggctcacggcgatgcgcccgctgaaggttgcgatttatcatcactgcgtttacttggcaccgtgggtgagccgattaaccctgaagcgtgggaatggtatcaccgcgtgattggtcaaggccgctgccccattatcgatacgtggtggcaaaccgaaaccggtggtcacatgattttaccactacccggtgcgacggaattaaaaccaggctcagccagtcgccctttctttggtattcagccggcgttgtttgatgcagatggcaaagagttagagggagcggccgaaggtaacttggtgattaaagacagttggccaagccaagcgcgcacggtatacggcgaccatcagcgttttatcaatacgtattttagtgcatacaaaggggtgtactttaccggtgacggtgcccgctgtgatgaagatggtttctattggatcactggccgcgtagatgacgtgttaaacgtgtcaggtcaccgcctaggcaccgcagaaattgaaagtgcgctggttgctcatcctaaagtggcggaagctgcggtagtaggttttcctcacgatattaaagggcagggcatttacgtttacgtgacaccaaatgaaggggttgaagcagacgaagcgctaaccaaagagcttaaagcgtgggtacgccaagagcttagtccaatagccacgcccgatatgattcagtggtcacacggtttacccaaaacccgctcgggtaaaattatgcgccgcattcttagaaaaatcgcggctaacgagcacgagcaattaggtgacacttctacattggcggatccgtcggttgttgatacactgatagaggaacgtctaaataagtaa

SEQ ID NO: 151351 - protein, 648 aa, Alteromonas macleodii 'Deep ecotype'
MTAGKTYPVPENILQSTHLNASQYDEMYKQSIDQPEAFWGEHASILEWYQKPTKIKNTHFGENDVSIKWFEDGELNASYNCIDRHLANNATKVAFHWEGDSPEDSQDITYQEVHYEVCKLANALKGMGVAKGDRVAIYMPMVPEAAYAMLACARIGAVHSVIFGGFSPNAIADRINDSSAKVVITADEGRRAGRSIPLKANVDKALAGDACPSITHVLVHKLTGGDVDWNEKHDVWWQDAVDGMSAQCEPEVMNAEDPLFILYTSGSTGTPKGVVHTTGGYLLYSAMTFKYAFDYKDDDVYWCTADVGWITGHSYMVYGPMVNAASQVFFEGVPTYPDVKRIAQVVEKYKVNSLYTAPTAIRALMAHGDAPAEGCDLSSLRLLGTVGEPINPEAWEWYHRVIGQGRCPIIDTWWQTETGGHMILPLPGATELKPGSASRPFFGIQPALFDADGKELEGAAEGNLVIKDSWPSQARTVYGDHQRFINTYFSAYKGVYFTGDGARCDEDGFYWITGRVDDVLNVSGHRLGTAEIESALVAHPKVAEAAVVGFPHDIKGQGIYVYVTPNEGVEADEALTKELKAWVRQELSPIATPDMIQWSHGLPKTRSGKIMRRILRKIAANEHEQLGDTSTLADPSVVDTLIEERLNK

SEQ ID NO: 151352 - DNA, 1947 bp, Phenylobacterium zucineum HLK1
  CDS (1)..(1947): transl_table=11
atgagccacgaccagtccttcccgcctcccgccgcctgggcccgcgacgccctggtggaccggcggcgatacgaggacctcgtggccctggaggcccgcgaccccgacgccttctggcgcgaggtggccgggcggctcgactgggagacgcccttcaccaaggtgaaggacgtcagcttcgaccttacggacttccgcatccgctggttcgaggacgggcggctcaacgcgtcggtcaactgcatcgaccggcacctggcggcgcgcggcgaccagacggcgatcatctgggagggggacgatcccgccgcgagccgccgcatcacctaccgcgagctgcaccgccaggtgtgccggatggccaacgtcctcaagcggaggggcgtccgccggggcgaccgggtgacgatctacctgccgatgatcccggaggcggcctacgccatgctggcctgcgcccggatcggcgcgatccactcggtcgtcttcgcgggcttctcgcccgacagcctggcgggacggatcaacgactgcgactcccgcctcgtcatcaccgccgacgaaggcgttcgcggcggcaagcgcgtcccgctgaaggcgaatgtggacgaggcgctggagcatgcgcccggggtcgagaccgtgctggtcgtcacccgcaccggcgtcgccacctcgctgaaagccggccgcgacttcgtctacgaggccgaggccgccgaggtcgccgacgactgccccgccgaggcgatgggcgccgaggatcccctgttcatcctctacacctcgggctcgacgggccgtcccaagggcgtgctgcacaccaccggcggctatctcgcctgggctgcctggacccacgaggcggtcttcgactaccgcccgggccaggtctactggtgcaccgcggacgtgggctgggtgaccggccacagctacatcgtctacggccccctcgcgaacggggccacgaccctgatgttcgagggcgtgccgaactatccctcgctcagccgctgctggcaggtgatcgacaagcaccaggtcgagatcttctacaccgccccgaccgccatccgcgccctgatgcgcgagggcgaggcgccggtggcccgcacgtcccgcaggtcgctgcgcctgctgggctcggtgggcgagccgatcaaccccgaggcctggctctggtaccatcgcgtggtgggcgagcaccgctgcccgatcgtcgacacctggtggcagaccgagaccggcggaatcctgatctcgcccctgcccggcgccacgacgctgaagcccggctcggccacccggccgctgcccggcgtgaagctggccctggtggacgccgacggacggccgctcgagggcgcgggcgagggcaacctgtgcctgaccgacagctggccaggccagatgcgcacggtctggaacgaccacgagcgcttcctgcagacctatttctccacctatccggggaagtacttcaccggcgacggctgccgccgcgacgccgacggggactactggatcaccggccgggtggacgacgtgctgaacgtctcgggccaccggctgggcacggccgaggtggagagcgccctcgtcgcccatccgaaggtggccgaggccgcggtggtcggcttcccgcacgaggtgaagggtcaggggatctactgctacgtcaccctcaaggccggcgagcagcccggcccggcgctggagaaggcgctggtggactgggtgcggcgcgagatcggtcccatcgccacgcccgacgtgatccagtgggcccccggcctgcccaagacccgctcgggcaagatcatgcgccgcatcctgcgcaagatcgccgagggcgacaccgccaacctcggcgacacctcgaccctggccgatccgggggtggtggacgacctcgtcgcacgcaagcgcctcgagcccgcctga

SEQ ID NO: 151353 - protein, 648 aa, Phenylobacterium zucineum HLK1
MSHDQSFPPPAAWARDALVDRRRYEDLVALEARDPDAFWREVAGRLDWETPFTKVKDVSFDLTDFRIRWFEDGRLNASVNCIDRHLAARGDQTAIIWEGDDPAASRRITYRELHRQVCRMANVLKRRGVRRGDRVTIYLPMIPEAAYAMLACARIGAIHSVVFAGFSPDSLAGRINDCDSRLVITADEGVRGGKRVPLKANVDEALEHAPGVETVLVVTRTGVATSLKAGRDFVYEAEAAEVADDCPAEAMGAEDPLFILYTSGSTGRPKGVLHTTGGYLAWAAWTHEAVFDYRPGQVYWCTADVGWVTGHSYIVYGPLANGATTLMFEGVPNYPSLSRCWQVIDKHQVEIFYTAPTAIRALMREGEAPVARTSRRSLRLLGSVGEPINPEAWLWYHRVVGEHRCPIVDTWWQTETGGILISPLPGATTLKPGSATRPLPGVKLALVDADGRPLEGAGEGNLCLTDSWPGQMRTVWNDHERFLQTYFSTYPGKYFTGDGCRRDADGDYWITGRVDDVLNVSGHRLGTAEVESALVAHPKVAEAAVVGFPHEVKGQGIYCYVTLKAGEQPGPALEKALVDWVRREIGPIATPDVIQWAPGLPKTRSGKIMRRILRKIAEGDTANLGDTSTLADPGVVDDLVARKRLEPA

SEQ ID NO: 151354 - DNA, 2331 bp, Phenylobacterium zucineum HLK1
  CDS (1)..(2331): transl_table=11
atgtcggacggcgaggttttcccggttcctgaggaatgggccaagcgggcccacatggacgccgcggcctacgaggcggcgtgccgacgggccgacgaggaccccgaaggcttctggcgcgaggtcggcgagcggctcgactggatcacccccttcactcaggtgaaggacgtctcgttcaaccgcgaggacttccgcatccgctggtacgcggacggggcgctgaacgtctcggtcaactgcctggaccggcacatcgagacccgcggcgatcaggtggcgatcatctgggagagcgacgacggccaggtgtcggacaagctcacctaccgccagctcctcgcggagacctgccggtgggcgaacgtgcttaaggccaagggcgtcaagaaaggcgaccgggtcaccatctacctgccgatgatcccggcggccgcggcggcgatgctggcctgcgcccggatcggggcggtgcactcggtggtgttcggcggcttctcgcccgacagcctggccggccggatccaggactgcgactccaggatcgtcatcaccgccaacgagggcctgcgcggcggcaaggtcgtgccgctgaaggccaacgtcgacgaggcgctgaagacctgcccgggcgtgaccgacgtcatcgtggttcgccggacccagaccgaggtcccgatgaccccgggccgcgacgaatactacggcgacctgaagaagaccgtccccgacacctgcgaccccgagccgatgaacgccgaggatccgctgttcatcctctacacctcgggctcgacggggaagcccaagggcgtgctgcacaccaccggcggctatctcgcctgggcggcctacacccatgagctggtgttcgactaccggcccggcgaggtgttctggtgcaccgccgacgtgggctgggtgaccggccacagctacgtcgtctacggcccgctggccaacgcggccaccagcctgatcttcgagggcgtgcccaactatccgacctcgtcgcgcttctgggaggtctgcgacaagcacaaggtcgagatcttctacaccgccccgacggcgatccgcgcgctgatgcgcgagggcgaagagccggtccggcggaccagccgctccacgatccgcctgttgggcaccgtgggcgagccgatcaatcccgaggcctggctctggtaccaccgcgtggtcggcgagggccgctgcccgatcgtcgacacctggtggcagaccgagacgggcgcgtgcctgatgagcccgctgccgggcgcgacgccgctgaagccgggctcgtgcaccaggccgctgcccggcgtgaagccgcagctggtggacgccgaaggcaaggtcctggacggggcgaccagcggcaacctgtgcctgaccgacagctggcccggccagatgcggacagtctacggcgaccacgagcggttcatcgtcacctatttcacgacctatccgggcaagtacttcaccggcgacggcgcccgccgcgacgaggacggctactactggatcaccggccgcgtggacgacgtgatcaacgtctcgggtcaccgcctgggcacggccgagatcgagagcgcgctggtgggccacgaggccgtcgccgaggcggcggtcgtcggctacccgcacgagatcaagggccaggggatctactgctacgtgacgctgaaggtgggcgagcacccctccgaggcgctgcaggccgacctgcggggctgggtccggcgcgagatcggcccgttcgcggcgcccgacgtgatccagttcgcgcccggcctgcccaagacccggtcgggcaagatcatgcgccgcatcctgcgcaagatcgccgaggacgacctcggcaacctgggcgacacctcgaccctcgccgatccggcggtggtcgacgacctggtcgcccatcgcgcaggggcgagcgcgggcgacgtcgtcgagctcgcgggccggaagctgccggccgccgagctcgagcagctcatcgtcgagaacaccccggtcgccgacgcggtcgtggtgagcccgcggggcaagggcctgtggtgcttcgtggcgctggagccgggcttccagcccagcgacatcctgaaggccgacatccgcgcggtgctgaagcgccaggtcggcgagcacgcagttcccgagttcgtctacgtcggccgcgatctgccccgttcggccggcggcgaggtcgtgcgcccgctcctgcaccgcatcgccgagggcgagcctgtgggcgacacgaagggcctgtccaacccggcggtgctggacgacctgctgaaggcgcgggccgaagctgtcgcctga

SEQ ID NO: 151355 - protein, 776 aa, Phenylobacterium zucineum HLK1
MSDGEVFPVPEEWAKRAHMDAAAYEAACRRADEDPEGFWREVGERLDWITPFTQVKDVSFNREDFRIRWYADGALNVSVNCLDRHIETRGDQVAIIWESDDGQVSDKLTYRQLLAETCRWANVLKAKGVKKGDRVTIYLPMIPAAAAAMLACARIGAVHSVVFGGFSPDSLAGRIQDCDSRIVITANEGLRGGKVVPLKANVDEALKTCPGVTDVIVVRRTQTEVPMTPGRDEYYGDLKKTVPDTCDPEPMNAEDPLFILYTSGSTGKPKGVLHTTGGYLAWAAYTHELVFDYRPGEVFWCTADVGWVTGHSYVVYGPLANAATSLIFEGVPNYPTSSRFWEVCDKHKVEIFYTAPTAIRALMREGEEPVRRTSRSTIRLLGTVGEPINPEAWLWYHRVVGEGRCPIVDTWWQTETGACLMSPLPGATPLKPGSCTRPLPGVKPQLVDAEGKVLDGATSGNLCLTDSWPGQMRTVYGDHERFIVTYFTTYPGKYFTGDGARRDEDGYYWITGRVDDVINVSGHRLGTAEIESALVGHEAVAEAAVVGYPHEIKGQGIYCYVTLKVGEHPSEALQADLRGWVRREIGPFAAPDVIQFAPGLPKTRSGKIMRRILRKIAEDDLGNLGDTSTLADPAVVDDLVAHRAGASAGDVVELAGRKLPAAELEQLIVENTPVADAVVVSPRGKGLWCFVALEPGFQPSDILKADIRAVLKRQVGEHAVPEFVYVGRDLPRSAGGEVVRPLLHRIAEGEPVGDTKGLSNPAVLDDLLKARAEAVA

SEQ ID NO: 151356 - DNA, 1959 bp, Salmonella enterica
  subsp. enterica serovar Dublin str. CT_02021853
  CDS (1)..(1959): transl_table=11
atgagccaaacacataaacacgccattcccgccaacattgcggatcgttgcctgataaatccagagcagtatgagactaaatataaacagtctattaacgaccccgatacgttttggggcgaacagggaaaaattctcgattggatcacgccgtaccaaaaagtgaaaaacacctcctttgcgccaggcaatgtgtcgattaaatggtacgaggacggcacgctgaatctggcggcgaactgtcttgaccgccatttgcaggaaaatggcgatcgcaccgccattatctgggaaggcgatgacgcgtcgcagagtaaacatatctcttatcgcgaactgcatcgcgatgtctgccgtttcgcgaatacactgctggatctgggcattaaaaaaggcgatgtggtagcgatttatatgccgatggtgccggaagcggcgatggcaatgttggcctgcgcccgcatcggtgcggtgcattcggtgatcttcgggggcttctcgccggaagccgtcgccggacgcattatcgactccagctcgcggctggtgatcaccgctgacgaaggtgtacgtgccggacgcagtatcccgctgaaaaagaatgtcgatgacgcgctgaaaaacccgaatgtcactagcgttgagcatgtgatcgtcctgaagcgcaccggcagcgacattgactggcaagaaggccgcgacctgtggtggcgcgatttgattgaaaaagccagccctgagcaccagcctgaagcgatgaatgccgaagatccgctgtttatcctttatacctccggctccaccggcaagccgaaaggcgtgctgcacaccaccggcggctatctggtctacgccgcgaccacctttaagtatgtctttgattatcaccctggcgatatttactggtgtaccgccgatgtgggttgggtgacggggcacagctatctgttgtatggcccgctggcctgcggcgcgaccaccttaatgtttgaaggcgtgccgaattggccaacgcccgctcgcatgtgccaggtggtcgacaaacaccaggtcaacattctctataccgccccgacggccatccgcgcgctgatggcggaaggcgataaagccattgaaggcaccgaccgttcttcactgcgcattctgggttccgtcggcgagccgatcaatcccgaagcgtgggaatggtactggaagaagatcggcaaggaaaaatgtccggtcgtcgacacctggtggcagactgaaacaggcggttttatgatcactccgctaccgggcgctatcgaactgaaagccggttccgccacccgtcctttctttggcgtacagcctgcgctggtggataacgaaggccatccgcaagaaggcgcgacggaaggcaatctggtcatcaccgattcctggccgggccaggcgcgcactctgttcggcgatcatgaacgttttgagcagacctatttctctacctttaagaatatgtatttcagcggcgacggcgcgcgtcgcgatgaggacggctattactggatcaccggtcgcgtggatgacgtgttaaacgtctccggccaccgtctgggtacggcggaaatcgaatcggcgctggtggcgcatccgaagatcgccgaagcggcggtggtgggtattccacacgctatcaaaggccaggcgatttacgcttatgtgacgctcaaccacggcgaggagccgtcgccagaactgtacgcggaggtgcgcaactgggtacgtaaagagattggcccgctggcgacgccggacgtgctgcactggaccgactcactgccaaaaacccgttccggcaaaattatgcgccgtattttgcgcaaaatcgcggcgggcgataccagcaatctgggcgatacctcgactctcgccgatcctggcgtggtggagaaactgctcgaagagaagcaggccatcgcgatgccgtcataa

SEQ ID NO: 151357 - protein, 652 aa, Salmonella enterica
  subsp. enterica serovar Dublin str. CT_02021853
MSQTHKHAIPANIADRCLINPEQYETKYKQSINDPDTFWGEQGKILDWITPYQKVKNTSFAPGNVSIKWYEDGTLNLAANCLDRHLQENGDRTAIIWEGDDASQSKHISYRELHRDVCRFANTLLDLGIKKGDVVAIYMPMVPEAAMAMLACARIGAVHSVIFGGFSPEAVAGRIIDSSSRLVITADEGVRAGRSIPLKKNVDDALKNPNVTSVEHVIVLKRTGSDIDWQEGRDLWWRDLIEKASPEHQPEAMNAEDPLFILYTSGSTGKPKGVLHTTGGYLVYAATTFKYVFDYHPGDIYWCTADVGWVTGHSYLLYGPLACGATTLMFEGVPNWPTPARMCQVVDKHQVNILYTAPTAIRALMAEGDKAIEGTDRSSLRILGSVGEPINPEAWEWYWKKIGKEKCPVVDTWWQTETGGFMITPLPGAIELKAGSATRPFFGVQPALVDNEGHPQEGATEGNLVITDSWPGQARTLFGDHERFEQTYFSTFKNMYFSGDGARRDEDGYYWITGRVDDVLNVSGHRLGTAEIESALVAHPKIAEAAVVGIPHAIKGQAIYAYVTLNHGEEPSPELYAEVRNWVRKEIGPLATPDVLHWTDSLPKTRSGKIMRRILRKIAAGDTSNLGDTSTLADPGVVEKLLEEKQAIAMPS

SEQ ID NO: 151358 - DNA, 1959 bp, Klebsiella pneumoniae 342
  CDS (1)..(1959): transl_table=11
atgagccaaatacacaaacaccctattcccgctaatatcgcggaacgttgcctgattaacccggaacagtacaaggcgcagtaccaacaatccataaccgaccctgatacattttggggcgagcagggcaagatccttgactggatacgcccctatacccgcgtgaagaacacctctttcgcgccgggtaatatttccatcaaatggtatgaagatggcaccctgaacctcgccgccaactgcctcgaccgccatctcgccgagcgcggcgatcaaaccgccatcatctgggaaggcgacgacgccagccagagcaagcacatcacctaccgtgaactgcatgcggacgtgtgccgcttcgccaatgcgctgctcgaccttgggattaaaaaaggcgatgtggtcgccatttatatgccgatggtgccggaagccgcggtggcgatgctggcctgcgcccgcatcggcgccatccactcagtgattttcggcggcttctcgccggaggcggtggccggacgcattatcgactccagctcgcgcctggtgatcaccgctgacgaagggctgcgcgctggtcgcgccatcccgctgaagaaaaacgttgatgacgcgctgaaaaacccgaacgtcaacagtattgagcatgtcgtggtcctgaaacgtaccggcggcaaaatcgactggcaggaaggccgcgacctgtggtggagcgacctgatggcgaacgccagcgccgagcaccggcccgtcgagatgaacgccgaagatccgttgttcatcctctatacctctggctccaccggtaaaccgaaaggggtgctgcacaccaccggcggctacctggtctacgcggccaccaccttcaaatacgttttcgactaccatccgggcgatatttactggtgcaccgccgatgtgggctgggtcaccggccacagctatctgctgtatggtccgctggcctgcggtgccaccaccctgatgttcgaaggggtgccgaactggccaaccccggcacgtatgtgccaggtcgtcgataagcacaaggtcagcattctctataccgccccgacggctatccgcgccctgatggcggaaggcgacaaagcgatcgaaggcacagaccgttcctcgctgcgcattcttggctcggtcggcgaaccgattaacccggaagcctgggagtggtactggaagaagatcggcaacgagaagtgcccggtgatggacacctggtggcagaccgaaaccggcggctttatgatcaccccgctgccgggcgcgatcgaactgaaggccggctccgcgacgcgtccgttcttcggcgtccagccggtgctggtggataacgaaggcctgccgctggatggcgccaccgagggcaatcttgccatcgccgactcctggcccggccaggcgcgcaccctgttcggtgaccatgagcgctttgagcaaacctacttctccaccttcaaaaatatgtactttagcggcgatggcgcgcgtcgcgatgaagatggttactactggatcactggccgcgtggatgacgtgctgaacgtctccggccaccgtctgggtaccgcggaaattgaatccgcgctggtgtcgcacccgaaaatcgctgaagcggcggtggtggggatcccgcacaacatcaaaggccaggccatctacgcctacgtgacgctcaatcacggcgaagaaccaacgccggagctgtatgccgaagtgcgtaactgggtgcgcaaagagatcggcccgctggcgacgccggatgtgctgcactggaccgattcgctaccgaaaacccgctcgggcaaaatcatgcgtcgcattctgcgtaagattgccgcgggcgacaccagcaacctcggcgatacctcgacgctcgccgatcctggcgtcgtggaaaaactgctcgaagagaagcaggccataacgatgccatcgtaa

SEQ ID NO: 151359 - protein, 652 aa, Klebsiella pneumoniae 342
MSQIHKHPIPANIAERCLINPEQYKAQYQQSITDPDTFWGEQGKILDWIRPYTRVKNTSFAPGNISIKWYEDGTLNLAANCLDRHLAERGDQTAIIWEGDDASQSKHITYRELHADVCRFANALLDLGIKKGDVVAIYMPMVPEAAVAMLACARIGAIHSVIFGGFSPEAVAGRIIDSSSRLVITADEGLRAGRAIPLKKNVDDALKNPNVNSIEHVVVLKRTGGKIDWQEGRDLWWSDLMANASAEHRPVEMNAEDPLFILYTSGSTGKPKGVLHTTGGYLVYAATTFKYVFDYHPGDIYWCTADVGWVTGHSYLLYGPLACGATTLMFEGVPNWPTPARMCQVVDKHKVSILYTAPTAIRALMAEGDKAIEGTDRSSLRILGSVGEPINPEAWEWYWKKIGNEKCPVMDTWWQTETGGFMITPLPGAIELKAGSATRPFFGVQPVLVDNEGLPLDGATEGNLAIADSWPGQARTLFGDHERFEQTYFSTFKNMYFSGDGARRDEDGYYWITGRVDDVLNVSGHRLGTAEIESALVSHPKIAEAAVVGIPHNIKGQAIYAYVTLNHGEEPTPELYAEVRNWVRKEIGPLATPDVLHWTDSLPKTRSGKIMRRILRKIAAGDTSNLGDTSTLADPGVVEKLLEEKQAITMPS

SEQ ID NO: 151360 - DNA, 1968 bp, Thermodesulfovibrio yellowstonii DSM 11347
  CDS (1)..(1968): transl_table=11
atgacacaaggaattgatgtattacttaaagaacagagggttttccctccaccaaaagaaatttcagaaaaagcctatattaaaagcatggccgaatatgaagctatgtataagcgttctgtagaagatccagagggtttttgggctgagattgctgaacaaaatattacatggtataaaaaatgggataaagttttagactatgattttaataaaccttacataaagtggtttataggtggaaagctaaacgcctcatataattgtcttgatcgcaatctttcaaccttaggtaataaggctgcactcatttgggaagctgatgatggcgaggtaaaaacatacacctactggcaactttacagagaagtcaatagatttgctaatgttctaaaaaagcttggcattaaaaaaggagatagggttgctgtttatcttcccatgattcctgaacttcctataacccttcttgcctgcgcaagaattggtgcaattcacagcgtagtctttgcaggtttttcagctcaatctcttagagacagaataaatgactgcggagcaaaactacttatcacagccaatcagggactaagaggaggaagactcgtacccttaaaagcaaatgctgatcaagcactggaaggtgcaccctctgtagaaaaattaattgttgtaaaaagaactccaaattttgttgacatggaccctgaaagagatttctggtggcatgacctgatgaatgaccctgagattggaaactattgcgaacctgaacaggtggatgcagaagacccattattcattctttatacttcaggttctactggaaagccaaaaggagttttacatacaactggtggatatatggtttatgtaaatattacttttaaattaacatttgactataaaccagaggaaatattcttctgcacagctgatataggctgggtaacagggcatagttatatagtttatggaccactcagcgcaggagcaacctctctaatgtttgaaggagttcccacctatccaaacccaggaagattctgggaaattgttgaaaagcacagagttaacatattctatacagctccaactgccattagagctcttatgcgagagggagaaaaatggccgtatcagcatgacctttcaagtttaagaattcttggcactgttggtgaaccaattaatcctgaagcatggatgtggtattacaaacatgttggtaaagaacgttgtccaattgtagatacatggtggcagactgaaacaggtggattcatgataactcctcttcctggtgctatgactcttaagccagggtctgctacaagaccattttttggtgttgttccgagagttctaaaagaagatggttctcctgcagcagtaaatgaaggaggctacctggtaattgaaaaaccatggccgggtatgcttagaggaacatggggagaccctgaaaacaaacgaattaaagaagtctatttttcacgttttccaggcaaatactttactggtgatggagcaagagtagatgaagatggcgattactggcttatgggaagaattgatgatgttataaatgtatcaggacatagaataggaacagctgaggttgaatcagctcttgttgctcatccagctgttgccgaagcagcggtagtaggatttccacatgatataaaaggtgagggaatatatgtttatgctgttcttaaagaaggacatgagccatcaagggaccttgaaaaattgctcatatctcacataagacagatgataggacctatcgcaactccagataaaatacagtttgctggcggacttccaaaaacaagaagcggtaagataatgagaagaattttaagaaaaattgcctctggcgcactggaagaactcggagatacatcaacccttgcagatccatctgttgtagaagaattgataacaggaagaaaataa

SEQ ID NO: 151361 - protein, 655 aa, Thermodesulfovibrio yellowstonii DSM 11347
MTQGIDVLLKEQRVFPPPKEISEKAYIKSMAEYEAMYKRSVEDPEGFWAEIAEQNITWYKKWDKVLDYDFNKPYIKWFIGGKLNASYNCLDRNLSTLGNKAALIWEADDGEVKTYTYWQLYREVNRFANVLKKLGIKKGDRVAVYLPMIPELPITLLACARIGAIHSVVFAGFSAQSLRDRINDCGAKLLITANQGLRGGRLVPLKANADQALEGAPSVEKLIVVKRTPNFVDMDPERDFWWHDLMNDPEIGNYCEPEQVDAEDPLFILYTSGSTGKPKGVLHTTGGYMVYVNITFKLTFDYKPEEIFFCTADIGWVTGHSYIVYGPLSAGATSLMFEGVPTYPNPGRFWEIVEKHRVNIFYTAPTAIRALMREGEKWPYQHDLSSLRILGTVGEPINPEAWMWYYKHVGKERCPIVDTWWQTETGGFMITPLPGAMTLKPGSATRPFFGVVPRVLKEDGSPAAVNEGGYLVIEKPWPGMLRGTWGDPENKRIKEVYFSRFPGKYFTGDGARVDEDGDYWLMGRIDDVINVSGHRIGTAEVESALVAHPAVAEAAVVGFPHDIKGEGIYVYAVLKEGHEPSRDLEKLLISHIRQMIGPIATPDKIQFAGGLPKTRSGKIMRRILRKIASGALEELGDTSTLADPSVVEELITGRK

SEQ ID NO: 151362 - DNA, 1950 bp, Aliivibrio salmonicida LFI1238
  CDS (1)..(1950): transl_table=11
atgagtgacattcacgtatacccagtcaatcaagacatcgcaaaaaatgcacatgccgatgaagataaataccgtgaaatgtatcagcaatccgtcatcaatcccgaagggttttggcgtgagcacggacaaatagtcgactggatgactccttatactaaagtgaaaaacacctcgttcgatactggtcacgtagacatcaaatggtttgaagatggtgaattgaatgtctctgcaaactgtatcgatcgccatcttgctgctcgcggtgatgaagtcgcgatcatctgggaaggtgacgatccacaagatgatgcatcaattaccttcaatgagctgcacgaacaagtgtgtaaattctcaaacgcacttaagagtcaaggcgttcgcaaaggcgatgttgtgtgtatttacatgccaatggttgcagaagcagccattgcaatgcttgcttgtactcgcattggtgcggttcataccgttgtttttggtgggttctcaccagaagcattggcgggtcgaatcgttgattcagatgcgaaagtcgtgattaccgccgatgaaggcgttcgtggcggtcgtaccgtacctctaaagaaaaacgtcgacgatgcattaaataaccctgaagtaacaaccattgaaaaagtcgttgtattccaacgcaccggtaatgatattgattggaatgaagaacgcgatgtatggtggcatgaagcaaccgctgtagcttctgcgcattgtgaaccagaagccatgaatgcggaagatcctcttttcattctttatacctcaggctcaacaggtaaaccaaaaggcgtattacacaccactggcggctaccttgtttatgcagcaatgaccttcaaatacatctttgattaccaagaaggtgaggtgttctggtgtaccgctgatgtaggttggatcactggccatacttatttaatctacggacctctcgctaatggcgcaaaaaccattctgtttgaaggggtaccaaactacccaagcactagccgcatgagtgaagtggtcgataagcacaacgtaaatattctttatactgcgccaacagccattcgagcactcatggctcacggtaatgacgctgtagaagggacctcaagatcctcattacgcgtgatgggatccgtcggcgaaccgatcaaccctgaagcatgggagtggtattacaacaccattggtgacgctcgctgcccaatcgttgatacgtggtggcaaaccgaaacgggcgggattttaatctctcctcttcctggtgcaacggctttaaaaccgggctcggcaacacgtcctttctttggtgttcaaccagctttggttgataacatgggtaaccttattgaaggtgctgccgatggaaacctcgtgattaccgattcatggccgggtcaaatgcgcaccatttatggcgatcacgaccgtttcgaacaaacttatttttcaacgtttaaaggcatgtattttaccagtgatggtgctcgacgtgatgaagatggttattactggataacaggtcgtgttgatgatgtgctcaatgtgtctggtcaccgaatgggtaccgctgaagttgaatccgccttagtttctttcagtaaaattgcagaggctgccattgtcggtgttcctcatgatattaaaggccaagcgatttacgcatacatcaccttaaattcgggcgaatacccaagtgctgagctccataaagaagtcaaagattgggtaagaaaagaaataggccctatcgcaacacctgatttcttgcattggaccgactcattaccaaaaacacgttcagggaaaataatgcgtcgaattcttcgtaaaattgcgacgggagatacttcaaatctaggcgatacatccacacttgccgaccctagcgtggttaataaactaattgaagaacaaagaaaaattgcttaa

SEQ ID NO: 151363 - protein, 649 aa, Aliivibrio salmonicida LFI1238
MSDIHVYPVNQDIAKNAHADEDKYREMYQQSVINPEGFWREHGQIVDWMTPYTKVKNTSFDTGHVDIKWFEDGELNVSANCIDRHLAARGDEVAIIWEGDDPQDDASITFNELHEQVCKFSNALKSQGVRKGDVVCIYMPMVAEAAIAMLACTRIGAVHTVVFGGFSPEALAGRIVDSDAKVVITADEGVRGGRTVPLKKNVDDALNNPEVTTIEKVVVFQRTGNDIDWNEERDVWWHEATAVASAHCEPEAMNAEDPLFILYTSGSTGKPKGVLHTTGGYLVYAAMTFKYIFDYQEGEVFWCTADVGWITGHTYLIYGPLANGAKTILFEGVPNYPSTSRMSEVVDKHNVNILYTAPTAIRALMAHGNDAVEGTSRSSLRVMGSVGEPINPEAWEWYYNTIGDARCPIVDTWWQTETGGILISPLPGATALKPGSATRPFFGVQPALVDNMGNLIEGAADGNLVITDSWPGQMRTIYGDHDRFEQTYFSTFKGMYFTSDGARRDEDGYYWITGRVDDVLNVSGHRMGTAEVESALVSFSKIAEAAIVGVPHDIKGQAIYAYITLNSGEYPSAELHKEVKDWVRKEIGPIATPDFLHWTDSLPKTRSGKIMRRILRKIATGDTSNLGDTSTLADPSVVNKLIEEQRKIA

SEQ ID NO: 151364 - DNA, 1956 bp, Rhizobium leguminosarum bv. trifolii WSM2304
  CDS (1)..(1956): transl_table=11
atgtcggagaagatctatccggtcacgaagccggtgaaggcgcgcgccctgatcgataaggaaaagtacctgaaatggtacgaggaaagcgtcgagaatccggacaaattctggggcaaacacggcaagcggatcgactggttcaagccctataccaaggtcaagaacacgtcctttaccggtaaggtttcgatcaagtggttcgaagacggtcagaccaacgtctcctataattgcatcgaccgccatctgaaaaccaacggcgaccaggtggcgatcatctgggagggcgacaatccctatatcgacaagaaggtcacctacaacgagctctacgaacatgtctgccggatggcgaacgtgttgaaaaagcacggcgtcaagaagggtgatcgcgttaccatctatatgccgatgatcccggaagcggcttacgcgatgctcgcctgcgcccgcatcggcgcggtgcattcggtggtgttcggcggcttttcacccgaggcgctggccgggcgtatcgtcgactgtgaatccactttcgtcatcacctgcgacgaaggtttgcgcggcggcaagccggtgccgttgaaggacaataccgatacggcgatccatatcgccgcccgccagcatgtgcatgtcagcaaggtgctggtggtgcgccgcaccggcggcaagaccggctgggcgccaggccgcgatctctggcatcaccaggaaatcgccacggtgaagccggaatgcccgccggtgaagatgaaggcggaagatccactcttcattctttatacctcaggctcgaccggcaaaccgaagggtgtgctgcacacgaccggcggttatctcgtctatgcggcgatgacgcatgaatatgtcttcgactaccatgacggcgacgtctattggtgcaccgccgatgtcggctgggtcaccggtcactcctatatcgtctacgggccgctcgccaactgcgcgacgacgttaatgttcgagggcgtgccgaatttccccgatcagggccgcttttgggaagtcatcgacaaacacaaggtcaatatcttctataccgcgccgacggcgatccgctcgctgatgggggccggcgacgatttcgtcacccgctcctcgcgctcgtcgctgcggctgctcggcactgtgggcgaaccgatcaatccggaagcctgggaatggtattacaatgtggttggcgacaagcgctgcccggtcatcgatacctggtggcagactgaaaccggcggccacatgatcacgccgctgcccggcgccatcgatctgaaacccggttctgcgacagtgccgttcttcggcatcaagcctgaactggtcgacaatgaaggcaaggtgctggaaggggccgccgacggcaatctctgcatcaccgacagctggccgggccagatgcgcacggtctatggcgatcacgaccgcttcatccagacctatttctccacctacaaggggaaatatttcaccggcgacggctgccggcgcgatgcggacggctattactggatcactggccgcgtcgacgacgtgcttaacgtctccggccaccggctcggcaccgcggaggtggaatccgcactcgtctcgcacaatctggtttcggaagccgcggtcgtcggttacccccacccgatcaagggccagggcatctattgctatgtgacgctgatggccggacacgaaggaacggacacgctccgccaggacctggtgaaacatgtccgtgccgaaatcggcccgatcgctgcacccgacaagatccagtttgcgcccggcctgccgaagacccgttccggcaagatcatgcgccggatcctgcgcaagatcgccgaggacgatttcggtgctctcggcgatacctcgacgctcgccgatcctgccgttgtcgacgatctgatcgccaaccggcaaaacaaggcgacggcctga

SEQ ID NO: 151365 - protein, 651 aa, Rhizobium leguminosarum bv. trifolii WSM2304
MSEKIYPVTKPVKARALIDKEKYLKWYEESVENPDKFWGKHGKRIDWFKPYTKVKNTSFTGKVSIKWFEDGQTNVSYNCIDRHLKTNGDQVAIIWEGDNPYIDKKVTYNELYEHVCRMANVLKKHGVKKGDRVTIYMPMIPEAAYAMLACARIGAVHSVVFGGFSPEALAGRIVDCESTFVITCDEGLRGGKPVPLKDNTDTAIHIAARQHVHVSKVLVVRRTGGKTGWAPGRDLWHHQEIATVKPECPPVKMKAEDPLFILYTSGSTGKPKGVLHTTGGYLVYAAMTHEYVFDYHDGDVYWCTADVGWVTGHSYIVYGPLANCATTLMFEGVPNFPDQGRFWEVIDKHKVNIFYTAPTAIRSLMGAGDDFVTRSSRSSLRLLGTVGEPINPEAWEWYYNVVGDKRCPVIDTWWQTETGGHMITPLPGAIDLKPGSATVPFFGIKPELVDNEGKVLEGAADGNLCITDSWPGQMRTVYGDHDRFIQTYFSTYKGKYFTGDGCRRDADGYYWITGRVDDVLNVSGHRLGTAEVESALVSHNLVSEAAVVGYPHPIKGQGIYCYVTLMAGHEGTDTLRQDLVKHVRAEIGPIAAPDKIQFAPGLPKTRSGKIMRRILRKIAEDDFGALGDTSTLADPAVVDDLIANRQNKATA

SEQ ID NO: 151366 - DNA, 1956 bp, Oligotropha carboxidovorans OM5
  CDS (1)..(1956): transl_table=11
atgtccgacgcaatttacaaagtgacgcccgaatgggcgaagcgcgcctatgtcgatgaagccaaatacaacgacatgtacgcgcgctcgatcaaggacccgaccgggttctggaaagaggccgccagccgggtggactggatcaagccgttcaccaaggtcgacaatgcctgcttcgatctcggcaaggtttccatcaagtggttcgaggacggcgtcctcaacgccgcctacaactgcatcgaccgccatctcgagaagcgcggcgaccagaccgcgatcatctgggaaggcgacgatccgtcagagtcccgccacatcacctatcgcgaactgcacgccgaagtctgcaagatggcgaacgtgctgcgggcacgcaacgtcaagaagggcgatcgcgtcaccatctacatgccgatgatcccggaagcggcttacgcgatcctcgcctgcgcgcgcatcggcgcgatccattccgtggtattcggcggcttctcgcctgattccatcgccggccgtctgcgcgattgcaaatcgcgcgtcgtcatcacctcggatgaaggcctgcgcggcggccgcgtcattgcgatgaaggcgaacgtcgatgcggcggtcgagaaggtgaacggcgaagtcgacaccgtgatcgtggtgaagcgcaccggcggcaacatcacgatgaacccgaagcgcgacatctggtatcacgacgctgcggcgaacgccggcaccgactgcccctgcgagccgatgaacgccgaagatccgctgttcatcctctacacttcaggctcgaccggtcagcccaagggcgtgctgcacaccaccgcgggctatctcatcttcgtggcgatgacgcatcaatacgtcttcgactaccacgacggcgacatctactggtgcaccgccgacgtgggctgggtcaccggccacagctacattctgtacgggccgctttgcaacggcgcgaccacgatgatgttcgaaggcgtgccgaactatcccgacaattcgcggttctggaacgtcatcgacaagcacaaggtcaacatcttctatactgcgccgaccgcgatccgcgcgctgatgcaggcgggcgaccagccggtgaagaagacctcgcgtgcctcgctgcgcctgctcggctcggtcggcgagccgatcaacccggaggcatgggagtggtatcaccgcgtcgtcggcgatggccgttgcccggtggtcgacacctggtggcagaccgagaccggcggcatcatgatctccgcgctgcccggcgcgatcgcgcagaagcccggctcggcaacgcgaccattcttcggcatcgtgccggagatcgtcgacggcgagggcaacgtgctcgagggcgaatgcagcggcaacctctgcatcgcgcgctcgtggcccggccaggtccgcaccgtttacggcgatcatgatcgcttcgagaaaacctacttctcgacttacaagggccggtacttctccggcgatggatgccgccgcgatgccgacggctattactggatcaccggacgcgtcgacgacgtcatcaacgtctccggccaccgcctcggcaccgccgaagtcgagagctcgctggtcgcgcatgaaagcgtgtcggaagccgccgtggtcggctacccgcacgacatcaagggccagggcatctacgcctatgtcactttgatggacggcgtcgagccgagcgagacgctccgcaaggacctgatcgcctgggtgcgcaaggacatcggcccgatcgcccagcccgatctgatccagttcgcgccgggcctgcccaagacccgttcgggcaagatcatgcgccgcatcctgcgcaaaatcgccgaggacgagccgaccaagctcggcgacacgacgacgctcgctgatcccggcgtcgtcaccgacctcgtcaacaaccgccagaacaagcgggcggttcacgcctga

SEQ ID NO: 151367 - protein, 651 aa, Oligotropha carboxidovorans OM5
MSDAIYKVTPEWAKRAYVDEAKYNDMYARSIKDPTGFWKEAASRVDWIKPFTKVDNACFDLGKVSIKWFEDGVLNAAYNCIDRHLEKRGDQTAIIWEGDDPSESRHITYRELHAEVCKMANVLRARNVKKGDRVTIYMPMIPEAAYAILACARIGAIHSVVFGGFSPDSIAGRLRDCKSRVVITSDEGLRGGRVIAMKANVDAAVEKVNGEVDTVIVVKRTGGNITMNPKRDIWYHDAAANAGTDCPCEPMNAEDPLFILYTSGSTGQPKGVLHTTAGYLIFVAMTHQYVFDYHDGDIYWCTADVGWVTGHSYILYGPLCNGATTMMFEGVPNYPDNSRFWNVIDKHKVNIFYTAPTAIRALMQAGDQPVKKTSRASLRLLGSVGEPINPEAWEWYHRVVGDGRCPVVDTWWQTETGGIMISALPGAIAQKPGSATRPFFGIVPEIVDGEGNVLEGECSGNLCIARSWPGQVRTVYGDHDRFEKTYFSTYKGRYFSGDGCRRDADGYYWITGRVDDVINVSGHRLGTAEVESSLVAHESVSEAAVVGYPHDIKGQGIYAYVTLMDGVEPSETLRKDLIAWVRKDIGPIAQPDLIQFAPGLPKTRSGKIMRRILRKIAEDEPTKLGDTTTLADPGVVTDLVNNRQNKRAVHA

SEQ ID NO: 151368 - DNA, 1941 bp, Rhodospirillum centenum SW
  CDS (1)..(1941): transl_table=11
atgaccgacacctcgatctttcccgtgcccgaggcgttcgcttccgacgcctgggtggacgccgccagctatcaacgcctgtacgaccagtcgatctccgatccggaggcgttctgggccgaacagggcaagcgcatcgattggatcaggccctatacccaggtgaaggactgctccttcagcggcgatgtccacatccgctggttccatgacggcacgctgaacgtctcggccaactgcatcgaccggcatctcgccacccgggccgaccagaccgccatcctctgggagggcgacagccccgccgagcaccggcacatcagctacgccgagctgcacgccaatgtctgccgcctcgccaacgtgctgaagaagcacggcgtccagaagggcgaccgggtcaccatctacatgccgatgatcccggagacggccttcgccatgctggcctgcgcccgcatcggcgccatccattcggtggtgttcggcggcttctccccggacagcctgaaggaccgcatccaggactgcgacagccgcatcgtgctgaccgcggacgagggcctgcgcggcggccgcaaggtgccgctgaaggccaatgtggaccaggccctgaagtcctgccccgatgtcggcaccgtgatcgtcgtccgccgcaccggcgggcaggtcgcctgggaggacgggcgcgacttctggtatcatgaggaggtgtcggcggtgtcgcccgactgcccgccggaggagatcggggccgaggacccgctgttcatcctctatacctcgggcagcaccggcaaacccaagggcgtgctgcacaccagcggcggctatctggtctacgcctcgatgacgcaccagtacgtcttcgactaccacgatggcgacatctactggtgtacggcggacgtgggctgggtcaccggccacagctacatcgtctacggcccgctggcgaacggcgccaccaccctgatgttcgagggcatcccgaactacccggactccagccgcttctggcaggtggtggacaagcacaaggtcaacatcttctacaccgcccccaccgccatccgcgccctgatgcgcgagggcgaggggccggtgaagcgcaccagccggaacagcctgcgcctgctgggctcggtgggcgagccgatcaacccggaagcctggctctggtatcacaccgtggtcggcgagggccgctgcccgatcgtggacacctggtggcagacggagacgggcggcatcctgatctcgccgctgccgggcgccatcccgaccaagccgggctccgccaccctgcccttcttcggcgtcaggccggtggtcgtggacaatgagggccaccacctggagggcgcgacggagggcaatctctgcatcgcggacagctggccgggccagatgcgcaccgtgttcggcgaccatgaacgctttgtgcagacctatttcagcaccttcccgggcaagtacttcaccggcgacggctgccgccgcgacgacgacggttactactggatcaccggccgcgtggacgacgtgatcaacgtctccggccaccgcatgggcacggcggagatcgagagcgccctggtcgcccaccccaaggtggcggaggccgcggtcgtcggctacccgcacgacctcaagggccagggcatctacgcctatgtcaccctggtggacggggaggagccgaccgaacccctgcgcaaggagctggtgcagtgggtgcgcaaggagatcggcccgatcgccagcccggacctgatccagttcgcgccgggcctgcccaagacccggtcgggcaagatcatgcgccgcatcctgcgcaagatcgccgccaacgagcatgaggccctgggcgacacctccaccctggccgatccgaccgtggtgacggaactggtggagaaccggcagaaccgcgtctga

SEQ ID NO: 151369 - protein, 646 aa, Rhodospirillum centenum SW
MTDTSIFPVPEAFASDAWVDAASYQRLYDQSISDPEAFWAEQGKRIDWIRPYTQVKDCSFSGDVHIRWFHDGTLNVSANCIDRHLATRADQTAILWEGDSPAEHRHISYAELHANVCRLANVLKKHGVQKGDRVTIYMPMIPETAFAMLACARIGAIHSVVFGGFSPDSLKDRIQDCDSRIVLTADEGLRGGRKVPLKANVDQALKSCPDVGTVIVVRRTGGQVAWEDGRDFWYHEEVSAVSPDCPPEEIGAEDPLFILYTSGSTGKPKGVLHTSGGYLVYASMTHQYVFDYHDGDIYWCTADVGWVTGHSYIVYGPLANGATTLMFEGIPNYPDSSRFWQVVDKHKVNIFYTAPTAIRALMREGEGPVKRTSRNSLRLLGSVGEPINPEAWLWYHTVVGEGRCPIVDTWWQTETGGILISPLPGAIPTKPGSATLPFFGVRPVVVDNEGHHLEGATEGNLCIADSWPGQMRTVFGDHERFVQTYFSTFPGKYFTGDGCRRDDDGYYWITGRVDDVINVSGHRMGTAEIESALVAHPKVAEAAVVGYPHDLKGQGIYAYVTLVDGEEPTEPLRKELVQWVRKEIGPIASPDLIQFAPGLPKTRSGKIMRRILRKIAANEHEALGDTSTLADPTVVTELVENRQNRV

SEQ ID NO: 151370 - DNA, 1953 bp, Shewanella piezotolerans WP3
  CDS (1)..(1953): transl_table=11
atgagcatgcagtctctctacaaagttccaagtgaaatcgcagccaatgcacttgtaaatgacgaacaatataaaaaaatgtatcaggagtcgattgtaaaccctgaaggtttctggagagaacacggcaaccgtatcgattggatgaaaccctttactaaagtaaagaaaacgtcgttcgatgaccataacttgttcattaaatggttctatgatggcacgcttaacgcgtcagccaactgcctagacagacatttagaaaataatgccgacaaagtggctattatctgggaaggcgatgacgcaaaagatcagcgtactatcacctatggtgagttgcatgctgatgtatgtaagtttgctaacgcccttcgcagccaaggcgtaagacgcggagacgtagtaacagtttatatgcctatggtgccagaagccgcagttgccatgcttgcctgtgcgcgcattggcgctatccactctgtggtatttggtggtttctcacccgattctatcgcctcacgcgtcattgatggtaactcgaaagttgtcattactgctgatgaaggtgttcgcgcaggccgtattatcccgcttaaagctaatatcgatgaagcactatcccaccctgatgttgattgtattgaaaaagtcatcgtaatgaagcgtactggcggcgacatcaactgggtcgaaggtcgtgatatctggtgggaatctttaatggaaacggcctccgagcattgtgttccagaagagatgggcgctgaagatccgctatttttactctatacctctggctcaaccggtaaccctaaaggtgtgttacacactacaggcggttatatggtttacgctgcgatgactcacgaatatgtcttcgattataaagacggggaagtgtattggtgtaccgcggatgtcggttggatcaccgggcactcatacatggtttatgggccacttgctaatggcgctaccgtgttaatccacgaaggtgtgcctaactatccaagtccagctcgcttaggtgaaatgattgaccgacataatgtcaatatcctctataccgctcccacgcttattcgtgcgttaatggccgaaggtaaagagcagttcaatggtttcgacggcagttcactgcgcataatgggctcagttggagaaccgattaaccctgaagcatggcgctggtataacgatgtaattggtcatgagaaatgccctatcgttgatacgtggtggcaaacagaaactggcggtattttgattagcccactaccaggtgctacagatactaaacctggctcagcaactcgtccattttttggtgtacagccagcacttgttgacaacatgggcaatatcgtagaaggggcgaatgaaggaaacctagtgattcttgattcatggcctggacagatgcgcaccgtatttggcgatcatgaccgctttgtactgacctactttaaaacctttagaggaatgtacttcaccggtgatggtgcgaaacgcgacgaagatggttactactggatcactggacgcgttgatgatgtgataaacgtatcaggtcatagattgggtacagcagaagttgaaagtgccttagttgcccatgagcaagttgcagaggccgcagttgttggctatccgcatgatattaaaggtcaggggatctatgcttatgtgacgctgacgaggggtacggtagaaactgaagagctacgtcaagagcttcgccaatgggttagaaaagagattggcgcactagcaactcctgatctcattcagtgggctggcggcttacctaagacacgttcaggaaagattatgcgtcgattcctacgtaagattgccgcaaatgaagtgacaaacctgggcgactcttcaacgcttgcagatcctgcagtcattgacacactaattgagtctcgacttaaccgcagcgaataa

SEQ ID NO: 151371 - protein, 650 aa, Shewanella piezotolerans WP3
MSMQSLYKVPSEIAANALVNDEQYKKMYQESIVNPEGFWREHGNRIDWMKPFTKVKKTSFDDHNLFIKWFYDGTLNASANCLDRHLENNADKVAIIWEGDDAKDQRTITYGELHADVCKFANALRSQGVRRGDVVTVYMPMVPEAAVAMLACARIGAIHSVVFGGFSPDSIASRVIDGNSKVVITADEGVRAGRIIPLKANIDEALSHPDVDCIEKVIVMKRTGGDINWVEGRDIWWESLMETASEHCVPEEMGAEDPLFLLYTSGSTGNPKGVLHTTGGYMVYAAMTHEYVFDYKDGEVYWCTADVGWITGHSYMVYGPLANGATVLIHEGVPNYPSPARLGEMIDRHNVNILYTAPTLIRALMAEGKEQFNGFDGSSLRIMGSVGEPINPEAWRWYNDVIGHEKCPIVDTWWQTETGGILISPLPGATDTKPGSATRPFFGVQPALVDNMGNIVEGANEGNLVILDSWPGQMRTVFGDHDRFVLTYFKTFRGMYFTGDGAKRDEDGYYWITGRVDDVINVSGHRLGTAEVESALVAHEQVAEAAVVGYPHDIKGQGIYAYVTLTRGTVETEELRQELRQWVRKEIGALATPDLIQWAGGLPKTRSGKIMRRFLRKIAANEVTNLGDSSTLADPAVIDTLIESRLNRSE

SEQ ID NO: 151372 - DNA, 1959 bp, Escherichia coli O127:H6 str. E2348/69
  CDS (1)..(1959): transl_table=11
atgagtcaaattcacaaacacaccattcctgccaacatcgcagaccgttgcctgataaaccctcagcagtacgaggcgatgtatcaacaatctattaacgcaccagataccttctggggcgaacagggaaaaattctcgactggatcacaccgtaccagaaggtgaaaaacacctcctttgcccccggtaatgtgtccattaaatggtacgaggacggcacgctgaatctggcggcaaactgccttgaccgccatctgcaagaaaacggcgatcgtaccgccatcatctgggaaggcgacgacgccagccagagcaaacatatcagctataaagagctgcaccgcgacgtctgccgcttcgccaataccctgctcgagctgggcattaaaaaaggtgatgtggtggcgatttatatgccgatggtgccggaagccgcggtcgcgatgctggcctgcgcccgcattggcgcggtgcattcggtaattttcggcggcttctcgccggaagccgttgccggacgcattatcgattccaactcacggttggtgatcacttccgacgaaggtgtgcgtgccgggcgcagcattccactgaagaaaaacgtcgatgacgcactaaaaaacccgaacgtcaccagcgtagagcatgtggtggtactgaagcgtactggcgggaaaattgactggcaggaagggcgcgacctgtggtggcacgacctggttgagcaagcgagcgatcagcaccaggcggaagagatgaacgccgaagacccgctgtttattctctatacctccggttctaccggtaagccaaaaggcgtgctgcacactaccggcggttatctggtgtacgcggcgctgacctttaaatatgtctttgattatcatccgggcgacatctactggtgcaccgccgatgtgggctgggttaccggacacagttatttgctgtatggcccgctggcctgcggcgcgaccacgctgatgtttgaaggcgtaccgaactggccgacgcctgcccgtatggcgcaagtggtggacaagcatcaggtcaatattctctataccgcgcccacggcgattcgcgcgctgatggcggaaggcgataaagcgatcgaaggcaccgaccgttcgtcgctgcgcattctcggttccgtgggcgagccaattaacccggaagcgtgggagtggtactggaagaagatcggcaacgagaaatgcccggtggtcgacacctggtggcagaccgaaactggcggtttcatgatcacgccactgcctggcgctaccgagctgaaagccggttcggcaacacgtccgttcttcggcgtgcaaccagcgctggtcgataacgaaggtaacccgctggagggggccaccgaaggcagtctggtgatcaccgactcctggccgggtcaggcgcgtacgctgtttggcgatcacgaacgttttgagcagacctacttctccaccttcaaaaatatgtatttcagcggcgacggcgcgcgtcgcgatgaagatggctattactggatcaccgggcgcgttgacgacgtgctgaacgtctccggtcaccgcctggggacggcagagattgagtcggcgctggtggcgcatccgaaaattgccgaagccgctgtggtcggtattccgcacaatattaaaggtcaggcgatctacgcctacgtcacgcttaatcacggggaggaaccgtcaccagaactgtacgcagaagtccgcaactgggtgcgtaaagagattggcccgctggcgacgccagacgtgctgcactggaccgactccctgcctaaaacccgctccggcaaaattatgcgccgtattctgcgcaaaattgcggcgggcgataccagcaacctgggcgatacctcgacgcttgccgatcctggcgtagtcgagaagctgcttgaagagaagcaggccatcgcgatgccatcgtaa

SEQ ID NO: 151373 - protein, 652 aa, Escherichia coli O127:H6 str. E2348/69
MSQIHKHTIPANIADRCLINPQQYEAMYQQSINAPDTFWGEQGKILDWITPYQKVKNTSFAPGNVSIKWYEDGTLNLAANCLDRHLQENGDRTAIIWEGDDASQSKHISYKELHRDVCRFANTLLELGIKKGDVVAIYMPMVPEAAVAMLACARIGAVHSVIFGGFSPEAVAGRIIDSNSRLVITSDEGVRAGRSIPLKKNVDDALKNPNVTSVEHVVVLKRTGGKIDWQEGRDLWWHDLVEQASDQHQAEEMNAEDPLFILYTSGSTGKPKGVLHTTGGYLVYAALTFKYVFDYHPGDIYWCTADVGWVTGHSYLLYGPLACGATTLMFEGVPNWPTPARMAQVVDKHQVNILYTAPTAIRALMAEGDKAIEGTDRSSLRILGSVGEPINPEAWEWYWKKIGNEKCPVVDTWWQTETGGFMITPLPGATELKAGSATRPFFGVQPALVDNEGNPLEGATEGSLVITDSWPGQARTLFGDHERFEQTYFSTFKNMYFSGDGARRDEDGYYWITGRVDDVLNVSGHRLGTAEIESALVAHPKIAEAAVVGIPHNIKGQAIYAYVTLNHGEEPSPELYAEVRNWVRKEIGPLATPDVLHWTDSLPKTRSGKIMRRILRKIAAGDTSNLGDTSTLADPGVVEKLLEEKQAIAMPS

SEQ ID NO: 151374 - DNA, 1938 bp, Methylocella silvestris BL2
  CDS (1)..(1938): transl_table=11
atgtcggataaagtctatcctgtaactgctgagtggagcaaatccgcctacgtcgacgcggccaagtataagtcaatgtatgagagttcggtctcggaaccggataagttctggggagagcacggcaagcggattgactgggtcaaaccctacaccaaagtcaagaatacgtcgttcgatccgcacaatgtctcgatcaaatggttcgaagacggcgtgacgaatgtctcgaccaattgcatcgaccgccatttggcgacgctgggcgaccagaccgcgatcatctgggaaggcgacgacccgaatgaatcgaagcacatcacctacaagcagctgcacgaagaagtctgccgcctcgccaatgtcctgaagtcctatgggatcagcaagggcgacaccgtcacgatctatttgccgatgatccctgaggccgcttacgccatgctggcttgcgcccggatcggcgccatccattcgatcgtgtttggcggtttctcggcggattcgcttggcggccgcatcgagggctgcaaatcgaagctcatcatcacggccgacgagggataccgcggcggacgcaaggtgccgctgaaggtcaacgccgacgcggctatcaagaaagtcgacggcatcgttgagaccatgatcgtggtgcggcgcacgggaggcaaggtcgcctggaccgagggccgcgacgtttggtacgacgaggcgctcgccaaagccagccccgactgcccggccgcagagatgaacgccgaagatccgctgttcattctgttcacctcgggctcgaccggcgcgccgaaaggcgtcgtgcattcgaccggcggctatctcgtctgggcctcgatgacccatcaatatgtcttcgattatcggccgggcgaggtctattggtgcaccgccgacgtgggctgggtgaccggacacagctatatcgtctatggcccgctcgccaatggcgcaacgacgctgatgttcgagggggttccgagctatcccaccatctcgcggttctgggacgtcgtcgacaagcaccaggtcaatatcttttatacggcgccgacggcgatccgctcgctgatgggcgccggcgacggaccggtgaaggcgaccagccgcaagactctgcgcgtccttggttcggtcggcgagccgatcaatcccgaggcttgggagtggtactaccgcgttgtcggcgaggagcgttgtccgatcgtcgacacctggtggcagaccgagaccggcggcattttgatcagccccttgccgggggcgaccgcgctgaagccgggttcggcaacgcagcccttcttcggcgtgcagccgcaggtggtcgatgcggccggcgaggtgcttgagggtccctgcagcggcaatctcgtcatcgccgattcctggccggcgcagatgcgcaccctgttcaacgatcacgaacgcttcgtgcaggcctatttctcggcctatccgggcaaatatttcaccggcgacggctgccggcgcgacgaggacggctattactggatcaccggccgcgtcgacgacgtgatcaacgtctctggccaccgcctcggcaccgccgaggtggaaagctctctggtggcccacatcaaggtcgcagaggctgcggtcgtcggctatccgcacgacctcaaggggcagggcatctacgcctatgtgaccctgatgaccggcatcgagccgagcgaagagctgcggaaggagctcgtgtcttgggtgcgcaaagatatcgggccgatcgcctcgcccgatatcgtgcatttcgcgcccggcctgcccaaaacccgctctggcaagatcatgcgccgcatcctgcgcaagatcgcggagaaggagttttcggctctcggcgacacctcgacgcttgccgatccgtcggtggttgacgatctgattcgcgagcgcgcgaactag

SEQ ID NO: 151375 - protein, 645 aa, Methylocella silvestris BL2
MSDKVYPVTAEWSKSAYVDAAKYKSMYESSVSEPDKFWGEHGKRIDWVKPYTKVKNTSFDPHNVSIKWFEDGVTNVSTNCIDRHLATLGDQTAIIWEGDDPNESKHITYKQLHEEVCRLANVLKSYGISKGDTVTIYLPMIPEAAYAMLACARIGAIHSIVFGGFSADSLGGRIEGCKSKLIITADEGYRGGRKVPLKVNADAAIKKVDGIVETMIVVRRTGGKVAWTEGRDVWYDEALAKASPDCPAAEMNAEDPLFILFTSGSTGAPKGVVHSTGGYLVWASMTHQYVFDYRPGEVYWCTADVGWVTGHSYIVYGPLANGATTLMFEGVPSYPTISRFWDVVDKHQVNIFYTAPTAIRSLMGAGDGPVKATSRKTLRVLGSVGEPINPEAWEWYYRVVGEERCPIVDTWWQTETGGILISPLPGATALKPGSATQPFFGVQPQVVDAAGEVLEGPCSGNLVIADSWPAQMRTLFNDHERFVQAYFSAYPGKYFTGDGCRRDEDGYYWITGRVDDVINVSGHRLGTAEVESSLVAHIKVAEAAVVGYPHDLKGQGIYAYVTLMTGIEPSEELRKELVSWVRKDIGPIASPDIVHFAPGLPKTRSGKIMRRILRKIAEKEFSALGDTSTLADPSVVDDLIRERAN

SEQ ID NO: 151376 - DNA, 1959 bp, Escherichia coli ED1a
  CDS (1)..(1959): transl_table=11
atgagtcaaattcacaaacacaccattcctgccaacatcgcagaccgttgcctgataaaccctcagcagtacgaggcgatgtatcaacaatctattaacgcaccagataccttctggggcgaacagggaaaaattctcgactggatcacaccgtaccagaaggtgaaaaacacctcctttgcccccggtaatgtgtccattaaatggtacgaggacggcacgctgaatctggcggcaaactgccttgaccgccatctgcaagaaaacggcgatcgtaccgccatcatctgggaaggcgacgacgccagccagagcaaacatattagctataaagaactgcaccgcgacgtctgccgcttcgccaataccctgctcgaactgggcattaaaaaaggtgacgtagttgcgatttatatgccgatggtaccggaagccgcggtcgcgatgctggcctgcgcccgcattggcgcggtacattcggtgattttcggcggcttctcgccggaagccgttgccggacgcattatcgactccagttcacgactggtgatcacttccgacgaaggtgtgcgtgccgggcgtagtattccgctgaagaaaaacgttgatgacgcgctgaaaaacccgaacgtcaccagcgtagagcatgtggtggtactgaagcgtactggtggaaaaattgactggcaggaagggcgcgacctgtggtggcacgacctggttgagcaagccagcgctcagcaccaggcggaagagatgaacgccgaagatccgctgtttattctctatacctccggttctaccggtaagccaaaaggcgtgctgcacactaccggcggttatctggtgtacgcggcgctgacctttaaatatgtctttgattatcatccgggcgatatctactggtgcaccgccgatgtgggctgggttaccggacacagttatttgctgtatggcccgctggcctgcggcgcgaccacgctgatgtttgaaggcgtaccgaactggccgacgcctgcccgtatggcgcaggtggtggacaagcatcaggtcaatattctctataccgcgcccacggcgattcgcgcgctgatggcggaaggcgataaagcgatcgaaggcaccgaccgttcgtcgctgcgcattctcggttccgtgggcgagccaattaacccggaagcgtgggagtggtactggaagaagatcggcaacgagaaatgcccggtggtcgacacctggtggcagaccgaaactggcggtttcatgatcacgccactgcctggcgctaccgagctgaaagccggttcggcaacacgtccgttcttcggcgtgcaaccggcgctggtcgataacgaaggtaacccgctggagggggccaccgaaggcagtctggtgatcaccgactcctggccgggtcaggcgcgtacgctgtttggcgatcacgaacgttttgagcagacctacttctccaccttcaaaaatatgtatttcagcggcgacggcgcgcgtcgcgatgaagatggctattactggatcaccgggcgcgtggacgacgtgctgaacgtctccggtcaccgcctggggacggcagagattgagtcggcgctggtggcgcatccgaaaattgccgaagccgctgtggtcggtattccgcacaatattaaaggtcaggcgatctacgcctacgtcacgcttaatcacggggaggaaccgtcaccagaactgtacgcagaagtccgcaactgggtgcgtaaagagattggcccgctggcgacgccagacgtgctgcactggaccgactccctgcctaaaacccgctccggcaaaattatgcgccgtattctgcgcaaaattgcggcgggcgataccagcaacctgggcgatacctcgacgcttgccgatcctggcgtagtcgagaagctgcttgaagagaagcaggccatcgcgatgccatcgtaa

SEQ ID NO: 151377 - protein, 652 aa, Escherichia coli ED1a
MSQIHKHTIPANIADRCLINPQQYEAMYQQSINAPDTFWGEQGKILDWITPYQKVKNTSFAPGNVSIKWYEDGTLNLAANCLDRHLQENGDRTAIIWEGDDASQSKHISYKELHRDVCRFANTLLELGIKKGDVVAIYMPMVPEAAVAMLACARIGAVHSVIFGGFSPEAVAGRIIDSSSRLVITSDEGVRAGRSIPLKKNVDDALKNPNVTSVEHVVVLKRTGGKIDWQEGRDLWWHDLVEQASAQHQAEEMNAEDPLFILYTSGSTGKPKGVLHTTGGYLVYAALTFKYVFDYHPGDIYWCTADVGWVTGHSYLLYGPLACGATTLMFEGVPNWPTPARMAQVVDKHQVNILYTAPTAIRALMAEGDKAIEGTDRSSLRILGSVGEPINPEAWEWYWKKIGNEKCPVVDTWWQTETGGFMITPLPGATELKAGSATRPFFGVQPALVDNEGNPLEGATEGSLVITDSWPGQARTLFGDHERFEQTYFSTFKNMYFSGDGARRDEDGYYWITGRVDDVLNVSGHRLGTAEIESALVAHPKIAEAAVVGIPHNIKGQAIYAYVTLNHGEEPSPELYAEVRNWVRKEIGPLATPDVLHWTDSLPKTRSGKIMRRILRKIAAGDTSNLGDTSTLADPGVVEKLLEEKQAIAMPS

SEQ ID NO: 151378 - DNA, 1959 bp, Methylobacterium chloromethanicum CM4
  CDS (1)..(1959): transl_table=11
atgagcgagaaggtcatcgacgttcaagatgcctggcgggaccgggctctgatcgacgaagccaagtacaaggaaatgtacgaggcctccgtttctgatcctgagacgttctggggcgagcatggcaagcggatcgattggtcgacgccgttcagcaaagtcaagaatacgagctttgcgccgggcgatgtatcgatcaaatggttcgaggacggcaggaccaacgtcgcgctaaactgcattgaccgtcacctcgcgacccgcggcgaccagaccgcgatcatctgggagggtgacgatcccaacgagtcgaagcacatcacctaccggcagttgcacgccgaagtgtgccggatggccaacgttttgcgcaatcgcggcgtcggcaagggcgaccgcgtcacgctctaccttccgatgatccccgaggccgcctacgcgatgttggcttgcgcgcgtctgggcgccatccacgccatcgtcttcggcggcttctcgcccgactcgctggcgagccggatcaagggctgcggctcgaaactcgtcatcacggccgacgagggcctgcgcggcggtcgcaaggtgccgctcaaggccaacgtggacgaggcgatcaagcgcctcgacaaggatctcgtggaccacgtgatcgtggtcaagcgcacgggcggcaacgtggcgatggagccgggccgcgacgtctattaccacgaggccgccgagcaggtgaccgacgaatgcccggcggaggccgtcgaggccgagcacccgctcttcatcctctacacgtcgggctcgaccggccagccgaagggcgtggtgcacaccaccggcggctacctcgtctacgcttcgatgacccaccaatacgtcttcgattaccacgatggcgaggtctactggtgcacggccgatgtgggctgggtcaccgggcacagctacatcgtctacggtccgctcgcgaacggcgcgaccacgctgatgttcgagggcatccccacctatccgtcgaattcccgcttctgggaggtgatcgacaagcacaaggtcaacatcttctacaccgcgccgaccgcgatccgctcgctcatgggcggcggtgagggcccggtgaagaagacctcgcgccaatccctgcgggtgctgggttcggtcggcgagccgatcaatccggaagcctgggactggtactaccgcgtcgtcggcgattcccgctgcccgatcgtcgacacgtggtggcagaccgagaccggcggcatcctcatcaccccgctgccgggggcgacgcggctgaagccaggctcggccacgcttccgttcttcggcgtgcagccggtgatggtcgatgccgaggggaagatcctggacggcgcctgcgagggtaacctctgcatcaaggacagttggcccggccagatgcgcacggtctacggcgatcacgagcgcttcgagcagacctacttctcgacctacaaggatctctacttcaccggcgacggggcccggcgcgacgcggacggctattactggatcaccgggcgcgtggacgacgtcatcaacgtctccggacaccgcatgggtacggcggaggtcgaatcctccctcgtcgcccatccgaaggtctcggaagcggcggtcgtcggctatccgcacaacgtgaagggccagggcatctacgcctacgtcactctcaacgagggtgaggagggcacggacgagctgcgcaaggagctggtcacctgggtccgcaaggatatcggcccgatcgcctcgcccgatctgctccagttcgcgccggggctgccgaagacccgctccggcaagatcatgcgccgcatcctgcgcaagatcgccgaggacgattttggctcgctcggcgacacctcgaccctggccgagccggccgtggtcgatgacctgatcgagaaccgccagaaccgccagaaccgctcggcctga

SEQ ID NO: 151379 - protein, 652 aa, Methylobacterium chloromethanicum CM4
MSEKVIDVQDAWRDRALIDEAKYKEMYEASVSDPETFWGEHGKRIDWSTPFSKVKNTSFAPGDVSIKWFEDGRTNVALNCIDRHLATRGDQTAIIWEGDDPNESKHITYRQLHAEVCRMANVLRNRGVGKGDRVTLYLPMIPEAAYAMLACARLGAIHAIVFGGFSPDSLASRIKGCGSKLVITADEGLRGGRKVPLKANVDEAIKRLDKDLVDHVIVVKRTGGNVAMEPGRDVYYHEAAEQVTDECPAEAVEAEHPLFILYTSGSTGQPKGVVHTTGGYLVYASMTHQYVFDYHDGEVYWCTADVGWVTGHSYIVYGPLANGATTLMFEGIPTYPSNSRFWEVIDKHKVNIFYTAPTAIRSLMGGGEGPVKKTSRQSLRVLGSVGEPINPEAWDWYYRVVGDSRCPIVDTWWQTETGGILITPLPGATRLKPGSATLPFFGVQPVMVDAEGKILDGACEGNLCIKDSWPGQMRTVYGDHERFEQTYFSTYKDLYFTGDGARRDADGYYWITGRVDDVINVSGHRMGTAEVESSLVAHPKVSEAAVVGYPHNVKGQGIYAYVTLNEGEEGTDELRKELVTWVRKDIGPIASPDLLQFAPGLPKTRSGKIMRRILRKIAEDDFGSLGDTSTLAEPAVVDDLIENRQNRQNRSA

SEQ ID NO: 151380 - DNA, 1941 bp, Desulfatibacillum alkenivorans AK-01
  CDS (1)..(1941): transl_table=11
atgtcaaacaaccttttcaccgtccctgaagattggcaaaaaagagcatggtgcgacgacgcgcgttaccaaaaaatgtatgatgaatcggtcaacgatcctgatgcattctggtctcgggaagcgcagcgcattgactggttcgagccctttagcaaggtcaagaattccagttttaacggggacgtggacatcaaatggtttttggacggcaaactgaacgtggcctacaattgtttggacaggcacctggagaagcggggggatcagacagccattatttttgagggcaacgagcccggggtggaggagaaaatcacctatcgccagctttacgagagggtgtgccgcttctccaacgtcttgaaatcctgcggggtcaaaaagggggatcgggtttccatctaccttcccatgattccccagcttgcggttgccatgctggcgtgcgcccgcatcggcgccatccattccatcgtgtttgcgggattttcgcccgacgctttggcgaaccggatcacggacgcggagtgcaccattctcattaccgcggatgagggcctgcgcggccccaaggcgattggcctgaaagaagccgccgacgaggccatggacaaggccggcatggtcaagaaatgcattgtggtcaagcacaccggcgcggacgttcccatgaaggcggggagggacctctggtggcatgaattgacagccaaggaaagcacggagtgcccgcctgaaagcatggattcggaagatcccttgttcatcctgtacacgtccgggtccacgggcacgcccaagggggtgctgcacaccacaggcggttatattgtatatacatccctcacccaccagtacgttttcgactatcacgacggcgacatttactggtgcacggccgacatcggctgggtgacgggccatagctacatcatatacggccccctggccaacggggcggtcaccatcatgtttgaaggcatccccaattatccggatttttccaggttctggcaaatctgcgacaagcatcaggtgaacattttctacaccgcgcctacggtggtccgggcgctcatgcagcagggggacgagccggtgaaggcgacgtcccgcacatccgtgaggctgctgggcacggtgggcgaacccatcaacccggaagcctggctgtggtatcacagggtggtgggcgaagagcgctgccccattgtggacacctggtggcagaccgagacggggggcattatgattacccctttacccggcgcaacagccttaaagccgggttcggccacgcggccctttttcgggattcagccggccctgatagataaggaaggcaaccaactggaagggccgggggaaggatacctggttatgctggactcgtggccggccctggcccgaaccgtatacggcgaccaccggcggtttaagtccacctatttcatccaatgccccggaacctatttcagcggcgacggcgcccgcagggacgaggacgggtattactggatcaccggccgcatcgacgacgtcatcaacgtgtccggccaccgtttgggaaccgcggagatcgaaagctccctggtggcccacccggcggtttccgaagcggcggtggtgggctttccgcatgacatcaagggccaggccatatacgcctacgtgaccctgtcctccggttatgagccgtcggaggaacttagaaaagagctttccctgttcgtccgtaaagacatcggccccatcgccacgcctgaagtgctgcagtttaccgacagcctgcccaaaaccaggtcgggcaagatcatgcggcgcatcttgcgtaaggtggcgtgcaacgaactggacaacctgggcgacacctccaccctggcggacccggcggtggtggaggctctgattaaaaacaggattgacgcctgcaggtga

SEQ ID NO: 151381 - protein, 646 aa, Desulfatibacillum alkenivorans AK-01
MSNNLFTVPEDWQKRAWCDDARYQKMYDESVNDPDAFWSREAQRIDWFEPFSKVKNSSFNGDVDIKWFLDGKLNVAYNCLDRHLEKRGDQTAIIFEGNEPGVEEKITYRQLYERVCRFSNVLKSCGVKKGDRVSIYLPMIPQLAVAMLACARIGAIHSIVFAGFSPDALANRITDAECTILITADEGLRGPKAIGLKEAADEAMDKAGMVKKCIVVKHTGADVPMKAGRDLWWHELTAKESTECPPESMDSEDPLFILYTSGSTGTPKGVLHTTGGYIVYTSLTHQYVFDYHDGDIYWCTADIGWVTGHSYIIYGPLANGAVTIMFEGIPNYPDFSRFWQICDKHQVNIFYTAPTVVRALMQQGDEPVKATSRTSVRLLGTVGEPINPEAWLWYHRVVGEERCPIVDTWWQTETGGIMITPLPGATALKPGSATRPFFGIQPALIDKEGNQLEGPGEGYLVMLDSWPALARTVYGDHRRFKSTYFIQCPGTYFSGDGARRDEDGYYWITGRIDDVINVSGHRLGTAEIESSLVAHPAVSEAAVVGFPHDIKGQAIYAYVTLSSGYEPSEELRKELSLFVRKDIGPIATPEVLQFTDSLPKTRSGKIMRRILRKVACNELDNLGDTSTLADPAVVEALIKNRIDACR

SEQ ID NO: 151382 - DNA, 1938 bp, Pseudomonas aeruginosa LESB58
  CDS (1)..(1938): transl_table=11
atgttcgagatcagcgtccacccggtgccggacgccgtccgccagcgtgcctacctgaacgacgacgactaccagcgcctgtaccgccaatccgtcgagaaccccgaagagttctggggcgagcaggccaaggccttcctcgattggttcaagccctggcacagcgtccaccacggcgacctgaggaaaggccaggccacctggttcaagggcggccagttgaacgtcgcctacaactgcatcgaccgccacctggaacgccgcggcgaacagatcgcgatcgtctgggaaggcgacaaccccagcgaatccgcgcacatcacctaccgcaagctgcaccacaacgtctgccgcctggctaacgtgctgaagagccgcggcgtggaaaagggcgaccgggtctgcatctacatgccgatgattcccgaggccgcctacgccatgctcgcctgcgcccgcatcggggcggtgcactcggtggtgttcggcggcttctcgccggactcgctgcgcgaccgcattctcgatgccgactgccgcaccgtgatcaccgccgacgagggcgtgcgcggcggcaagtacatcccgctgaagcagaatgtggaaaaggcgctgaaggactgcccggacgtctccaccgtggtggtagtcgagcgcacccagggcgacataccctgggtcgaaggccgcgacatctggtaccacgaggcgctccacgcggcctcagccgactgcccggcggaagcgatggacgccgaggacccgctgttcatcctctatacctccggcagcaccggcaagccgaagggcgtgttgcacaccaccgggggctacctgctcggcgcggcgatgacccacaagtacgtgttcgactaccacgatggcgacgtctactggtgcaccgccgacgtcggctgggtcaccggacacagctatatcgtctacggcccgctggccaacggcgccaccaccctgatgttcgagggcgtgcccaactacccggacgcctcgcgcttctggcaagtgatcgacaagcaccaggtgaatatcttctacaccgcgccgaccgcgatccgcgcgctgatgcgcgaaggcgacgccccggtccgccagacctcccgcagcagcctgcgcctgctcggctcggtgggcgagccgatcaaccccgaggcctgggagtggtactaccaggtggtcggcgagaagcgctgccccatcgtcgatacctggtggcagactgagaccggcagcatcctgatcaccccgttgcccggcgccactgcgctaaagccaggctcggcgacccgcccgttcttcggcgtgcaacccgtgctgctcgacgagaaaggcaaggaaatcgacggcgcgggcagcggcgtactggcgatcaaggccagttggccgagtcagatccgcagcgtctacggcgaccaccagcggatgatcgacacctacttcaagccctaccccgggtattacttcagcggcgacggcgcgcgccgcgacgaggacggctactactggatcaccggccgggtcgacgacgtgatcaatgtctccggacaccggatcggcaccgccgaggtcgagagcgcgctggtcctgcacgatgcggtggccgaggcggcggtggtcggctgcccgcatgacgtgaagggccaggccatctacgcgttcgtcaccctgatggccggcagtcagcccagcgaggcgctgcaacaggaattgctggccctggtcggcaaggagatcggcagcttcgccaagccggatcacctgcaatgggcgcccagcctgccgaagacccgctccggcaagatcatgcggcgtatcctgcgcaagatcgcctgcaacgagctggacagtctcggcgatacctcgaccctggccgatccgggagtggtgcaggggttgatcgacaaccgcctcaaccgctga

SEQ ID NO: 151383 - protein, 645 aa, Pseudomonas aeruginosa LESB58
MFEISVHPVPDAVRQRAYLNDDDYQRLYRQSVENPEEFWGEQAKAFLDWFKPWHSVHHGDLRKGQATWFKGGQLNVAYNCIDRHLERRGEQIAIVWEGDNPSESAHITYRKLHHNVCRLANVLKSRGVEKGDRVCIYMPMIPEAAYAMLACARIGAVHSVVFGGFSPDSLRDRILDADCRTVITADEGVRGGKYIPLKQNVEKALKDCPDVSTVVVVERTQGDIPWVEGRDIWYHEALHAASADCPAEAMDAEDPLFILYTSGSTGKPKGVLHTTGGYLLGAAMTHKYVFDYHDGDVYWCTADVGWVTGHSYIVYGPLANGATTLMFEGVPNYPDASRFWQVIDKHQVNIFYTAPTAIRALMREGDAPVRQTSRSSLRLLGSVGEPINPEAWEWYYQVVGEKRCPIVDTWWQTETGSILITPLPGATALKPGSATRPFFGVQPVLLDEKGKEIDGAGSGVLAIKASWPSQIRSVYGDHQRMIDTYFKPYPGYYFSGDGARRDEDGYYWITGRVDDVINVSGHRIGTAEVESALVLHDAVAEAAVVGCPHDVKGQAIYAFVTLMAGSQPSEALQQELLALVGKEIGSFAKPDHLQWAPSLPKTRSGKIMRRILRKIACNELDSLGDTSTLADPGVVQGLIDNRLNR

SEQ ID NO: 151384 - DNA, 1950 bp, Methylobacterium nodulans ORS 2060
  CDS (1)..(1950): transl_table=11
atgaaccatcggatcgtcgcggtgccggacgcggtgcgtgcgcgggctcacattgacgaagccaagtacaaggcgtggtacgacgcctcgatcaacgatccggaggggttctggcgcgagcacggcaagcggatcgactggttcaagccctataccagggtcaaggagaccagcttcggacccgacaacgtctccatccgctggtttgccgacggcatcaccaacgtcgcccacaactgcatcgaccgccacctcgccagccgcggcgaccaggtcgccatcatctgggagggcgacgatcccgccgacacccgccgcatcacctaccgcgagctgcacgcccaggtcggccgcatggccaacgtcctgcgcaaccgcggcgtcgccaagggcgaccgcgtcaccatctacctgcccatgatccccgaagccgccgtcgccatgctggcctgcgcccggctcggcgccatccattcggtggtgttcggcggcttctccccggattccctcgccggccgcatccagggctgcgcctcgcgcctgatcatcaccgccgacgagggcctgcgcggcggccgcacggtcccgctcaaggccaatgtcgatgcggccatcgcccgcctgcccgccgacagcgtcgaccatgtcatcgtggtgcgccgcaccggcggcgccgtcgccatggagccggggcgcgacgtctactacgacgccgccgcccgcgaggtcaccgaggagtgcccggccgcccatgtcgaggccgagcatccgctcttcctgctctacacctccggctcgaccggccagcccaagggcgtggtccacaccaccggcggctatctggtctatgccgccatgacccaccagtacgtcttcgactaccacgagggcgacgtctactggtgcaccgccgatgtcggctgggtcaccgggcacagctacatcgtctacgggccgctcgccaacggcgccaccaccctgatgttcgagggcatcccgacctatccgtcggtcgcccggttctgggaggtggtcgacaagcaccaggtcagcatcttctacaccgccccgaccgccatccgctcgctgatgagcgccggcgcggagccggtgcagcggacctcgcgcgcctccctgcgcatcctcggctcggtcggcgagccgatcaacccggaggcctgggaatggtactaccgggtggtcggcgaggagcgctgcccgatcgtcgacacctggtggcagaccgagaccggcggcatcctgatcagcccgctgcccggcgccaccccgctcaagcccggctcggccacccggccgttcttcggcgtcaagccggtggtggtcgacggcgacaaccgggtgctggagggtgcttgcgagggcaatctctgcctggacgagtcctggcccggccagatgcgcaccgtctggggcgaccatgcgcgcttcgtgcagacctatttctcgaccttcccgggccgctacttctcgggcgacggctgccggcgggatgaggatggcgactactggatcaccggccgggtggacgacgtcatcaacgtctcgggccaccggatgggcacggcggaggtcgaatccgccctggtggcgcatccgcaggtctcggaggcggcggtggtgggctatccccacagcctcaagggccagggcatctacgcctacgtgacgctgatgcagggggtggagccctcggaggcgctgcgcaaggagctggtcgcctgggtgcgccgggagatcggcccgatcgcctcgcccgacctgatccagttcgcccccggcctgcccaagacccgctcgggcaagatcatgcgccgcatcctgcgcaagatcgccgaggacgattttgccgcgctcggcgacacctcgaccctggcggatccggcggtggtcgacgacctgatcgagaaccggcagaaccgcgccggctga

SEQ ID NO: 151385 - protein, 649 aa, Methylobacterium nodulans ORS 2060
MNHRIVAVPDAVRARAHIDEAKYKAWYDASINDPEGFWREHGKRIDWFKPYTRVKETSFGPDNVSIRWFADGITNVAHNCIDRHLASRGDQVAIIWEGDDPADTRRITYRELHAQVGRMANVLRNRGVAKGDRVTIYLPMIPEAAVAMLACARLGAIHSVVFGGFSPDSLAGRIQGCASRLIITADEGLRGGRTVPLKANVDAAIARLPADSVDHVIVVRRTGGAVAMEPGRDVYYDAAAREVTEECPAAHVEAEHPLFLLYTSGSTGQPKGVVHTTGGYLVYAAMTHQYVFDYHEGDVYWCTADVGWVTGHSYIVYGPLANGATTLMFEGIPTYPSVARFWEVVDKHQVSIFYTAPTAIRSLMSAGAEPVQRTSRASLRILGSVGEPINPEAWEWYYRVVGEERCPIVDTWWQTETGGILISPLPGATPLKPGSATRPFFGVKPVVVDGDNRVLEGACEGNLCLDESWPGQMRTVWGDHARFVQTYFSTFPGRYFSGDGCRRDEDGDYWITGRVDDVINVSGHRMGTAEVESALVAHPQVSEAAVVGYPHSLKGQGIYAYVTLMQGVEPSEALRKELVAWVRREIGPIASPDLIQFAPGLPKTRSGKIMRRILRKIAEDDFAALGDTSTLADPAVVDDLIENRQNRAG

SEQ ID NO: 151386 - DNA, 1944 bp, Thioalkalivibrio sp. HL-EbGR7
  CDS (1)..(1944): transl_table=11
atgtctgaagtcaaagtccacgagatccccgaggcgttcgccgcccaggcccacgtcaacgcccagcagtaccaggagatgtaccagcgctccgtggacgacccggagggcttctggtcagagcaggccgacaaatacgtcacctggttcaagaagtgggacaaggtgctggactggtccttcgccggcgacgtgcacatccgctggttcgagggcgccaagctcaacgtctcctacaactgcctggatcgccacctggagacccgcggcgaccagcccgccatcatctgggagggggatgatcccaacgaggaccgcaccctcacctaccgggagctgcacgccgaggtcagccgcttcgccaatgtgctcaagtcacgcggcgtgaagaagggcgaccgggtctccatctacatgcccatgatccccgaggcggccgtggccatgctggcctgcacccgcatcggtgccatccattccgtggtgttcggcggtttctcccccgacgccctgcgcgaccgcatccaggactccgactgccaggtggtgatcacctccgaccagagcctgcgcggcggcaagaaggtgccgctcaaggccaacgccgacaaggccatcgcccagtgtcccaacgtgcacacctgcattgtggtcaagcgcggcggcgagcaggtgaactggcatgatgatcgtgacgtctggtaccacgaggccatgaaggaggcctccgccgagtgtccgccggaggagatgaacgccgaggacccgctgttcatcctctacacctccggctccaccggcaaacccaagggcgtgctgcacaccaccggcggctacctgctgcaggcggccatgacccacaagctggtcttcgactacaaggacggtgagacctactggtgcaccgccgacgtgggctgggtcaccggccacacctacatcgtctacggcccgctggccaacggcgcgcgctcgctgatgttcgagggcatccccacctaccccgacaccggacgcttctggcaggtgtgcgacaagcacaaggtgtccaccttctacaccgcgcccacagccatccgcatgctcatgggcgcgggagacgacttcgtcaagaagcacaagcgttcgtccctgcgcctgctgggcaccgtgggcgagcccatcaaccccgaggcctgggagtggtattaccgggtggtgggcgacgagcgctgcccgatcgtggacacctggtggcagaccgagaccggcggccacatgatcacccccctgcccggtgccaccaggctcaaggccggatccgccacccatcccttcttcggcgtgcagccggtgctgctggatgatcagggcaaggagatcaccggcaatcccgccaccggcaacctgtgcatcaagcatccctggccggggatgatgcgcacggtctacggcgatcatccccgcttcatcgagacctacttcaagctctatcccggctattacttctccggtgacggcgcgcgccgggacgaggaaggctattactggatcaccggccgcgtggacgacgtgctcaacgtctccggccaccgcctcggcaccgccgagatcgaatccgccctggtgctgcatcccaaggtggccgaggccgccgtggtgggctatccccacgagatcaccggccagggcatctacgcctacgtcacgctgatggccggcgaacagggcagcgaggagctgaagaaggaactggtcaacctggtgcgcgaggagatcggccccatcgccaaggtcaacctgctgcagttcgccccgggcctgcccaagacccgttccggcaagatcatgcgccgcatcctgcgcaagatcgccgccaacgaactggacaacctgggtgatacctcgaccctggccgatcccggcgtggtggacaacctgatcgacaatcgcctcaataagtag

SEQ ID NO: 151387 - protein, 647 aa, Thioalkalivibrio sp. HL-EbGR7
MSEVKVHEIPEAFAAQAHVNAQQYQEMYQRSVDDPEGFWSEQADKYVTWFKKWDKVLDWSFAGDVHIRWFEGAKLNVSYNCLDRHLETRGDQPAIIWEGDDPNEDRTLTYRELHAEVSRFANVLKSRGVKKGDRVSIYMPMIPEAAVAMLACTRIGAIHSVVFGGFSPDALRDRIQDSDCQVVITSDQSLRGGKKVPLKANADKAIAQCPNVHTCIVVKRGGEQVNWHDDRDVWYHEAMKEASAECPPEEMNAEDPLFILYTSGSTGKPKGVLHTTGGYLLQAAMTHKLVFDYKDGETYWCTADVGWVTGHTYIVYGPLANGARSLMFEGIPTYPDTGRFWQVCDKHKVSTFYTAPTAIRMLMGAGDDFVKKHKRSSLRLLGTVGEPINPEAWEWYYRVVGDERCPIVDTWWQTETGGHMITPLPGATRLKAGSATHPFFGVQPVLLDDQGKEITGNPATGNLCIKHPWPGMMRTVYGDHPRFIETYFKLYPGYYFSGDGARRDEEGYYWITGRVDDVLNVSGHRLGTAEIESALVLHPKVAEAAVVGYPHEITGQGIYAYVTLMAGEQGSEELKKELVNLVREEIGPIAKVNLLQFAPGLPKTRSGKIMRRILRKIAANELDNLGDTSTLADPGVVDNLIDNRLNK

SEQ ID NO: 151388 - DNA, 1989 bp, Thermomicrobium roseum DSM 5159
  CDS (1)..(1989): transl_table=11
atgccggacgaaatcggaacgggcgcagtcggcacgatcgaggggttgctcgtcgagacccggcgattcccgcctcccccggagttcgcggcgcaggcgaacatcaacgatccgagcgtttacgaacgggcgcgtcaggacccggaaggcttctgggcgtcgatcgctcgagagctcgagtgggatcagccgtggcagacggtcatggagtggaatcccccctgggtcaagtggttcgtcggcggcaagctgaacgcgtcggtcaattgtgtcgatcgacacctcaaggcagggcggcgtaccaaggcagcgatcatttgggaaggtgagccaggcgacgagcgggtattgacctaccaggatctgtatcgggaagtgaatcgcgtcgcgctggcgctcagacgactgggcattgaaaaaggagaccgagtcgccatctacttgccgatgattcccgagctgccgatcgcgatgctggcctgtgcccgcatcggtgcaccgcattcggttgtgttcggtggtttcagcgcggacgcactggccgaccggatcaatgactgccaggccaagttgctgatcacggctgacgggggctaccggcggggacgtgtcgtcccgctcaaggagacggcagaccgagcgctcgatcggtgcccgagtgtggagaaggtcctcgtcgtgcgacggatcggcgagagccaccaggtgaccatgcaagcggggcgcgacctctggtggcacgaggtgctggctggtattcgcgagcaatactgtcctcctgaatcgttggacagcgagcacccgctttatatcctttatacctccggcaccaccggaaaaccgaagggacagctccacacgactggtggttacctcacgggggtgtacattacctcgaagtgggtcttcgatctcaagccggacgacatttactggtgcactgccgacatcggctgggttactggccacagctacatcgtgtacggcccgctggccaatggtgcgaccgtcgtcatgtacgagggctcaccggattggccagacaaggatcgcttctgggacatcgtggaacggcggcacgtcacgatcctgtatacatcgcccacggcgatccgtcagttcatgcgctggggaccggaataccccgctcggcacgatctctcgagcttgcgactgctgggcacggtcggtgagccgatcaatcctgaggcctggatgtggtatcacgagcatatcggtcgcgggcgttgcccgatcgtcgatacctggtggcagacagaaaccgggatgatcttgatcacgccgctgcctggcctcacgacgaccaaacccggttcggcgacgctgccgttcccgggcatcgagcccgatattctcgatgaagcaggcaactctgttcccactggtcaaggcggttacctcgtcatccgtcggccgtggccctcgatctcgcgcacgttatggggcgatccggatcgctacgtgaagacgtacttctcgaaatacgggccgtcgatctatgtgaccggagatggtgccaagcgagacgaggacggttactactggatcctcggccgggtcgatgacgtcctgaacgtggccggccaccgcttggggacgatggagctggaaagcgcgctggttgggcatccggtggtcgctgaggcggcggtgatcggtgtctcgcacgagatcaaggggcaggtaccggtcgccttcgtgagcttgcgggccggctacaccccgagcgactcactcgctgaggagttgcggcgccatgtcgcggaggttatcggcccgatcgctcgccctgagcgggtgatcttcgtcgccgacctccccaagacgcgcagtgccaagatcatgcgtcgactgctccgcgacatcgccgaagggagggtgctgggcgatacgacgactctgactgatccgacagtggtggaggagatcaagcgaacctggattgccgagcacggcgagcaagaatga

SEQ ID NO: 151389 - protein, 662 aa, Thermomicrobium roseum DSM 5159
MPDEIGTGAVGTIEGLLVETRRFPPPPEFAAQANINDPSVYERARQDPEGFWASIARELEWDQPWQTVMEWNPPWVKWFVGGKLNASVNCVDRHLKAGRRTKAAIIWEGEPGDERVLTYQDLYREVNRVALALRRLGIEKGDRVAIYLPMIPELPIAMLACARIGAPHSVVFGGFSADALADRINDCQAKLLITADGGYRRGRVVPLKETADRALDRCPSVEKVLVVRRIGESHQVTMQAGRDLWWHEVLAGIREQYCPPESLDSEHPLYILYTSGTTGKPKGQLHTTGGYLTGVYITSKWVFDLKPDDIYWCTADIGWVTGHSYIVYGPLANGATVVMYEGSPDWPDKDRFWDIVERRHVTILYTSPTAIRQFMRWGPEYPARHDLSSLRLLGTVGEPINPEAWMWYHEHIGRGRCPIVDTWWQTETGMILITPLPGLTTTKPGSATLPFPGIEPDILDEAGNSVPTGQGGYLVIRRPWPSISRTLWGDPDRYVKTYFSKYGPSIYVTGDGAKRDEDGYYWILGRVDDVLNVAGHRLGTMELESALVGHPVVAEAAVIGVSHEIKGQVPVAFVSLRAGYTPSDSLAEELRRHVAEVIGPIARPERVIFVADLPKTRSAKIMRRLLRDIAEGRVLGDTTTLTDPTVVEEIKRTWIAEHGEQE

SEQ ID NO: 151390 - DNA, 1959 bp, Agrobacterium radiobacter K84
  CDS (1)..(1959): transl_table=11
atgtcggaaaagattcatccggtgacgaaaccggtcaaggcgcgagcgttgatcgaccaggcgaaatatcagaaatggtacagacagagcgtcgaggatcccgacaagttctggggtaagcatggccagcgcatcgactggttcaaaccctacaccaaggtcaaaaatacgtcgtttaccggcaaggtctcgatcaaatggttcgaggatgggctgaccaatgtttcctataattgcatcgaccgtcacctgaagaagcacggcgatcgcgtcgccttcatctgggaaggcgacaacccttatatcgacaagaaggttacctataacgagctctacgagcatgtttgccggctggcgaacgtcttgaagaagcacggcgtcaagaagggcgaccgcgtcaccatctatatgccgatgatcccggaagccgcctatgcgatgctcgcctgcgcccgcattggtgctgtgcattccgtcgtgttcggcggtttctcgccggaagcgctgggtggccgcatcgtcgattgccagtcgaccttcgtcatcacttgtgacgagggcttgcgcggcggcaagccgattccgctcaaggaaaacaccgatacggcgatccatatcgccgccaagcaatttgtcaccgtcgagaaggttctggtcgtgcgtcgcaccggcggcaaaaccggctgggcgcccggtcgcgacctctggtatcacgaggaaactgccaaggtgaaggcggattgtccgccggtgaagatgaaggcggaagatcccctcttcatcctctatacgtcaggttcgaccggcaagccgaagggtgtgctgcacacgacaggcggctatctcgtctatgcggcgatgacgcatgaatataccttcgactatcaccccggcgatatctactggtgcaccgccgatgtcggctgggtcaccggccattcctatatcgtctatggtccgctggcgaacgccgcgacctcgctgatgttcgagggcgtgccgaactaccccgatcagggccgtttctgggacatcatcgacaagcacaaggtcaatatcttctacactgcaccgacggcgatccgctcgctgatgggtgccggcgatcatttcgtcaagcgttcgtcgcgctccagcctgcgcctcctcggcacggtcggcgagccgatcaatccggaagcctgggaatggtactataaggtggtcggcgacagccgcagcccgatcgtcgatacctggtggcagacggaaaccggcggccacatgatcacgccgcttccgggcgcgacggacctgaagcccggttccgccaccctgcccttcttcggtgtccagccggagctggtcgatagcgaaggcaaagtgctggaaggtgctgccgacggcaatctcgtcatcgccgacagctggcccggccagatgcgcacggtctatggcgatcacgagcgtttcatccagacctatttttccacctataaaggcaagtacttcaccggcgacggctgccgccgcgacgaggatggctattactggatcaccggccgcgtcgacgacgtcctcaacgtctccggccaccgtctcggcacggccgaggtcgaatcggcgctggtctcgcacaagcatgtttcagaggcggccgttgtcggctatccgcattcgatcaagggccagggcatctattgctacgtgacgctgatggtcggacaggagggctcggacgcgttgcggcaggagttggtgaaacatgttcgcgccgaaatcggcccgatcgcttcgcccgacaagatccagttcacccccggcctgccgaaaacccgctccggcaagatcatgcgccgcatcctgcgcaagatcgctgaagacgatttcggcgcgcttggcgatacgtcgacgctggccgatccggctgtcgttgatgatctgatcgccaataggcagaacaaggcggatgcggcttga

SEQ ID NO: 151391 - protein, 652 aa, Agrobacterium radiobacter K84
MSEKIHPVTKPVKARALIDQAKYQKWYRQSVEDPDKFWGKHGQRIDWFKPYTKVKNTSFTGKVSIKWFEDGLTNVSYNCIDRHLKKHGDRVAFIWEGDNPYIDKKVTYNELYEHVCRLANVLKKHGVKKGDRVTIYMPMIPEAAYAMLACARIGAVHSVVFGGFSPEALGGRIVDCQSTFVITCDEGLRGGKPIPLKENTDTAIHIAAKQFVTVEKVLVVRRTGGKTGWAPGRDLWYHEETAKVKADCPPVKMKAEDPLFILYTSGSTGKPKGVLHTTGGYLVYAAMTHEYTFDYHPGDIYWCTADVGWVTGHSYIVYGPLANAATSLMFEGVPNYPDQGRFWDIIDKHKVNIFYTAPTAIRSLMGAGDHFVKRSSRSSLRLLGTVGEPINPEAWEWYYKVVGDSRSPIVDTWWQTETGGHMITPLPGATDLKPGSATLPFFGVQPELVDSEGKVLEGAADGNLVIADSWPGQMRTVYGDHERFIQTYFSTYKGKYFTGDGCRRDEDGYYWITGRVDDVLNVSGHRLGTAEVESALVSHKHVSEAAVVGYPHSIKGQGIYCYVTLMVGQEGSDALRQELVKHVRAEIGPIASPDKIQFTPGLPKTRSGKIMRRILRKIAEDDFGALGDTSTLADPAVVDDLIANRQNKADAA

SEQ ID NO: 151392 - DNA, 1956 bp, Agrobacterium vitis S4
  CDS (1)..(1956): transl_table=11
atgtctgcgaagacctatcccgttttaaaggccgcgaaggcccaggctttgatcgataacgacaaatacctgaaatggtacgaggaaagcattgaggagccggagaaattctggtccaagcacggcaagcggatcgattggttcaagccctataccaaggccaagaataccagtttcaagggcaaggtgccgatcaaatggttcgaggacgggctgaccaatgtctcctacaattgcatcgaccgccatctgaaaacccatggtgagcgcaccgcgatcatctgggaaggggacaatccctatatcgacaagcggattacctacaaccagctttatgacaatgtctgccggcttgccaatgtgctgaaagcgcatggcgtcaagaaaggcgaccgcgtcaccatctatatgcccatggtgccggaagcgacctacgccatgctggcgtgttcgcgtattggtgctgtgcattcggtggtgtttggcggtttttcgcctgaagccctggctggccggatcgtcgattgcgaatcgaccttcgtgatcacctgtgatgaaggggtgcgcggcggcaagccggtggcgctcaaggaaaacaccgatgtcgccatcgacattgcggcgaaacaatatgtcatcgtcaacaaggtgttggtggtgcgccgtacgggcggcaaggtcggctgggctccggggcgcgatctctggtaccatcaggaaatcgccaaggtgaagccggattgcccgccggtgaagatgaaggcggaagatccgctgttcattctctacacctccggctccaccggcaagccaaagggcgtgctgcacacgaccggtggctatctcgtctatgcggcgatgacccacgaatatgtgttcgactacaaggacggcgagatattctggtgctcggcagacgtgggttgggtgaccggccattcctatatcgtctacgggccgctggccaattgcgcgacgacggtgatgttcgaaggcgtgcccaatttccccgaccagggacggttctgggaaatcatcgacaagcacaaggtcaatattttctataccgcgcccaccgccatccggtcgctgatgggggccggagacgatttcgtcaagcgttcctcgcgctcaagcctgcgattgctgggctcggtcggtgagccgatcaatccggaagcctgggagtggtattataacgtggtcggtgatcagcgctgccccattgtcgatacctggtggcagaccgagacgggcggtattctgatcagccccctgcccggcgccacggatctcaagcccggttccgcgacccggccgttctttggcgtcaagccggaactggtggacaatgaaggcaaggtgctggaaggcgctgccgatggcaatctctgcctgatcgacagctggccgggccaggcccggacgatttacggcgaccacaatcgcttcgtccagacctatttctccacctataagggtaagtatttcactggagatggctgccgacgcgacgaggacggttattactggatcaccggtcgtgtcgatgacgtgctgaatgtgtccggccaccgtctgggaactgccgaagtggaatcggcgctggtctcgcatcatctggtctcggaagccgccgtggtcggttatccgcacggcatcaagggtcagggtatttattgctatgtgacgctgatggcgggccatgagggcaatgaggaactacgtcagacgctgatcaagcatgtccgttccgaaatcggcccgattgcctctcccgacaaggttcagttcgctcccggcctgccgaaaacccgctccggcaagatcatgcgccgcatcctgcgcaagatcgccgaggacgattttggcgcgctgggcgatacatcgacgctcgccgatcctggcgttgtcgacgacctgattgccaaccggcagaacaaagcatccgcctga

SEQ ID NO: 151393 - protein, 651 aa, Agrobacterium vitis S4
MSAKTYPVLKAAKAQALIDNDKYLKWYEESIEEPEKFWSKHGKRIDWFKPYTKAKNTSFKGKVPIKWFEDGLTNVSYNCIDRHLKTHGERTAIIWEGDNPYIDKRITYNQLYDNVCRLANVLKAHGVKKGDRVTIYMPMVPEATYAMLACSRIGAVHSVVFGGFSPEALAGRIVDCESTFVITCDEGVRGGKPVALKENTDVAIDIAAKQYVIVNKVLVVRRTGGKVGWAPGRDLWYHQEIAKVKPDCPPVKMKAEDPLFILYTSGSTGKPKGVLHTTGGYLVYAAMTHEYVFDYKDGEIFWCSADVGWVTGHSYIVYGPLANCATTVMFEGVPNFPDQGRFWEIIDKHKVNIFYTAPTAIRSLMGAGDDFVKRSSRSSLRLLGSVGEPINPEAWEWYYNVVGDQRCPIVDTWWQTETGGILISPLPGATDLKPGSATRPFFGVKPELVDNEGKVLEGAADGNLCLIDSWPGQARTIYGDHNRFVQTYFSTYKGKYFTGDGCRRDEDGYYWITGRVDDVLNVSGHRLGTAEVESALVSHHLVSEAAVVGYPHGIKGQGIYCYVTLMAGHEGNEELRQTLIKHVRSEIGPIASPDKVQFAPGLPKTRSGKIMRRILRKIAEDDFGALGDTSTLADPGVVDDLIANRQNKASA

SEQ ID NO: 151394 - DNA, 1956 bp, Erwinia pyrifoliae Ep1/96
  CDS (1)..(1956): transl_table=11
atgagccatgcacatatttaccctatcccggccaacattgcgcaaaatacgctgattaatccccggcaatatcattcaatgtatcaacaatcggtacaggatcccgaggcattttggggggagcaaggcaagattgttgactggataaaaccttacgctacggtaaagaacacctcctttgcccctggcaacatctcaattcgctggtatgaggacggcacgctaaacctggccgctaactgcctcgaccggcatctggcggcgcgcggcgaccacccggcgatgatctgggaaggggatgacgccagcgaaagcaaaaccatcacctaccgcgaactgcatcacgacgtatgtcgcttttccaacgccctgaaagcgctgggaatccataaaggcgatgtggtagcgatctatatgccaatggtgccagaagccgccgtggccatgctggcctgcgcgcgcatcggtgccgtgcattcggttatcttcggcggtttttcaccggaagccgttgccgggcgaattatcgacagccacgcccgcctggtgatcaccgccgacgaaggcgtgcgtgccggacgcaccattccgctgaagaaaaacgtcgatgatgcactgaataatcctggcgtgaccagcgtcgacaacgtcattgtcctcaggcgcaccggcaaagatattagctggcaccacggccgtgatctttggtggcatgagcaggtgaacagtgccagcgagcagcatcagcctgaagagatgaacgcggaagacccattatttatcctgtatacctccggttctaccggcaaaccaaagggggtgctgcataccaccggcggttatctggtttatgcagcgaccaccttcaaatacgtcttcgattatcacccggaggatatctactggtgtaccgccgatgtcggttggattaccggacacagttacctgctgtatggcccgctggcctgtggtgccaccactctgatgtttgaaggggtgccaaactggccaaaacccagtcgtatggccgaagtggttgataaacaccgggtgaccatcctgtataccgcacccacggcggtgcgtgcgttgatggccgaaggggataaagccattgccggcacccatcgttccagcctgcgcatccttggctcggtaggcgagccgattaacccggaggcctgggagtggttccatcaaaaaatcggtaatggccattgccccatttcagatacctggtggcagacggaaacgggcggatttatgatcgctccgctccccggagccaccgcgctgaaacccggatcggctacccatcccttttttggcgtacagcccgcgctggtcgataacgaaggtcatctgcaggaaggtgccagcgaaggcaatttggttatcgttgattcctggcctggccaggcacgcacgctatttggcgatcatcagcgctttgagcaaacctacttctccaccttcaaaaaccgctatttcagcggcgacggcgctcgccgtgatgaagacggctattactggataaccggacgcgtcgacgacgtactgaatgtttccggtcatcgtttggggacggcggagattgagtccgcgctggtctcgcatccgaaaattgcggaagcagcggtagtgggtattccgcacgctttgaaaggccaggcgatctacgcctacattacgctgaaccgtggtgaagagccttcgccgcagctgtacagcgaagtgcgtgcctgggtgcgtaaagagattggccccattgccacaccggacgtgctgcactggaccgaatcattaccgaagacccgctcggggaaaattatgcgccgcattttgcgcaaaatcgccaccggcgataccagcaatctcggtgatacttccacgctggccgatcccggcgtggtagacaaattactcgaagaaaaactgtcgattaacatgccataa

SEQ ID NO: 151395 - protein, 651 aa, Erwinia pyrifoliae Ep1/96
MSHAHIYPIPANIAQNTLINPRQYHSMYQQSVQDPEAFWGEQGKIVDWIKPYATVKNTSFAPGNISIRWYEDGTLNLAANCLDRHLAARGDHPAMIWEGDDASESKTITYRELHHDVCRFSNALKALGIHKGDVVAIYMPMVPEAAVAMLACARIGAVHSVIFGGFSPEAVAGRIIDSHARLVITADEGVRAGRTIPLKKNVDDALNNPGVTSVDNVIVLRRTGKDISWHHGRDLWWHEQVNSASEQHQPEEMNAEDPLFILYTSGSTGKPKGVLHTTGGYLVYAATTFKYVFDYHPEDIYWCTADVGWITGHSYLLYGPLACGATTLMFEGVPNWPKPSRMAEVVDKHRVTILYTAPTAVRALMAEGDKAIAGTHRSSLRILGSVGEPINPEAWEWFHQKIGNGHCPISDTWWQTETGGFMIAPLPGATALKPGSATHPFFGVQPALVDNEGHLQEGASEGNLVIVDSWPGQARTLFGDHQRFEQTYFSTFKNRYFSGDGARRDEDGYYWITGRVDDVLNVSGHRLGTAEIESALVSHPKIAEAAVVGIPHALKGQAIYAYITLNRGEEPSPQLYSEVRAWVRKEIGPIATPDVLHWTESLPKTRSGKIMRRILRKIATGDTSNLGDTSTLADPGVVDKLLEEKLSINMP

SEQ ID NO: 151396 - DNA, 1956 bp, Brucella melitensis ATCC 23457
  CDS (1)..(1956): transl_table=11
atgtcggaaaagctttaccccgtgctgccggaggcaaagaaaaacacgctcatcgacaacgagacttatctcgaatggtatgaggagagcgtgagcgacccggatggcttctgggccaagcacggccggcgtatcgactggttcaagcctttcaccaaggtcaagaacaccgatttcaacggcgatgtaacgatcaagtggtatgaggatggcgtcaccaacgtctcatataattgcatcgaccgccatctgaagagccgcggcgacaaggtcgccatcatctgggaaggcgacaacccctatatcgacaagaagatcacctatcgcgagctttacgagaatgtctgccgcatggcgaatgtgctcaagaagcatggggtgaagaagggcgaccgcgtcacgatctatctgccgatgatcccggaagccgcctatgccatgctcgcctgcgcgcgcatcggcgccgtgcattcggtcgtctttgccggtttctcgccggaggcgctcgctggccgcatcgttgactgcgaatccactttcgtcatcaccgccgatgaaggtgtgcgcggcggcaagcctgttgcgctgaaggaaaacaccgataccgccatcgacatcgccgccaagcaatatgtgatggtcaacaaggtgctggtcgtgcgccgcaccggcggcaaggtaagctggggccgcggccgcgatctgtggtaccatcaggaagtcgcaagcgtcgaaccgcattgcgaaccggaaccgatgaatgcggaagacccgcttttcattctctacacatccggttccaccggcaagccgaagggtgtgctgcataccaccggcggctacctcgtctatgcctcgatgacgcatcaatatgtcttcgattaccatgatggcgagatctactggtgcacggcggatgtgggttgggtaacgggccactcctatatcgtctacggaccgctggccaatggcgcgacaacgctgatgtttgaaggcgtgcccaacttccccgatcagggccgtttctgggaagtcgtcgacaagcaccatgtcaatatcttctacaccgcgccaaccgcgctgcgcgcgcttatgggcgcgggcgatgaattcgtaacccgctcatcgcgttcgacgctgcgcctgctgggctcggtcggcgagccgatcaatccagaggcctgggagtggtattacaatgtcgtgggcgaccagaaatgccccatcgtcgatacctggtggcagacggaaaatggcggcatcctcatcaccccacttcccggcgcgaccgatttgaaacccggttcggcaacacgcccgttcttcggcgtcaagccggtgctggtggacaatgaaggcaatgtgcaggagtgcgtagccgacggcaacctgtgcatctccgactcctggccgggccagatgcgcaccgtctatggcgaccacaagcgtttcatcgaaacctacttctccacctataaggggatgtatttttcgggcgatggctgccgccgcgacgaggacggctattactggatcaccggccgcgtcgatgacgtgctgaatatttccggccatcgcctcggcacggcggaaatcgaatcggcacttgtctcgcatcactcggtttcggaagccgccgtggtcggctatccgcacccgatcaagggacagggcatctattgctatgtcacgctgatgaccggcgcagacgcgcaggacccggacgagttgcgcaaggaactggtccagcatgtgcgcaaggaaatcggccccatcgccacaccggacaagatccagtttgcgcccggactgccgaaaacccgttccggcaagatcatgcgccgcatcctgcgcaagatcgccgaagacgagttcggcgcattgggcgacacctcaacgctcgccgatcggggcgtggtggacgacctgatcgaaaatcgccagaacaagaaatga

SEQ ID NO: 151397 - protein, 651 aa, Brucella melitensis ATCC 23457
MSEKLYPVLPEAKKNTLIDNETYLEWYEESVSDPDGFWAKHGRRIDWFKPFTKVKNTDFNGDVTIKWYEDGVTNVSYNCIDRHLKSRGDKVAIIWEGDNPYIDKKITYRELYENVCRMANVLKKHGVKKGDRVTIYLPMIPEAAYAMLACARIGAVHSVVFAGFSPEALAGRIVDCESTFVITADEGVRGGKPVALKENTDTAIDIAAKQYVMVNKVLVVRRTGGKVSWGRGRDLWYHQEVASVEPHCEPEPMNAEDPLFILYTSGSTGKPKGVLHTTGGYLVYASMTHQYVFDYHDGEIYWCTADVGWVTGHSYIVYGPLANGATTLMFEGVPNFPDQGRFWEVVDKHHVNIFYTAPTALRALMGAGDEFVTRSSRSTLRLLGSVGEPINPEAWEWYYNVVGDQKCPIVDTWWQTENGGILITPLPGATDLKPGSATRPFFGVKPVLVDNEGNVQECVADGNLCISDSWPGQMRTVYGDHKRFIETYFSTYKGMYFSGDGCRRDEDGYYWITGRVDDVLNISGHRLGTAEIESALVSHHSVSEAAVVGYPHPIKGQGIYCYVTLMTGADAQDPDELRKELVQHVRKEIGPIATPDKIQFAPGLPKTRSGKIMRRILRKIAEDEFGALGDTSTLADRGVVDDLIENRQNKK

SEQ ID NO: 151398 - DNA, 1962 bp, Azotobacter vinelandii DJ
  CDS (1)..(1962): transl_table=11
atgtgcgccgcttccctctacccggtacgtcctgaagtagttgcccgatcctttaccgacgaggccgcctacaaggccatgtatcagcagtcggtcatcaatcccgatggtttctggcgcgaacaggccaggcgtctggactggatcaagccattcaccaaggtcaagcagacctccttcgacgaccaccatgtcgatatcaagtggttcgccgatggcaccctgaacgcctcctacaactgcctggaccgtcacctcgaagcgcgcggcgagcaggtggccatcatctgggagggcgacgatccgtccgcgcagcgcctgatcacctaccgcgagctgcacgaggaagtctgtcggttcgccaacgccctgcgcggtcaggacgtgcatcgcggcgacgtggtgaccatctacatgccgatgattccggaggccgtggtggccatgctggcctgcgcccgcatcggcgcgatccattcggtggtgttcggcggcttttctcccgacgcgctggccgggcgcatcgccgactgcaggtcgaaggtggtgatcaccgccgacgaaggcctgcgcggcggcaagagggttccgctgaaggccaacgtcgacgaggcgttgaccaatccggacacctacagcgtcaacaaggtgatcgtctgcaagcgcaccggtggcgatatcaagtggcactcgcatcgcgacatctggtacgaggacctgctgaaagtggccggcagcatctgcgcacccaaggaaatgggtgccgaggagccgctgttcctcctttatacctctggctcgaccggcaagccgaagggcgtggtgcacaccacgggcggctatctgctgtatgcctcgctgacccacgagcgggtgttcgactaccgtccgggcgaggtctactggtgcaccgccgacgtgggctgggtcaccggccacagctacatcgtctacggtccgctggccaacggcgccaccacgctgctgttcgagggcatccccagctacccggacatgacccggatttccaagatcatcgacaagcacggggtgaacatcctctataccgcgccgaccgccatccgcgccatgatggcccagggccgggcgccggtggagggcgccgacggttccagcctgcgcctgctcggctcggtgggcgagccgatcaatccggaagcctggcactggtactacgagaacatcggccgggagcgctgcccgatcgtcgacacctggtggcagaccgaaaccggcggcatcctgatcaccccgctgccgggcgccacctcgctcaagccgggttcggcgagccgtcctttcttcggcgtacagccggcgctggtcgacaacctgggcaacctgatcgaaggggcgggcgaaggcaacctggtgatcatcgattcgtggccggggcaggcgcgcagcctgcatggcgatcacgaccgcttcgtcgacacctacttcaagaccttcaagggcatgtacttcaccggtgacggcgcccgccgcgacgaggacggctattactggatcaccggccgcgtcgacgacgtgctgaacgtttccggtcaccgtatgggcaccgccgagatcgagagcgccatggtcgcccacccgcaggtcgccgaggcggcggtggtcggcgttccgcacgacgtcaaggggcaaggcatctatgtctacgtcaccctgaacgacggggtgtcggcttccgaggcgctgcgccaggaactgaaggcctggattcgccgggagatcggtccgatcgctacgccggacgtgatccagtgggcgcccggcttgccgaagacccgctcaggcaagatcatgcgtcgtatcctgcgcaagatctccgttggcgaatacgacgggctgggcgacatctccaccctggccgatccgtcggtggtgcagagtctgatcaacatccatcgcggcatgcaggccgcctgcgcctga

SEQ ID NO: 151399 - protein, 653 aa, Azotobacter vinelandii DJ
MCAASLYPVRPEVVARSFTDEAAYKAMYQQSVINPDGFWREQARRLDWIKPFTKVKQTSFDDHHVDIKWFADGTLNASYNCLDRHLEARGEQVAIIWEGDDPSAQRLITYRELHEEVCRFANALRGQDVHRGDVVTIYMPMIPEAVVAMLACARIGAIHSVVFGGFSPDALAGRIADCRSKVVITADEGLRGGKRVPLKANVDEALTNPDTYSVNKVIVCKRTGGDIKWHSHRDIWYEDLLKVAGSICAPKEMGAEEPLFLLYTSGSTGKPKGVVHTTGGYLLYASLTHERVFDYRPGEVYWCTADVGWVTGHSYIVYGPLANGATTLLFEGIPSYPDMTRISKIIDKHGVNILYTAPTAIRAMMAQGRAPVEGADGSSLRLLGSVGEPINPEAWHWYYENIGRERCPIVDTWWQTETGGILITPLPGATSLKPGSASRPFFGVQPALVDNLGNLIEGAGEGNLVIIDSWPGQARSLHGDHDRFVDTYFKTFKGMYFTGDGARRDEDGYYWITGRVDDVLNVSGHRMGTAEIESAMVAHPQVAEAAVVGVPHDVKGQGIYVYVTLNDGVSASEALRQELKAWIRREIGPIATPDVIQWAPGLPKTRSGKIMRRILRKISVGEYDGLGDISTLADPSVVQSLINIHRGMQAACA

SEQ ID NO: 151400 - DNA, 1938 bp, Azotobacter vinelandii DJ
  CDS (1)..(1938): transl_table=11
atgttcaagatcgccaaccatcccgtcagcgaagcattgcgccagcacagctggctgaacaatgacgactatctgcgcctgtatcggcaatcggtcgagcaaccggacagcttctgggccgaacaggccaccctcttcctcgactggttcaagccctggcggaacattcatcgcggggacatgaacaagggcgagatccactggttcgaaggtagccagttgaacgtcgcccacaactgcatcgaccggcatctgaagcagcgcggcgatcaggtggcgatcatctgggaaggcgacaatcccgccgactccgcgcgaatcacctaccgccagttgcacgaacaggtctgccgtctggccaatctgctgaagagtcgtggcatcggcaagggcgaccgggtctgcatctacatgccgatgattcccgaggccgcctacgccatgctcgcctgcgcccggatcggcgccgttcattcggtggtattcggcggcttctccccggaggcgctgcgcgaccgcatcctcgacgccgactgccgtctcctgatcactgccgacgaaagcgtgcgcggcggcaaggtcgtgcccctcaagcgtaacgccgataaggccctgcagagttgctccggggtttccagcgtgatcgtggtgcggcgcaccggtggcgccatcgactggaacgtgggacgcgatctctggtaccacgaagccgtaccgggctgcagcgccgactgtccggccgagcccatggacgccgaggcgccgctgttcatcctctacacttcgggcagcaccggcaagccgaagggcgtgctgcacaccaccggcggctacctgctgcaggcggcgatgacccaccagtacgtgttcgactaccacgacggcgacatctactggtgcagcgccgacatcggctggatcaccggacacagctacatcgtctacggcccgctggccaacggcgccaccaccctgatcttcgagggcgtgcccaactatccggacgcctcgcgcttctggcaggtggtcgacaagcatcgggtgaacatcttctataccgcgcccaccgcactgcgttcgctgatgcgtgaaggcgagggcccggtcaggaaaacctcgcgcgccagcctgcgcctgctcggctcggtgggcgagccgatcaacccggaagcctgggagtggtactaccacgtggtcggcgacagtcgctgcccgatcgtcgatacctggtggcagaccgaaaccggcgccatcatgatcaccccgctgcccggcgccaccctgctcaagcccggctcggcgacccggccgttcttcggtgtgcaaccggtactgctcgacgacaagggcaaggaaatcgagggacccggcgccggcatcctggccatcaaggccagttggccgagtcagatccgcagcatctacggcgaccatcagcgcctgatcgacacctacttcaagccctgccccggctactatttcaccggcgatggcgcacgccgggacgaagacggctactactggatcaccggccgggtcgatgacgtgatcaacgtgtcgggccaccgcatcggcaccgccgaagtggaaagcgccctggtgctgcacgacagcatcgcggaagccgccgtggtgggctgcccccacgacgtcaagggccagtgcgtctacgccttcgtcaccctggtcaccggcagccggcccagcgaccagctcaagcgggagctgatcgatcaggtcagccgcgagatcggcggcttcgccaaaccggactttctgcaatgggcaccgcgcctgccgaaaacccgttcgggcaagatcatgcgccgtatcctgcgcaagatcgcctgcaacgaactggacaacctgggcgatacctcgaccctgtccgacccatcggtgctccaggaactgatcgacaaccgcctgagccactga

SEQ ID NO: 151401 - protein, 645 aa, Azotobacter vinelandii DJ
MFKIANHPVSEALRQHSWLNNDDYLRLYRQSVEQPDSFWAEQATLFLDWFKPWRNIHRGDMNKGEIHWFEGSQLNVAHNCIDRHLKQRGDQVAIIWEGDNPADSARITYRQLHEQVCRLANLLKSRGIGKGDRVCIYMPMIPEAAYAMLACARIGAVHSVVFGGFSPEALRDRILDADCRLLITADESVRGGKVVPLKRNADKALQSCSGVSSVIVVRRTGGAIDWNVGRDLWYHEAVPGCSADCPAEPMDAEAPLFILYTSGSTGKPKGVLHTTGGYLLQAAMTHQYVFDYHDGDIYWCSADIGWITGHSYIVYGPLANGATTLIFEGVPNYPDASRFWQVVDKHRVNIFYTAPTALRSLMREGEGPVRKTSRASLRLLGSVGEPINPEAWEWYYHVVGDSRCPIVDTWWQTETGAIMITPLPGATLLKPGSATRPFFGVQPVLLDDKGKEIEGPGAGILAIKASWPSQIRSIYGDHQRLIDTYFKPCPGYYFTGDGARRDEDGYYWITGRVDDVINVSGHRIGTAEVESALVLHDSIAEAAVVGCPHDVKGQCVYAFVTLVTGSRPSDQLKRELIDQVSREIGGFAKPDFLQWAPRLPKTRSGKIMRRILRKIACNELDNLGDTSTLSDPSVLQELIDNRLSH

SEQ ID NO: 151402 - DNA, 1950 bp, Rhizobium sp. NGR234
  CDS (1)..(1950): transl_table=11
atggacgtcaagacctatccggtcctggaagcggccaagaaccgcacgcttgtcgacaacgcgacctatctgaaatggtatgaggaaagcgttgccgatccggagaagttctggggtgagcacggcaagcggatcgaatggttcgagccctataccacggtcaagaatacgtccttcgacggcaatgtttcgatcaagtggttcgaagacgggctgaccaacgtctcctacaattgcatcgatcgccatttgaagacccatggcgagaagaccgcaatcatctgggagggcgacaatccctacatcgacaagaggatcacctataacgagctctacgacaaggtttgccggcttgccaacgtgctcaagaagcatggcgtcgagaaaggcgaccgcgtcaccatctacatgccgatggtgccggaagcggcctatgcgatgctcgcctgcgcccgcatcggcgcgatccactcggtggttttcggtggcttctcgccggaggcgctcgccggccgcatcgtcgactgcgaatccaccttcgtgatcacctgcgacgagggcttgcgcggcggcaagccggtgccgctcaaggaaaacaccgaaaaggcgatcgacatcgctgcccggcagcatgtcatggtcaacaaggtgctggtcgtccgccgcaccggcggcaaggtgccgtgggcgccgggccgcgacgtctggtatcatcaggaaatcgccacggtcgagccgcattgcccgccggaaaagatgcgcgccgaggacccgctgttcattctctatacgtccggatcgaccggcaagccgaagggcgtgctgcacacgaccggcggctatctcgtctacgcctcgatgacacatcaatatgtcttcgactatcacgacggcgatatctactggtgcacggccgatgtcggctgggtcaccggccactcctatatcgtctacgggccgctcgccaacgccgcgacgacgctgatgttcgagggcgtgccgaatttcccggatgccggccgcttctgggaagtgatcgacaagcacaaggtcaatatcttctacaccgccccgaccgccatccgctcgctgatgggcgccggcgacgatttcgtcaatcgctcgtcgcgctcgtcgctgcgtctgctcggcactgtcggcgaaccgatcaatccggaagcctgggagtggtactaccatgtcgtcggcgcggagcgctcgccgatcgtcgacacgtggtggcagacggagaccggcggcatcctgatcacgccgctgccgggcgcgaccgatctcaagcctggttcggcgacgcggccgttcttcggcgtcaagccgcagatcgtcgacaatgaaggaaacgtgatcgacgggccggccgacggcaatctctgcatcaccgacagctggccggggcagatgcgcaccgtctatggcgaccacgagcgcttcatccagacctatttctccacctacaagggcaagtacttcaccggcgacggctgccgccgcgacgaggacggctactactggatcaccggccgcgtcgacgacgtgttgaatgtatcgggtcaccgcctcggcacggcggaagtcgaatcggcgctcgtttcgcaccatctcgtctcggaagcggcggtggtcggctacccgcacccgatcaagggccagggtatctattgctacgtgtcgctgatggccggcgaggtcggcagcgacgagctgcgccaggaactcgtcaagcatgtgcgttcggagatcgggccgatcgccacgccggacaagatccagttcgcgcccggcctgccgaagacccgctccggcaagatcatgcggcggattctgcgcaagatcgccgaggacgacttcggttcgctcggcgacacctcgacgctcgccgatccggcggtcgtcgacgacctgatcgccaatcgccagaaccgcgggtga

SEQ ID NO: 151403 - protein, 649 aa, Rhizobium sp. NGR234
MDVKTYPVLEAAKNRTLVDNATYLKWYEESVADPEKFWGEHGKRIEWFEPYTTVKNTSFDGNVSIKWFEDGLTNVSYNCIDRHLKTHGEKTAIIWEGDNPYIDKRITYNELYDKVCRLANVLKKHGVEKGDRVTIYMPMVPEAAYAMLACARIGAIHSVVFGGFSPEALAGRIVDCESTFVITCDEGLRGGKPVPLKENTEKAIDIAARQHVMVNKVLVVRRTGGKVPWAPGRDVWYHQEIATVEPHCPPEKMRAEDPLFILYTSGSTGKPKGVLHTTGGYLVYASMTHQYVFDYHDGDIYWCTADVGWVTGHSYIVYGPLANAATTLMFEGVPNFPDAGRFWEVIDKHKVNIFYTAPTAIRSLMGAGDDFVNRSSRSSLRLLGTVGEPINPEAWEWYYHVVGAERSPIVDTWWQTETGGILITPLPGATDLKPGSATRPFFGVKPQIVDNEGNVIDGPADGNLCITDSWPGQMRTVYGDHERFIQTYFSTYKGKYFTGDGCRRDEDGYYWITGRVDDVLNVSGHRLGTAEVESALVSHHLVSEAAVVGYPHPIKGQGIYCYVSLMAGEVGSDELRQELVKHVRSEIGPIATPDKIQFAPGLPKTRSGKIMRRILRKIAEDDFGSLGDTSTLADPAVVDDLIANRQNRG

SEQ ID NO: 151404 - DNA, 1950 bp, Methylobacterium extorquens AM1
  CDS (1)..(1950): transl_table=11
atgagcgagaaggtcatcgacgttcaagatgcctggcgggaccgggctctgatcgacgaagccaagtacaaggaaatgtacgaggcctccgtttctgatcctgagacgttctggggcgagcatggcaagcggatcgactggtcgacgccgttcagcaaagtcaagaatacgagctttgcgccgggtgacgtatcgatcaaatggttcgaggacggcaagaccaacgtcgcgctaaactgcattgaccgtcatctcgcgacccgcggcgaccagacggcgatcatctgggagggcgacgaccccaacgagtcgaagcacatcacctaccggcagttgcacgccgaagtgtgccggatggccaacgtcctgcgcaatcgcggcgtcggcaagggtgaccgcgtcacgctctaccttccgatgatccccgaggccgcctacgcgatgctggcctgcgcgcgtctgggcgccatccacgccatcgtcttcggcggcttctcgcccgactcgctggcgagccggatcaagggctgcggctcgaaactcgtcatcacggccgacgagggcctgcgcggcgggcgcaaggtgccgctcaaggccaacgtggacgaggcgatcaagcgcctcgacaaggatctcgtggaccacgtgatcgtggtgaagcgcacgggtggcaacgtggcgatggagcctggccgcgacgtctattaccacgaggccgccgaacaggtgaccgacgaatgcccggcggaggccgtcgaggccgagcacccgctcttcatcctctacacgtcgggctcgaccggccagccgaagggcgtggtgcacaccaccggcggctacctcgtctacgcttcgatgacccaccaatacgtcttcgattaccacgaaggcgacgtctactggtgcacggccgatgtgggctgggtcacggggcacagctacatcgtctacggtccgctcgcgaacggcgcgaccacgctgatgttcgagggcatccccacctatccgtcgaattcccgcttctgggaggtgatcgacaagcacaaggtcaacatcttctacaccgcgccgaccgcgatccgctcgctcatgggcggcggcgaggggccggtaaagaagacctcgcgccaatccctgcgggtgctgggttcggtcggtgagccgatcaatccggaagcctgggactggtactaccgcgtcgtcggcgattcccgctgcccgatcgtcgacacgtggtggcagaccgagaccggcggcatcctcatcaccccgctgccgggggcgacgcggctgaagcccggctcggccacgcttccgttcttcggcgtgcagccggtgatggtcgatgccgaggggaagattctcgacggcgcctgcgagggcaacctctgcatcaaggacagctggcccggccagatgcgtacggtctacggcgaccacgagcgcttcgagcagacctacttctcgacctacaaggatctctacttcaccggcgacggggcccggcgcgacgcggacggctattactggatcaccggccgcgtggacgatgtcatcaacgtctccggacaccgcatgggtacggcggaggtcgaatcctccctcgtcgcccatccgaaggtctcggaagcggcggtcgtcggctatccgcacaacgtgaagggccagggcatctacgcctacgtcaccctcaacgagggtgaggagggcacggatgaactgcgcaaggagctggtcacctgggtccgcaaggatatcggcccgatcgcctcgcccgatctgctccagttcgcgccggggctgccgaagacccgctccggcaagatcatgcgccgcatcctgcgcaagatcgccgaggacgatttcggctcgctcggcgatacctcgaccctggccgagccggccgtggtcgatgacctgatcgagaaccgccagaaccgctcggcctga

SEQ ID NO: 151405 - protein, 649 aa, Methylobacterium extorquens AM1
MSEKVIDVQDAWRDRALIDEAKYKEMYEASVSDPETFWGEHGKRIDWSTPFSKVKNTSFAPGDVSIKWFEDGKTNVALNCIDRHLATRGDQTAIIWEGDDPNESKHITYRQLHAEVCRMANVLRNRGVGKGDRVTLYLPMIPEAAYAMLACARLGAIHAIVFGGFSPDSLASRIKGCGSKLVITADEGLRGGRKVPLKANVDEAIKRLDKDLVDHVIVVKRTGGNVAMEPGRDVYYHEAAEQVTDECPAEAVEAEHPLFILYTSGSTGQPKGVVHTTGGYLVYASMTHQYVFDYHEGDVYWCTADVGWVTGHSYIVYGPLANGATTLMFEGIPTYPSNSRFWEVIDKHKVNIFYTAPTAIRSLMGGGEGPVKKTSRQSLRVLGSVGEPINPEAWDWYYRVVGDSRCPIVDTWWQTETGGILITPLPGATRLKPGSATLPFFGVQPVMVDAEGKILDGACEGNLCIKDSWPGQMRTVYGDHERFEQTYFSTYKDLYFTGDGARRDADGYYWITGRVDDVINVSGHRMGTAEVESSLVAHPKVSEAAVVGYPHNVKGQGIYAYVTLNEGEEGTDELRKELVTWVRKDIGPIASPDLLQFAPGLPKTRSGKIMRRILRKIAEDDFGSLGDTSTLAEPAVVDDLIENRQNRSA

SEQ ID NO: 151406 - DNA, 1944 bp, Bartonella grahamii as4aup
  CDS (1)..(1944): transl_table=11
atgactgaaaaaatttatccaatatcagaagaaatcaaaaaaaatgcgcttatcaatgaggagacctatcaacaatggtatcgagaaagcatcaatgatccagaaagcttctgggcaaaacatggacgatgcattgaatggtttaaaccttatacaaaagtaaaaaacacttcctttaatggagatgtatcaataaaatggtacgaagatggaataacaaatgttgcctataactgcattgatcgccacctgaaaacccatggagacaaaatcgcgcttatttgggaaggagataatccttattttgataaaaaaataacctataacgagctttacgaacatgtttgtcgttttgccaatcttttgaaaagtcgtggcattaagaaaggcgataaagtaaccatttatcttcccatgattcccgaagcagcctatgctatgctcgcctgcgcccgcattggtgctgttcattcggttatctttgctggcttttctgctgaggcaatagtaggacgccttgttgactgcgaatcaaccttcatcattacagctgatcaaggcttgcgtggcagcaaacgaatcaacttaaaagacaatgttgatcatgctattgagatagcagcgcgccaaaacgtgcatgtggaccaagtcatggttatacggcggacttgtggacccattcaatggataaaggggcgtgatttttggtaccacgaagagatagctcatgccaaaacagactgcccaccagaaccaatgaacgctgaagatccgctttttattctttatacttcaggctcaaccggcacacccaaaggtgttttgcataccacagcgggctatcttgtttatgccgcgatgacacatcaatatgtttttgattaccaccccaatgaagtttactggtgtacagctgatattggttggattaccggtcattcttacttggtttatggacctttatgcaatggtgcgactactttaatgtttgaaggcacaccaacctttcctgacaaaggaagattttgggaaattgtcgacaagcatcaagtcaatacactctataccgcaccaacagctatccgcgctttaatgggagcaggaaattcgtttgttgaacactcaaacaggacatcgttgcgtcttttaggcacggtaggagaacctattaacccagaagcatgggaatggttttatcatacagttggaaatgaccgttgtccgattctcgatacatggtggcaaacggaaacaggagggcatatgatcacgcccttgcctggtgcaacccccctcaaagcaggatcagccacacgtcctttttttggtgttcaaccccaaattgttgatgctcaaggcaatattttagaaggtgaagcagaaggcaatctttgtattatcgactcatggccaggacaaatgcgtacgctttataaagatcatgagcgctttattcaaacttatttttcctcctataaaggaagatattttacaggcgatggttgtaggcgtgatagtgacggctattactggattacagggcgggttgatgacattctcaatgtctcggggcacaggttaggaactgctgaaattgaatcagcccttgtttctcatcccgctgtatcagaagcagccattgtgggttacccgcatcccattaaaggacaaggaatttatagttttatcaccttaatggaagggacagctccaaatgaagagttgcaaaaagagcttattaaacatgtaagacaagaaataggctccattgccatattggataaaattcaatttgccccacagcttcccaaaacgcgatcaggaaaaattatgagacgtattttacgaaaaatcgccgaaaacgattttgatactctcggagatatctcaactcttgccgaaccacaagttgttgaagatctgattgctaaccgacaaaattaa

SEQ ID NO: 151407 - protein, 647 aa, Bartonella grahamii as4aup
MTEKIYPISEEIKKNALINEETYQQWYRESINDPESFWAKHGRCIEWFKPYTKVKNTSFNGDVSIKWYEDGITNVAYNCIDRHLKTHGDKIALIWEGDNPYFDKKITYNELYEHVCRFANLLKSRGIKKGDKVTIYLPMIPEAAYAMLACARIGAVHSVIFAGFSAEAIVGRLVDCESTFIITADQGLRGSKRINLKDNVDHAIEIAARQNVHVDQVMVIRRTCGPIQWIKGRDFWYHEEIAHAKTDCPPEPMNAEDPLFILYTSGSTGTPKGVLHTTAGYLVYAAMTHQYVFDYHPNEVYWCTADIGWITGHSYLVYGPLCNGATTLMFEGTPTFPDKGRFWEIVDKHQVNTLYTAPTAIRALMGAGNSFVEHSNRTSLRLLGTVGEPINPEAWEWFYHTVGNDRCPILDTWWQTETGGHMITPLPGATPLKAGSATRPFFGVQPQIVDAQGNILEGEAEGNLCIIDSWPGQMRTLYKDHERFIQTYFSSYKGRYFTGDGCRRDSDGYYWITGRVDDILNVSGHRLGTAEIESALVSHPAVSEAAIVGYPHPIKGQGIYSFITLMEGTAPNEELQKELIKHVRQEIGSIAILDKIQFAPQLPKTRSGKIMRRILRKIAENDFDTLGDISTLAEPQVVEDLIANRQN

SEQ ID NO: 151408 - DNA, 1956 bp, Rhizobium leguminosarum bv. trifolii WSM1325
  CDS (1)..(1956): transl_table=11
atgtcggagaagatctatccggtcacgaagccggtgaaggcgcgcgccctgatcgataaggaaaagtacctgaaatggtacgaggaaagcgtcgagaacccggacaagttctggggcaagcacggcaagcggatcgactggttcaagccctataccaaggtcaagaacacatcctttaccggcaaggtttcgatcaagtggttcgaggacggtcagacaaacgtctcctacaactgcatcgaccgtcatctgaaaacgaatggcgaccaagtggcgatcatttgggaaggcgacaacccctatatcgacaagaaggtcacctataacgaactctacgagcacgtctgccggatggcgaatgtgttgaagaagcacggcgtcaagaagggcgatcgcgtcaccatctatatgccgatgatcccggaagcggcttatgcgatgctcgcctgcgcccgcatcggcgcggtgcattcggtcgtcttcggcggtttctcgcccgaggcgctggccgggcgcatcgtcgactgcgaatccaccttcgtcatcacctgcgacgaaggcctgcgcggtggcaagccggtgccgttgaagaacaataccgataccgcaattgacattgcggcacgccagcacgtgatcgtggagaaggttctggtcgttcgccgcaccggtggcaagaccggctgggcgccgggtcgcgatctctggcatcaccaggagatcgccaccgtgaaggcggaatgcccgccggtgaagatgaaggcggaagatccgctcttcattctttatacgtccggctcgaccggcaagccaaagggcgtgctgcacacgacggggggttatctcgtctatgcagcgatgacgcatgagtatgtcttcgattatcaccacggcgacgtttactggtgtacagccgatgtcggctgggtgaccggccattcctatatcctctatgggccgcttgcgaactgcgcaacgacgctgatgttcgagggcgtgccgaacttcccggatcagggtcgtttctgggaagtcatcgacaagcacaaggtcaacatcttctatacggcgccgacggcgatccgctcgttgatgggtgccggcgacgacttcgtcacgcgctcctcgcgttcttcgctgcgcctgctcggcacggtcggcgagccgatcaatcccgaggcctgggagtggtattacaatgtcgtcggcgacaagcgatgccctgtcatcgatacgtggtggcagacggaaaccggcggtcacatgatcacgccgctgcccggcgccaccgacctgaagcccggctcggcgacgacgccgttcttcggcgtcaagccgcagctggtcgacaatgagggcaaggtgctggaaggtccggccgacggtaatctttgcatcaccgacagctggccgggccagatgcgcacggtctatggcgatcacgagcgcttcatccagacctatttttctacctacaagggcaagtatttcaccggcgatggctgccggcgcgatgcggacggttattactggatcaccggccgggtcgacgacgtgctgaacgtctccggccaccggctcggtacagcggaggtggaatccgctctcgtctcgcataatctggtttcggaagccgcggtcgtcggttatccgcatccgatcaagggccagggcatctattgctacgtgacgctgatggccggtcatgagggatcggatacgcttcgccaggaactggtaaaacatgtgcggggtgaaatcggcccgattgctgcgcctgacaagatccagtttgcgcccggcctgccgaagacacgctccggcaagatcatgcgccgcatcctgcgcaagattgccgaagacgatttcggcgctctcggcgacacttcgacgcttgccgatccggccgtggtcgacgatctgatcgccaaccggcaaaacaaggcaaccacctga

SEQ ID NO: 151409 - protein, 651 aa, Rhizobium leguminosarum bv. trifolii WSM1325
MSEKIYPVTKPVKARALIDKEKYLKWYEESVENPDKFWGKHGKRIDWFKPYTKVKNTSFTGKVSIKWFEDGQTNVSYNCIDRHLKTNGDQVAIIWEGDNPYIDKKVTYNELYEHVCRMANVLKKHGVKKGDRVTIYMPMIPEAAYAMLACARIGAVHSVVFGGFSPEALAGRIVDCESTFVITCDEGLRGGKPVPLKNNTDTAIDIAARQHVIVEKVLVVRRTGGKTGWAPGRDLWHHQEIATVKAECPPVKMKAEDPLFILYTSGSTGKPKGVLHTTGGYLVYAAMTHEYVFDYHHGDVYWCTADVGWVTGHSYILYGPLANCATTLMFEGVPNFPDQGRFWEVIDKHKVNIFYTAPTAIRSLMGAGDDFVTRSSRSSLRLLGTVGEPINPEAWEWYYNVVGDKRCPVIDTWWQTETGGHMITPLPGATDLKPGSATTPFFGVKPQLVDNEGKVLEGPADGNLCITDSWPGQMRTVYGDHERFIQTYFSTYKGKYFTGDGCRRDADGYYWITGRVDDVLNVSGHRLGTAEVESALVSHNLVSEAAVVGYPHPIKGQGIYCYVTLMAGHEGSDTLRQELVKHVRGEIGPIAAPDKIQFAPGLPKTRSGKIMRRILRKIAEDDFGALGDTSTLADPAVVDDLIANRQNKATT

SEQ ID NO: 151410 - DNA, 1962 bp, Dickeya dadantii Ech703
  CDS (1)..(1962): transl_table=11
atgagccaaaataacaaacacccgatccccaccaacatcgctgaaaacgccttaatcaccgccgaacaatacaaatctatgtatcaggcatccgtacaggatcctgaatcattttggcgagaacaaggcaagatcatcgattggattacaccgtacacccaagtcaaaaatacctcttttgatccaggacatatccgtatccgctggttcgaggacggtacattgaacatcgcggccaactgcctcgaccgccatttggatagcctgggcgatcaaactgcgatcatctgggaaggcgataatgccaaagagagtaaaacactcacctaccgggaactgcatcagtcagtatgccgctttgctaacgttctaaaatcacaaggtataactaaaggcgacgtcgtggccatctacatgccgatggtgcctgaagctgcggtagccatgctggcctgcgcccgtatcggcgcggttcattccgttatcttcggcgggttttcgccggaatcgattgccggccgaatcgtcgactccagcgccaaactggtcgtcactgcagatgaagggatacgtgcaggtcgggtcatcccattgaagaaaaacatcgatgaggcactggccaaccccgccgttaccactgtaaccagcgtgatcgtattccagcgtaccggtggtactcccggtaattggcatgatgggcgcgacttatggtggcacgatctgatagcgcaagccgacgatcactgcccgccagaagctatggatgcagaagatccactgtttatcctctatacctcgggttctaccggcaagcccaaaggggttctgcataccagtggtggttatctggtctatgcgtctacgaccttcaaatatgtcttcgactaccatcctggcgatatctactggtgtactgccgatgttggttggatcaccggacacagctatcttgtttacggtccgcttgcttgcggcgcgacgacattgatgttcgagggcgttcccaactggcccgatgccagccgcatggcccaggtcgtcgacaaacatcaggtcaatattctgtacaccgcgccaaccgcaatccgtgccttgatggcggacggtgataaagccattttgggcacgtcacgtcattcgctgaggatcatgggatcggtaggcgaacctatcaacccggaagcctgggagtggtacttccagaaaatcggcaacagccactgtccgattgtagatacctggtggcaaaccgagaccgggggattcatgatcaccccgctccctggcgccatcgaaaccaaagcgggatccgccaccttacccttcttcggcatacaacctgctctggtagataacatgggcaacccgcaagaaggcgcctgcgaaggtaatctggtcatcaccgattcctggccaggccaggcgcgtacattgtttggcgatcacgatcgattcgaacaaacttacttttctaccttcaaaggcatgtatttcagcggtgacggcgcacgtcgggatgaagacggctactactggatcacaggccgtgtcgacgatgtgcttaatgtgtccggccaccgtctgggaaccgcggagatcgaatccgcactggtctcccatcccaagatcgctgaagcggcagtcgtcggcattccgcacagcatcaaaggtcaggcgatttacgcttatgtcacgctcaatcatggcgaggaacccaccagcgagctttataccgaagttcgcaactgggttcgcaaagagattggcgccattgccacgccggatattttgcactggaccgatgccctgcccaaaacgcgatccggcaagatcatgcgacggatccttcgcaagatcgctgctggcgacaccagcaatcttggtgatatttccacgcttgccgatccgggcgtcgtggagaaattgttggaagaaaaacaagcgatggatacgccgtcttaa

SEQ ID NO: 151411 - protein, 653 aa, Dickeya dadantii Ech703
MSQNNKHPIPTNIAENALITAEQYKSMYQASVQDPESFWREQGKIIDWITPYTQVKNTSFDPGHIRIRWFEDGTLNIAANCLDRHLDSLGDQTAIIWEGDNAKESKTLTYRELHQSVCRFANVLKSQGITKGDVVAIYMPMVPEAAVAMLACARIGAVHSVIFGGFSPESIAGRIVDSSAKLVVTADEGIRAGRVIPLKKNIDEALANPAVTTVTSVIVFQRTGGTPGNWHDGRDLWWHDLIAQADDHCPPEAMDAEDPLFILYTSGSTGKPKGVLHTSGGYLVYASTTFKYVFDYHPGDIYWCTADVGWITGHSYLVYGPLACGATTLMFEGVPNWPDASRMAQVVDKHQVNILYTAPTAIRALMADGDKAILGTSRHSLRIMGSVGEPINPEAWEWYFQKIGNSHCPIVDTWWQTETGGFMITPLPGAIETKAGSATLPFFGIQPALVDNMGNPQEGACEGNLVITDSWPGQARTLFGDHDRFEQTYFSTFKGMYFSGDGARRDEDGYYWITGRVDDVLNVSGHRLGTAEIESALVSHPKIAEAAVVGIPHSIKGQAIYAYVTLNHGEEPTSELYTEVRNWVRKEIGAIATPDILHWTDALPKTRSGKIMRRILRKIAAGDTSNLGDISTLADPGVVEKLLEEKQAMDTPS

SEQ ID NO: 151412 - DNA, 1962 bp, Dickeya zeae Ech1591
  CDS (1)..(1962): transl_table=11
atgagccaatataataaacaccctatacctaccgcgattgcggaaaacgccttaatcaccgccgaacagtataaaaagatgtatcaggcatcggtgcaagatcctgattccttctggcgggaacaaggcaagataatcgattggatcaaaccctatcaacaggtcaaaaacacctcttttgacccaggccatgttcgcattcgctggttcgaagacggcacgctcaatgtcgcggcaaactgtctcgatcgtcatcttgctacgcaaggcgatcaaaccgcgatcatttgggaaggcgacgacgccaaagaaagcaaaaaagtcacctatcgtgaactgcatcaggcggtctgccgttttgccaatgtactgaaatcaaaagggatcagtaagggcgatgtggtcgctatttatatgccgatggtgccggaagcggccgtggcgatgctggcctgtgcccgcatcggtgccgtgcattcagtgatcttcggcggattttctccggaatcgatcgccgggcgaatcgtcgattccagcgccaagctggtgatcaccgccgatgaaggcgttcgcgccgggcggacgatcccactgaaaaagaatatcgacgaagccctgcgcaacccggccgtcaccagcgtcaaccatgtgatcgttttccaacgcaccggtaaacccggaaactggcaagacggcagagatctgtggtggcacgagctggtcgcacaggcggatgatcattgcccgcctgaagaaatgaatgcagaggatccgctgtttatcctctatacatccggctcaaccggtaaacctaaaggggtgctgcataccaccggcggttatctggtatacgccgcgacgacgtttaaatatgtgtttgattatcaccccggcgacatttattggtgtaccgccgacgtcggttgggttaccggccacagctacctgttgtacggcccgctggcctgcggcgccatcacgctgatgttcgaaggcgtacctaactggccaaccgccagccggatgggacaagtggtggacaaacatcaggtcaatatcctgtacaccgcaccaacggccatccgcgcgctgatggcggacggcgacaaagctatcgagggcacctcacgccagtcgctcaaaatcatgggctcggtgggggaacccatcaacccggaagcctgggaatggtacttcaaaaaaatcggcaacagccgttgcccgattgtcgatacctggtggcaaacggaaacaggtggcttcatgatcactccgttgcccggcgccattgaacctaaacccggttcagcgacgttaccgttcttcggggtgcagcccgccttggtagacaacatcggtaacccacaagacggtgcctgcgaaggcaacctggtgattaccgattcctggcccggtcaggctcgcacgctgtttggtgaccatgaacgttttgaacagacctacttctctacgttcaagggcatgtatttcagcggcgacggcgcacgccgtgatgaagacggctattactggatcaccggccgcgtggacgacgtgctgaacgtatccgggcaccggctgggaacggcggaaatcgaatccgcactggtttcacacccgaaaatcgccgaagcagcggtagtcggcattccgcacagcctcaaagggcaggcgatctatgcttacatcacgctgaatcatggcgaagagccgaccagtgaactgtataccgaagtgcgcaactgggtacgaaaagagataggccctatcgcgacgccggatatcctgcactggaccgacgctctaccgaaaacccgatccggcaaaatcatgcggcgtattctgcgcaagattgcagccggggataccagcaatctgggggatatctcaaccctcgccgatcctggcgtggtagagaaattgctggaagaaaaacaagccatggacaacacaccgtcttaa

SEQ ID NO: 151413 - protein, 653 aa, Dickeya zeae Ech1591
MSQYNKHPIPTAIAENALITAEQYKKMYQASVQDPDSFWREQGKIIDWIKPYQQVKNTSFDPGHVRIRWFEDGTLNVAANCLDRHLATQGDQTAIIWEGDDAKESKKVTYRELHQAVCRFANVLKSKGISKGDVVAIYMPMVPEAAVAMLACARIGAVHSVIFGGFSPESIAGRIVDSSAKLVITADEGVRAGRTIPLKKNIDEALRNPAVTSVNHVIVFQRTGKPGNWQDGRDLWWHELVAQADDHCPPEEMNAEDPLFILYTSGSTGKPKGVLHTTGGYLVYAATTFKYVFDYHPGDIYWCTADVGWVTGHSYLLYGPLACGAITLMFEGVPNWPTASRMGQVVDKHQVNILYTAPTAIRALMADGDKAIEGTSRQSLKIMGSVGEPINPEAWEWYFKKIGNSRCPIVDTWWQTETGGFMITPLPGAIEPKPGSATLPFFGVQPALVDNIGNPQDGACEGNLVITDSWPGQARTLFGDHERFEQTYFSTFKGMYFSGDGARRDEDGYYWITGRVDDVLNVSGHRLGTAEIESALVSHPKIAEAAVVGIPHSLKGQAIYAYITLNHGEEPTSELYTEVRNWVRKEIGPIATPDILHWTDALPKTRSGKIMRRILRKIAAGDTSNLGDISTLADPGVVEKLLEEKQAMDNTPS

SEQ ID NO: 151414 - DNA, 1956 bp, Photorhabdus asymbiotica
  CDS (1)..(1956): transl_table=11
atgacccaaataatgaaatatcccattcctgcaatcattgcagaacacaccttgatgaataaacaacaatatcaacagaattaccaattatcgctgcaagatcccgaaaaattttggggtgataaaggtaaaattgttgactggattaaaccttacactaaagtaaagaatacctcttttgaccccggacatatcaatatccgctggttcgaagatggaacgctaaatctcagtgcaaattgtcttgatcgtcatttaaaagagcgtggtgatcaaaccgctattatttgggaaggtgatgatccaacagaatccaaaactgtaacctatcgagaactgcatcatgacgtatgccagtttgctaatgtactgaaaaatctcggtattaaaaaaggtgatgtggttgctatttatatgccgatggtaccagaagctgcggttgctatgttggcatgtgcccgcattggtgctatccactctgttattttcgcaggtttttctcctgatgcagtatctggacgtattattgattcaaataccaaattggtcatcaccgctgatgaaggcttgagagcaggacgtaccattcccctgaaaaagaatgtcgatgatgcattaagtaacacagccgttgtcagtgtttccaatgtgattgttttcaaacgcactggaaatattaataactggcactctggccgtgacctttggtggcatgaattaacagcaggcgttagtgctgactgtcccgttgaagaaatgaatgcagaagacccgctgtttattctctatacctccggctctaccggtaaacctaaaggcgtactgcacactaccgggggataccttgtatatgcatccctgacctttaaatatgtattcgattatcatccgggcgaaatctactggtgtacagctgacgtgggttgggttaccgggcatagttatcttctctacggaccactttcctgtggcgctattactctgatgtttgaaggtgtaccaaactatcctgctgctaatcgtttaagccaggttattgacaaacatcaggttaatatcctgtacacagcaccaacagcgattcgtgctctgatggctgaaggggacaaagccatcgaaggaacaaaacggacttccctacgtatcatgggatcagttggtgaacctattaacccggaagcatgggaatggtattaccagaagattggtaataagcaatgtccgattgttgatacctggtggcagacagaaaccggtggtttcatgataacgccgctacctggggcaaccgagctaaaagcaggttccgcaactttacctttcttcggtgttcaaccagcattggttgataatcttggcgagctattagaaggtgcttgtgaaggaaatctggttattactgactcctggccaggacaagcgcgctcattgtttggcgatcatgatcgcttcgaacaaacctatttctccgcctttaaagggatgtactttagtggtgacggagcacgtcgtgatgaagacggctattattggataactggccgtgttgacgatgtgttaaatatctctggtcatcgtttaggtaccgctgaaattgaatctgctttggtttcccatcccaaaattgcagaagccgctgttgtaggtgttccacataacatcaagggacaagcaatttatgcctatgtcacgttaattcacggcgaggaaccatctccccagttatataccgaagtccgtaattgggtacgtaaagaaatcggcccgatcgctacaccagatatcctgcactggacagactccttaccaaaaacccgctcaggaaaaattatgcgccgtatcctgcgtaaaattgcttccggcgatattagtaatttaggagatacctccacattggcagatccaggagtagtagaaaaactattggaagaaaaacaaacaatgaatatctcgtga

SEQ ID NO: 151415 - protein, 651 aa, Photorhabdus asymbiotica
MTQIMKYPIPAIIAEHTLMNKQQYQQNYQLSLQDPEKFWGDKGKIVDWIKPYTKVKNTSFDPGHINIRWFEDGTLNLSANCLDRHLKERGDQTAIIWEGDDPTESKTVTYRELHHDVCQFANVLKNLGIKKGDVVAIYMPMVPEAAVAMLACARIGAIHSVIFAGFSPDAVSGRIIDSNTKLVITADEGLRAGRTIPLKKNVDDALSNTAVVSVSNVIVFKRTGNINNWHSGRDLWWHELTAGVSADCPVEEMNAEDPLFILYTSGSTGKPKGVLHTTGGYLVYASLTFKYVFDYHPGEIYWCTADVGWVTGHSYLLYGPLSCGAITLMFEGVPNYPAANRLSQVIDKHQVNILYTAPTAIRALMAEGDKAIEGTKRTSLRIMGSVGEPINPEAWEWYYQKIGNKQCPIVDTWWQTETGGFMITPLPGATELKAGSATLPFFGVQPALVDNLGELLEGACEGNLVITDSWPGQARSLFGDHDRFEQTYFSAFKGMYFSGDGARRDEDGYYWITGRVDDVLNISGHRLGTAEIESALVSHPKIAEAAVVGVPHNIKGQAIYAYVTLIHGEEPSPQLYTEVRNWVRKEIGPIATPDILHWTDSLPKTRSGKIMRRILRKIASGDISNLGDTSTLADPGVVEKLLEEKQTMNIS

SEQ ID NO: 151416 - DNA, 1947 bp, Hirschia baltica ATCC 49814
  CDS (1)..(1947): transl_table=11
atgtcaaaccaagataaaatatttcctgtacctgatgactttgctaagaatgcattgattgatgatacgctatatcaaaaaatgtatcaggcttccatcgatgatcctgatgctttttggggtgaacatggcaagcgcctatcatggtccaaacaatacacaaaagtcaaagatgtatcttggagcaaagaaaaccttcatgtgaattggttttctgatggtgaattgaacgtatcttataactgtattgaccgtcatctcaaagataaagccgaccaaatcgctattatttgggaaggagatgacccgaataaatccgaaaatatcacttttgcacaattgcatcggcgcgtatgccggtttgcaaatgttctaaaaagtatgggcgttcagaagggtgatcgagtaactatttaccttcctatgattcccgaagctgcatacgccatgctagcttgtgctcgaattggtgccatacattcaatcgtttttgcgggtttttctgctgaagcgcttgctggaagaattaacgactgtcgaagttctgttatcatcactgccgatgaagggcttcgaggctcgaagtctgttccgctaaagaagaatgtagatgaagctgtaaagcatgcactcggggtagacaaaatactcgtcgttgagaacacaggtaatccggtctctatgaaaggaggacgtgatatttggtggcatgaagcagcaactggtgttgatgaattctgtgaacctgtagcgatgaaagctgaagacccattatttattctttatacttcaggttctactggccaaccaaaaggagttttgcacacaacaggagggtatcttgtttgggcttcaatgactcatgaatacgtttttgactacaaacccggagacatttactggtgtacggcagacgttggttgggtaactggccatagttatatcgtttacggtcctcttgctaatgcagcaacaactctcatgttcgaaggtgtgccgacttatccagatgcttcacggttctggaacgttgttgataaacacaaagtcaatattttctataccgcaccaacggctatacgagcgttgatggggcaaggcgaagatttcgttaaaaagacatcccgcaaatccttgcgcctcttgggctcagtaggggaaccgattaatcctgaagcttgggagtggtattacaaagtagtcggtgacagccgttgtccgattgttgacacgtggtggcaaacagaaacgggcggaattatgatttctccattgccaggtgcaactccactaaaaccaggatctgccactcgcccattttttggaattaaacctgaactcgttgattccgagggtgttgttctggagggtgcaacggaaggaaatcttgtgatttccgattcttggccgggacagatgagaacagtttacggcgatcatcaaaggtttaaagatacatacttttcggcatacccggggaaatatttcactggtgacggatgtcgaagagatgaggatggctattactggattacaggccgcgttgatgatgtaatcaacgtttcaggtcaccgtatgggaacggcggaagtggagagtgcacttgttgcacacgacttagtgtcagaagcagccgttgtaggttaccctcatgatgttaaaggccaaggaatatacgcttatgtcacgttgagcgcaggaaacgatggcacgccggaattagcaaaagatttagtcaattgggtcagagcggagatcggtccaattgcttctccagataaaatccaatttgctccaggacttccaaagacgagatcgggaaaaatcatgaggcgtattcttcgtaaaattgcagaagatgaattctcaaacttaggagacacctctactttggccgaccctgaggttgtggatgatctaattgagaacagacagaacaagaaataa

SEQ ID NO: 151417 - protein, 648 aa, Hirschia baltica ATCC 49814
MSNQDKIFPVPDDFAKNALIDDTLYQKMYQASIDDPDAFWGEHGKRLSWSKQYTKVKDVSWSKENLHVNWFSDGELNVSYNCIDRHLKDKADQIAIIWEGDDPNKSENITFAQLHRRVCRFANVLKSMGVQKGDRVTIYLPMIPEAAYAMLACARIGAIHSIVFAGFSAEALAGRINDCRSSVIITADEGLRGSKSVPLKKNVDEAVKHALGVDKILVVENTGNPVSMKGGRDIWWHEAATGVDEFCEPVAMKAEDPLFILYTSGSTGQPKGVLHTTGGYLVWASMTHEYVFDYKPGDIYWCTADVGWVTGHSYIVYGPLANAATTLMFEGVPTYPDASRFWNVVDKHKVNIFYTAPTAIRALMGQGEDFVKKTSRKSLRLLGSVGEPINPEAWEWYYKVVGDSRCPIVDTWWQTETGGIMISPLPGATPLKPGSATRPFFGIKPELVDSEGVVLEGATEGNLVISDSWPGQMRTVYGDHQRFKDTYFSAYPGKYFTGDGCRRDEDGYYWITGRVDDVINVSGHRMGTAEVESALVAHDLVSEAAVVGYPHDVKGQGIYAYVTLSAGNDGTPELAKDLVNWVRAEIGPIASPDKIQFAPGLPKTRSGKIMRRILRKIAEDEFSNLGDTSTLADPEVVDDLIENRQNKK

SEQ ID NO: 151418 - DNA, 1950 bp, Methylobacterium extorquens DM4
  CDS (1)..(1950): transl_table=11
atgagcgagaaggtcatcgacgttcaagatgcctggcgggaccgggctctgatcgacgaagccaagtacaaggaaatgtacgaggcctccgtttctgatcctgagacgttctggggcgagcatggcaggcggatcgattggtcgacgccgttcagcaaagtcaagaatacgagctttgcgccgggtgacgtatcgatcaaatggttcgaggacggcaagaccaacgtcgcgctaaactgcattgaccgtcacgtcgcgacccgcggcgaccagaccgcgatcatctgggagggcgacgatcccaacgagtcgaagcacatcacctaccggcagttgcacgccgaagtgtgccggatggccaacgttctgcgcaatcgcggcgtcggcaagggtgaccgcgtcacgctttaccttccgatggtccccgaggctgcctacgcgatgttggcctgcgcgcgtctcggcgccatccacgccatcgtcttcgggggcttctcgcccgactcgctggcgagccggatcaagggctgcggctcgaaactcgtcatcacggccgacgagggcctgcgcggcggtcgcaaggtgccactcaaggccaacgtggacgaggcgatcaagcgcctcgacaaggatctcgtagaccacgtgatcgtggtgaagcgcacgggcggcaacgtggcgatggagccgggccgcgacgtctattaccacgaggccgccgaacaggtgaccgacgaatgcccggcggaggccgtcgaggccgagcacccgctcttcatcctctacacgtcgggctcgaccggccagccgaagggcgtggtgcacaccaccggcggctacctcgtctacgcgtcgatgacccaccaatacgtcttcgactaccacgatggcgacgtctactggtgcacggccgatgtgggctgggtcaccgggcacagctacatcgtctacggtccgctcgcgaacggcgcgaccacgctgatgttcgagggcatccccacctatccgtcgaattcccgcttctgggaggtgatcgacaagcacaaggtcaacatcttctacaccgcgccgaccgcgatccgctcgctcatgggcggcggcgaggggccggtgaagaagacctcgcgccaatccctgcgggtgctgggttcggtcggcgaaccgatcaacccggaggcctgggactggtactaccgcgtcgtcggcgattcccgctgcccgatcgtcgacacgtggtggcagaccgagaccggcggcatcctcatcaccccgctgccgggggcgacgcggctgaagcccggctcggccacgcttccgttcttcggcgtgcagccggtgatggtcgatgccgaggggaagatcctcgacggtgcctgcgagggcaacctctgcatcaaggacagctggcccggccagatgcgcaccgtctacggcgaccacgagcgcttcgagcagacctacttctcgacctacaaggatctctacttcaccggcgacggggcccggcgcgacgcggacggctattactggatcaccggccgcgtggacgacgttatcaacgtctccggacaccgcatgggtacggcggaggtcgaatcctccctcgtcgcccatccgaaggtctcggaagcggcggtcgtcggctatccgcacaacgtgaagggccagggcatctacgcctacgtcaccctcaacgagggtgaggagggcacggacgaactgcgcaaggagctggtcacctgggtccgcaaggatatcggcccgatcgcctcgcccgatctgctccagttcgcgccggggctgcccaagacccgctccggcaagatcatgcgccgcatcctgcgcaagatcgccgaggacgatttcggctcgctcggtgacacctcgaccctggccgagccggccgtggtcgatgacctgatcgagaaccgccagaaccgctcggcctga

SEQ ID NO: 151419 - protein, 649 aa, Methylobacterium extorquens DM4
MSEKVIDVQDAWRDRALIDEAKYKEMYEASVSDPETFWGEHGRRIDWSTPFSKVKNTSFAPGDVSIKWFEDGKTNVALNCIDRHVATRGDQTAIIWEGDDPNESKHITYRQLHAEVCRMANVLRNRGVGKGDRVTLYLPMVPEAAYAMLACARLGAIHAIVFGGFSPDSLASRIKGCGSKLVITADEGLRGGRKVPLKANVDEAIKRLDKDLVDHVIVVKRTGGNVAMEPGRDVYYHEAAEQVTDECPAEAVEAEHPLFILYTSGSTGQPKGVVHTTGGYLVYASMTHQYVFDYHDGDVYWCTADVGWVTGHSYIVYGPLANGATTLMFEGIPTYPSNSRFWEVIDKHKVNIFYTAPTAIRSLMGGGEGPVKKTSRQSLRVLGSVGEPINPEAWDWYYRVVGDSRCPIVDTWWQTETGGILITPLPGATRLKPGSATLPFFGVQPVMVDAEGKILDGACEGNLCIKDSWPGQMRTVYGDHERFEQTYFSTYKDLYFTGDGARRDADGYYWITGRVDDVINVSGHRMGTAEVESSLVAHPKVSEAAVVGYPHNVKGQGIYAYVTLNEGEEGTDELRKELVTWVRKDIGPIASPDLLQFAPGLPKTRSGKIMRRILRKIAEDDFGSLGDTSTLAEPAVVDDLIENRQNRSA

SEQ ID NO: 151420 - DNA, 1941 bp, Teredinibacter turnerae T7901
  CDS (1)..(1941): transl_table=11
atggcagacaccaacctttaccccgtttcagaagccatcgctgcttctgcgcacattaccaaagacgaatacgaaaccctttatcaggaatccattagcagcccggaaaccttttgggccgcgaaagcggaggagtttctgacgtgggataaaaaatgggacaaggtgcgggaatttgatttcgtaaaaggtgaggcccgctggtttgacggcggtaagctgaatgtgtcagcaaactgtatcgaccgtcatctggccgagcgcggcgaccaggtcgcgataatctgggagggtgatgaccccagcgacgacctgaaagtgacctataaagaagtacacgaacaggtgtgtaagctggccaatgtgctgaaaacacgcggcgtgaaaaagggtgatcgcgtatgcatttacatgccgatgatccctgaagccgcctatgcgatgttggcgtgcgcacgcgttggcgcgattcattccattgtatttggcgggttctcgccagaagcgctcaaagaccgtattcaggattccgactgtcaggtggttattacggcggacgaaggcgtgcgcggtggccgtaaaattccactgaaagccaatgccgatacggccgtggcacagtgccccggggtgagtacggtgctggtggtaaaacgcaccggtggcgatgtcgcctgggatgaaagccatgatgtgtggtaccacgatgccatggctgaagcgtcggcagactgtgcgccagagccgatggatgcagaagaccctttgtttattctttacacttccggctcaacgggaaagccaaaaggcgtgctgcacaccaccggtggctacctgttacaggcagcgatgacgcacaagtatgtattcgactatcaggatggtgaagtctactggtgtaccgcagacgtgggctgggtgactggccactcgtatatcgtgtacggccctatggccaacggggcaatcaccttgatgtttgaaggggtaccgacctacccaacggccgcgcgctgctgggaagtagtggataagcacgacgtatccatcttctacactgcaccgacggcaattcgtgcactgatggggcagggcgatgagtttgttactcaaacctctcgcaaaacactcagaatattgggcactgtgggtgagccgatcaacccggaagcctgggattggtactacaaggttgtcggcgacagtcgctgcccgattatggatacctggtggcagacggaaaccggcgcacatatgctgacgccgctgcccggcgcgattgcgcttaagccgggttccgcaacattgccgttcttcggtgtagagccagtgttgcttgatggtgacggcaaagaggttgttggtgcaggcgagggtagcctggcgattaaatcttcgtggccgagccagattcgtacggtattcggtgaccacaaccgcctggtgcaaacctacttttccacttaccccggatattattttaccggtgacggcgcccgtcgcgacgaagatggttacttctggattaccggccgtgtcgacgacgttatcaatgtttccgggcaccgcatgggtactgctgaagtcgagagcgccttggttctacacgaaaaggtctctgaagcggccgtggtgggctatccgcacgatattaaagggcagggcatctacgcttacatcactttgatggtgggcgaagagcccagcgatgagctgaaaaaggaattagtggccctgtgtgtaaaagaaatcgggccgatcgccaaaccggatgtcatccagtgggcgcctggtctgccgaaaacccgctctggcaaaattatgcgccgcattcttcgcaagatcgccgccaacgaagtggacgcgctgggtgatacctcaaccctggccgatccgacagttgtcgacgatctgatcgacaaccgcgaaaacaaaggctag

SEQ ID NO: 151421 - protein, 646 aa, Teredinibacter turnerae T7901
MADTNLYPVSEAIAASAHITKDEYETLYQESISSPETFWAAKAEEFLTWDKKWDKVREFDFVKGEARWFDGGKLNVSANCIDRHLAERGDQVAIIWEGDDPSDDLKVTYKEVHEQVCKLANVLKTRGVKKGDRVCIYMPMIPEAAYAMLACARVGAIHSIVFGGFSPEALKDRIQDSDCQVVITADEGVRGGRKIPLKANADTAVAQCPGVSTVLVVKRTGGDVAWDESHDVWYHDAMAEASADCAPEPMDAEDPLFILYTSGSTGKPKGVLHTTGGYLLQAAMTHKYVFDYQDGEVYWCTADVGWVTGHSYIVYGPMANGAITLMFEGVPTYPTAARCWEVVDKHDVSIFYTAPTAIRALMGQGDEFVTQTSRKTLRILGTVGEPINPEAWDWYYKVVGDSRCPIMDTWWQTETGAHMLTPLPGAIALKPGSATLPFFGVEPVLLDGDGKEVVGAGEGSLAIKSSWPSQIRTVFGDHNRLVQTYFSTYPGYYFTGDGARRDEDGYFWITGRVDDVINVSGHRMGTAEVESALVLHEKVSEAAVVGYPHDIKGQGIYAYITLMVGEEPSDELKKELVALCVKEIGPIAKPDVIQWAPGLPKTRSGKIMRRILRKIAANEVDALGDTSTLADPTVVDDLIDNRENKG

SEQ ID NO: 151422 - DNA, 1908 bp, Flavobacteriaceae bacterium 3519-10
  CDS (1)..(1908): transl_table=11
atgaagaattatttcattgatgatcttccggattatttcaaacagtataaaaaatcgatcaagaatcccaaaaaattctgggataaagtggctgatgaaaacttcgtctggtaccaacgctggagcaaagtggtggaatatgacatgcaggaggccaaaataaaatggtttaaaaacgccaaactcaacatcaccaaaaactgcatcgaccgccatctgaacacgcgcggcgacaaaactgcgatcatctgggaacccaacgaccccaaagaagaagcgcagcatatttcgtattccgaactccgcgacagagtctgcaaaatggccaatgtacttcgcgatatgggcattgaaaagggcgaccgggtctgcatttatctgcctatgattcctgaacttgccgtgacgatgctggcctgtgcgcgtctgggagcagtgcattcggtgatatttgctggattctctgcctcggcggtgacttcacgtgtgaatgactgcgaggcaaaactgataatctgttcggacggaagttaccgcggtcacaaagccatcgatcttaaaggaattatcgacgaagccgtggaaagctgcccgactgtcgaaaaagttttggttgtgaaaagaaccggcggcgatgtaaaaatgaaggatggccgcgatttttggctcgaaccgctttacgaaaaagccgcttcagattttatttcggtgattatggatgccgaagatccgctgtttattctgtacacttccggttccaccggaaaacccaaaggtatgctgcacaccacggcgggttatatggtttacacggcgtatactttcaagaacgtatttaattatcaggaaaacgatatttactggtgtacggccgacatcggctggatcacgggacactcgtacatcctctacggaccgcttgctaacggtgccacgacggtgatcttcgaaggcgttcctacgtatccggaacccgaccgtttctgggaagtaattgaaaaacacaaagttacgcagttttataccgcgccgactgccatccgttcactcgcaaaagagtcttacgaatgggttgaaaaacatgacctttcaagtttacgcgtgatcggttctgtgggtgaaccgattaatgatgaagcctggcactggtacaacgaccatgtcggcaagaaaaaatgcccgatcgtggatacctggtggcaaaccgaaaccggcggtattatgatttcgccgattccgtttgtaacgcccaccaaaccaacttacgctactcttccacttccgggaattcagccggttctgatggacgacaaacgcaatgaaatcaccggaaatcaggttgacggcaacctctgtatccgttttccgtggcccggaattgcaaggacgatttggggcgaccatcagcggtataaggaaacttactttacggcatttccgggtaaatatttcaccggcgacggtgccctgcgcgatgaagttggttattacagaatcaccggacgcgttgatgatgtgattatcgtttccggtcacaacctcggaaccgcaccgattgaagacagcattaaccagcatccggctgtagcagaatcagctattgtgggttatccgcacgacattaaaggaagtgcgctttatggttatgtgattttgaaagatgtgggcgagagccgcgatcgtgaaaacctcagaaaggaaatcaaccaggtaatcagcgatacggtgggtccgattgccaaacttgataagattcagtttgtgtctgcattgccgaaaacgcgttcaggaaaaatcatgcgccggatcttaaggaaaattgcggaaggtgatttcgccaatttcggggatatttctactttgttgaatcctgaaattgttgaggagattaaggaggagaggatttga

SEQ ID NO: 151423 - protein, 635 aa, Flavobacteriaceae bacterium 3519-10
MKNYFIDDLPDYFKQYKKSIKNPKKFWDKVADENFVWYQRWSKVVEYDMQEAKIKWFKNAKLNITKNCIDRHLNTRGDKTAIIWEPNDPKEEAQHISYSELRDRVCKMANVLRDMGIEKGDRVCIYLPMIPELAVTMLACARLGAVHSVIFAGFSASAVTSRVNDCEAKLIICSDGSYRGHKAIDLKGIIDEAVESCPTVEKVLVVKRTGGDVKMKDGRDFWLEPLYEKAASDFISVIMDAEDPLFILYTSGSTGKPKGMLHTTAGYMVYTAYTFKNVFNYQENDIYWCTADIGWITGHSYILYGPLANGATTVIFEGVPTYPEPDRFWEVIEKHKVTQFYTAPTAIRSLAKESYEWVEKHDLSSLRVIGSVGEPINDEAWHWYNDHVGKKKCPIVDTWWQTETGGIMISPIPFVTPTKPTYATLPLPGIQPVLMDDKRNEITGNQVDGNLCIRFPWPGIARTIWGDHQRYKETYFTAFPGKYFTGDGALRDEVGYYRITGRVDDVIIVSGHNLGTAPIEDSINQHPAVAESAIVGYPHDIKGSALYGYVILKDVGESRDRENLRKEINQVISDTVGPIAKLDKIQFVSALPKTRSGKIMRRILRKIAEGDFANFGDISTLLNPEIVEEIKEERI

SEQ ID NO: 151424 - DNA, 1974 bp, Desulfomicrobium baculatum DSM 4028
  CDS (1)..(1974): transl_table=11
atgacacctgacaatatccagagcctgcagcacgaacagcgcctcttcaacccacccgccgccaaacgggcccacatccccgacatggccacctacgaagagcactatcgccgcgccgaccaggaccccgaaggctactgggccgaccgcgccaaggagcttctcagctggagcaaaccctgggacaaggtcatggactgcgatttcaccgttccgaagatcaactggttcgtgaacggccagctcaacgtcagctacaactgccttgaccggcatgtggaaaacggcctgggcgacaagacggccatcatctggcagggcgaacccgaagaagatgtccggcacatttccttccgcgaacttttgcacgatgtcatccgcttcgccaacatcctcaaaaaactcggagtcggacgcggtgaccgcgtggccctctacatgcccatggtgccggaactggccgtggccatgctggcctgcacgcgcatcggagccacgcattccatcgttttcgcgggcttttcggctttgagcctcatgaaccgcatccaggactgcgaagccaaggtgctggtcaccgccgacgcggtgctgcgcggaggcaagaagatccccctcaagggcaatgtcgacgaagccctcaaaggctgccccaccgtgacagcttgcgtggtcctgaagcgggccggcatcgacatcaacatggtcgaggaccgggacctgtggtggcacgacgtcatggccgacccgaacatcgccacgagctgcccctgcgaacccatggactccgaggacctgctcttcattctgtacacaagcggctccacgggcaagcccaaaggggtcatgcacaccacgggcggttacctgacctacgcggcccactccacgcagctggtcttcaacctgcatgacgacgacatccatttctgcacggcggacatcggctggatcaccgggcacacctacatcgtgtacggtcctctggcgctgggcgtgacctcggtcatgttcgaaggcgtgccgtcctatcccgatccgtcccggttctggcagttggtcgagaagttcaagatcacctccttctacaccgcgcccaccgccatccgggcgctgatgcgagacggctcggaatggacgcagaagaacgatttgtcctccttgcgcgtgctcggcagcgtcggcgaacccatcaatcccgaggcctggatgtggtatcacaagaacatcggcaattccaagctgcccgtggtcgacacctggtggcagacggaaacgggcggcatcctcatctccgctctgcccttcgccacgccactcaaacccggctccgccacccgtcctctgcccggcgtgcatgcccgcatcgtcgacgccgaaggcaacccgacctctgccaacgaaggcggccacctgatcatcgagcgcccctggccgggcatgctgcgcggcgtgttcggtgatcccgagcgcttcaagcagcaatacttcgagcgctttcccggccgctacgaggccggcgacggcgcgcgccaggacgaggacggctatttctggatcatgggccgccttgacgatgtcatcaacgtgtccggccatcgcctgggcacggccgagatcgagtccgccctggtctcgcatccggccgtggccgaggccgccgtggtcggcatgcctcacgacatcaagggccaggccatttatgcctacgtcaccctgcgcgccgacgcggacgaatccgacgaactcataaaagccctgcgcaaccacgtccgcaaggaaatcgggccgctggcctctcccgaagtcatccagttcaccgtgggcctgcccaagacccgcagcggcaagatcatgcgccgagtactgcgcaagatcacctccggttccacggccctggaagacttcggcgacacctcgaccctggccgatccttccgtcattcaagatctgatcgccggtcgccatacctaa

SEQ ID NO: 151425 - protein, 657 aa, Desulfomicrobium baculatum DSM 4028
MTPDNIQSLQHEQRLFNPPAAKRAHIPDMATYEEHYRRADQDPEGYWADRAKELLSWSKPWDKVMDCDFTVPKINWFVNGQLNVSYNCLDRHVENGLGDKTAIIWQGEPEEDVRHISFRELLHDVIRFANILKKLGVGRGDRVALYMPMVPELAVAMLACTRIGATHSIVFAGFSALSLMNRIQDCEAKVLVTADAVLRGGKKIPLKGNVDEALKGCPTVTACVVLKRAGIDINMVEDRDLWWHDVMADPNIATSCPCEPMDSEDLLFILYTSGSTGKPKGVMHTTGGYLTYAAHSTQLVFNLHDDDIHFCTADIGWITGHTYIVYGPLALGVTSVMFEGVPSYPDPSRFWQLVEKFKITSFYTAPTAIRALMRDGSEWTQKNDLSSLRVLGSVGEPINPEAWMWYHKNIGNSKLPVVDTWWQTETGGILISALPFATPLKPGSATRPLPGVHARIVDAEGNPTSANEGGHLIIERPWPGMLRGVFGDPERFKQQYFERFPGRYEAGDGARQDEDGYFWIMGRLDDVINVSGHRLGTAEIESALVSHPAVAEAAVVGMPHDIKGQAIYAYVTLRADADESDELIKALRNHVRKEIGPLASPEVIQFTVGLPKTRSGKIMRRVLRKITSGSTALEDFGDTSTLADPSVIQDLIAGRHT

SEQ ID NO: 151426 - DNA, 1911 bp, Robiginitalea biformata HTCC2501
  CDS (1)..(1911): transl_table=11
atgagtaactaccatatcaaacacctggaggagtatttccaggtgtatcgcaaatctgtacgggacccggaagccttttgggaggaaatcgccgaagagcactttgtctggcgaaagaaatgggaccgggttttgcgctgggacttcaagaaacccgaagtggcctggtttgaaggagcccggctgaatattaccgaaaactgcctggaccggcacctgcctgtgcggggcgataaaaccgctatcctctttgagcccaacgacccgtccggggaggcccagcacatcacctataaggaattgcacgaacgcgtgtgccggatggccaatgtactgaaggaacacggcgtgaaaaagggcgaccgcatctgcatctacctgcctatgatcccggaactggccgtcgctgtactggcctgtgcgcggatcggggccatccactccgtggtttttgccggtttctcctccaacgcgctggctacccgtatcaacgacagcgattgcaaactggtcatcacctccgacggttcttaccggggtgcaaaaaccctcaacttgaaaagtatcgtggatacggccctggaagattgcccgggggtggataccgtactggtggcgcggcgcaccggggaagaggtagccatgaaggacggccgggacaaatggctgcagcccctgttggacgaggcgtatgcggattgcgtggccgaaatcatggatgcggaagacccgctctttatcctgtatacctccggttccaccggcaaacccaaggggatggtacacagttgcggggggtatatggtctacacggcctatacttttaagaatattttccagtaccgggaacaggacgtgtactggtgcacggcggatattggttggattaccggccattcctacatcgtctacggcccgctggccaacggggctaccacggtgatgtttgagggggtgccttcctatccggactacggccggttctgggaggtggtggaaaaacaccgggttaaccagttttatacggcacccacggccatccgcgccctggccaaggaaagcctggactatgtggagaagtacgacctgtcttccctgaaggtcctgggctctgtgggggaacccatcaacgaggaagcctggcactggtacaacaacaacatcgggcggaacaagtgcccgattgtggatacctggtggcagaccgaaaccggggggatcatgatcagccccatcccgtttgtcacccccaccacgcccacctttgctaccctgccgtttatcggcatccagccggccctgatggacgaggaagggaatgagatcaaggggaaccaggtaagcggccgtttgtgcatcaaattcccatggccctccatggcccgtaccatctggggcaaccacgatcgctaccgggacacctatttctcggcctatgcggacaaatactttacaggggacggcgcctcaagggacgccgtgggttattaccggattacgggtcgcgtggacgatgtgatcatcgtgagcggacacaacctggggactgcgcccatcgaggacagcatcaacgaacacccggctgtggccgaatcggccattgtgggctttccccacgacgtcaaggggaacgcgctctatgggtttgtcatccttaaggaaaccggggaatcccggaaccgggaaaacctgcacaaggaaatcaaccagcagatcaccgaacagatcggcccgattgccaagctggacaagatccagtttgtccccggcctgcccaagacccggagcggcaagatcatgcgtcggatcctccggaagattgccgccggccagaccgacgatttgggggatatcagcacgctgctgaacccggaagtggtgcaggagatcatcgaccaggcagaagtatag

SEQ ID NO: 151427 - protein, 636 aa, Robiginitalea biformata HTCC2501
MSNYHIKHLEEYFQVYRKSVRDPEAFWEEIAEEHFVWRKKWDRVLRWDFKKPEVAWFEGARLNITENCLDRHLPVRGDKTAILFEPNDPSGEAQHITYKELHERVCRMANVLKEHGVKKGDRICIYLPMIPELAVAVLACARIGAIHSVVFAGFSSNALATRINDSDCKLVITSDGSYRGAKTLNLKSIVDTALEDCPGVDTVLVARRTGEEVAMKDGRDKWLQPLLDEAYADCVAEIMDAEDPLFILYTSGSTGKPKGMVHSCGGYMVYTAYTFKNIFQYREQDVYWCTADIGWITGHSYIVYGPLANGATTVMFEGVPSYPDYGRFWEVVEKHRVNQFYTAPTAIRALAKESLDYVEKYDLSSLKVLGSVGEPINEEAWHWYNNNIGRNKCPIVDTWWQTETGGIMISPIPFVTPTTPTFATLPFIGIQPALMDEEGNEIKGNQVSGRLCIKFPWPSMARTIWGNHDRYRDTYFSAYADKYFTGDGASRDAVGYYRITGRVDDVIIVSGHNLGTAPIEDSINEHPAVAESAIVGFPHDVKGNALYGFVILKETGESRNRENLHKEINQQITEQIGPIAKLDKIQFVPGLPKTRSGKIMRRILRKIAAGQTDDLGDISTLLNPEVVQEIIDQAEV

SEQ ID NO: 151428 - DNA, 1986 bp, Desulfohalobium retbaense DSM 5692
  CDS (1)..(1986): transl_table=11
atgggtggctcagacgaacacattgagagcatgatgcacgaaaggcggcactttccaccgccacgccacggcagcgaacgggcccacatcccgggcccggaggcctatgatgacctgcgcgaccaggcagccagggatccggaggggttctgggccgaacgagccaaagcgttattggattgggacagtgaatgggacacggtcctcgaggcagattgggagacaccggaattcaaatggttcgctggcggcaaactcaacgcctgcgccaattgcctggaccgccacgtcgccagcggccgaggggaaaagaccgcactgatctggcagggggagccggaagacgacgtgcggcagttcacctacgctgaattgcgcgatgaagtggtcaaattcgccaaggtcctcaaaaaatggggcgtgggcaaaggggaccgggtcgccgtctatctgcccatgatcccggagttgcccatcgccatgctcgcttgcgcccgcatcggcgccgtgcactcggtggtttttgccgggttctcggcccacagcctgcaaaaccgcatccaggactgcgaggccaaggtcctgattaccgctgacgcggtcatccgggccggcaagcagattcccttgaagaccaacggggacgaggccctggaagcctgcccatcggtggagcattgcatcgtggtcaaccgggccggactggacgtcgccatgcacgaggggcgagacgtctggtggcacgacgccgtggccggcgacgacggaacggactgcccgccggaatccatggacgccgaggatctgctgttcatcctctacaccagcggctcgaccggcaaacccaaaggggtcgtgcacaccacgggtggctatctgacttatacggcccagaccacccaatgggtctttgatatccaggaggacgacgtctattggtgcaccgcggacatcggctggatcaccggccactcttacatcctctacggcccgctggccctgggcgcgaccacggtcatgttcgagggcgtgccctcctatccgcagccggaccggttctggcaggtggtcgagaaattcaaggtgacaattttttacaccgcccccacggtcatccgagccctgatgcgtgaagggcctcaatggaccgaaacccgggatctttcctccctgcggctgctcggctccgtgggcgagcccatcaatcccgaggcctggatgtggtaccacgaccacgtcggcaagggggaattgccggtgctggatacctggtggcagaccgaaaccggcgggatcatgatctcggctgtgccttacgccacgacgctgaaaccgggatcagccagccagccgctgccgggcatcgaagccgatatcgtcgatcgcgacggagaaccggtgggaccgaaccgcggggggcatctggtggtcaagacaccgtggcccgggatgctccgcaacgtatacggcgatccggcccgctacaaatcgacctattttgaacgctttcctgggatgtacgaatccggggactcggcccgcatggatgaggaagggtatttctggatcatgggtcggctggacgacgtcatcaatgtctccgggcaccgtctgggcaccgcggagatcgaatccgccctggtggcccacgaagccgtggccgaagccgcggtggtcggcatgccccatgaggtcaagggccaggctatctacgcttacgtgaccctgaagtcgaccttccaggaaaacgatgagttgcgcaaggtcctgcgccagcacgtgcgcaccgagatcggggccatcgccacgccggagatcatccagttcgcgcccggcctgcccaagacccgctcggggaagatcatgcgccgtatcctgcgcaagatcgccgcggacgagaccaacgccttcggcgacacctcgaccctggccgatcccacggttattgccgacttgatagatggtaagaatttgttggggaaataa

SEQ ID NO: 151429 - protein, 661 aa, Desulfohalobium retbaense DSM 5692
MGGSDEHIESMMHERRHFPPPRHGSERAHIPGPEAYDDLRDQAARDPEGFWAERAKALLDWDSEWDTVLEADWETPEFKWFAGGKLNACANCLDRHVASGRGEKTALIWQGEPEDDVRQFTYAELRDEVVKFAKVLKKWGVGKGDRVAVYLPMIPELPIAMLACARIGAVHSVVFAGFSAHSLQNRIQDCEAKVLITADAVIRAGKQIPLKTNGDEALEACPSVEHCIVVNRAGLDVAMHEGRDVWWHDAVAGDDGTDCPPESMDAEDLLFILYTSGSTGKPKGVVHTTGGYLTYTAQTTQWVFDIQEDDVYWCTADIGWITGHSYILYGPLALGATTVMFEGVPSYPQPDRFWQVVEKFKVTIFYTAPTVIRALMREGPQWTETRDLSSLRLLGSVGEPINPEAWMWYHDHVGKGELPVLDTWWQTETGGIMISAVPYATTLKPGSASQPLPGIEADIVDRDGEPVGPNRGGHLVVKTPWPGMLRNVYGDPARYKSTYFERFPGMYESGDSARMDEEGYFWIMGRLDDVINVSGHRLGTAEIESALVAHEAVAEAAVVGMPHEVKGQAIYAYVTLKSTFQENDELRKVLRQHVRTEIGAIATPEIIQFAPGLPKTRSGKIMRRILRKIAADETNAFGDTSTLADPTVIADLIDGKNLLGK

SEQ ID NO: 151430 - DNA, 1959 bp, Cronobacter turicensis z3032
  CDS (1)..(1959): transl_table=11
atgagccaaatccataaacaccctattcccgcgactatcgcggaacgctgcctgattacgccggaacaatatgatgcgaaatatcagcagtccgtgcatgaccctgacgcgttctggggcgagcagggcaaaatccttgactggatcacgccctaccagaaggtaaaaaacacctctttcgcacccggcaatgtctcgattaaatggtatgaagacggcacgctgaacctcgcggcgaactgccttgaccgacacctcaacgagcgcggcgatcagaccgccatcatctgggaaggcgacgacgcctcccaaagcaaacacattagttaccgcgaacttcaccgcgacgtctgccgcttcgcgaacaccctgacctctctcggcattaagaaaggcgacgtggtcgctatctatatgccgatggtgccggaagccgccgtcgcgatgcttgcctgcgcccgtatcggcgcggtgcactcggttattttcggcggcttttcgccggaggccgtcgccgggcgcattatcgactccaacgcgcgtctcgttatcaccgccgatgaaggcgtgcgcgccggccgtacgattccgcttaagaaaaacgtcgatgacgcgctgaaaaacccgggcgtcaccagcgtggaacatgtggtggtgtttaaacgcaccggcgggaataccgaatggcatgaagggcgcgatctctggtggaacgagctggttgaaaaagccagcgcgcatcatcaaccggtggagatgaacgccgaagatccgctgtttatcctctatacctccggctcgaccggtaaaccgaaaggcgtgctgcacaccaccggcggttatctggtctatgcggccaccacgttcctgtacgcctttgactaccatccgggcgatatctactggtgcaccgcggatgtgggctgggtgaccggccacagctatctgctgtacggaccgctcgcctgcggcgccaccacgctgatgtttgaaggcgtgccgaactggccctccgccaaccgtatggcgcaggtggtggacaagcacaaggtcaatattctctataccgcgccgacggccattcgcgcgctgatggcggaaggcgacaaggctatcgacgggactgaccgttcgtcgctgcgcattcttggttccgtcggcgagccgatcaacccggaggcgtgggagtggtactggaagaaaatcggcaatgaaaaatgcccggtcatcgacacctggtggcagaccgaaaccggcggcttcatgattacgccgctgcccggcgcgaccgagctgaaagccggctccgccacgcgtccgttcttcggcgtgcagcctgcgctggtggataacgaaggcaatccgcaacagggcgcgacagagggcaacctggtcattaccgattcctggccgggccaggcgcgcacgctgtttggcgatcacgaacgtttcgagcagacctatttctcaacgtttaaaaacatgtacttcagcggcgacggcgcgcgtcgtgacgaagacggttactactggataaccgggcgcgtggacgacgtgctgaacgtatcggggcaccgtctcggcaccgctgaaattgagtccgcgctggtctcacatccgaaaatcgccgaagccgcggtggtgggcattccacacagcattaaaggccaggcgatctatgcttacgtgacgctgaaccacggcgaggagccgtcggcggaactctacagcgaagtgcgcaactgggtacgtaaagagattggcccactggcgacgccggatgtgctgcactggaccgactcgctgccgaaaacccgctccggcaaaatcatgcgtcgtattttgcgcaaaatcgcggcgggcgataccagcaacctcggcgatacctcaacgcttgccgatccgggcgtggtggaaaaactgctcgaagagaagcagtccatcgcgatgccgtcgtaa

SEQ ID NO: 151431 - protein, 652 aa, Cronobacter turicensis z3032
MSQIHKHPIPATIAERCLITPEQYDAKYQQSVHDPDAFWGEQGKILDWITPYQKVKNTSFAPGNVSIKWYEDGTLNLAANCLDRHLNERGDQTAIIWEGDDASQSKHISYRELHRDVCRFANTLTSLGIKKGDVVAIYMPMVPEAAVAMLACARIGAVHSVIFGGFSPEAVAGRIIDSNARLVITADEGVRAGRTIPLKKNVDDALKNPGVTSVEHVVVFKRTGGNTEWHEGRDLWWNELVEKASAHHQPVEMNAEDPLFILYTSGSTGKPKGVLHTTGGYLVYAATTFLYAFDYHPGDIYWCTADVGWVTGHSYLLYGPLACGATTLMFEGVPNWPSANRMAQVVDKHKVNILYTAPTAIRALMAEGDKAIDGTDRSSLRILGSVGEPINPEAWEWYWKKIGNEKCPVIDTWWQTETGGFMITPLPGATELKAGSATRPFFGVQPALVDNEGNPQQGATEGNLVITDSWPGQARTLFGDHERFEQTYFSTFKNMYFSGDGARRDEDGYYWITGRVDDVLNVSGHRLGTAEIESALVSHPKIAEAAVVGIPHSIKGQAIYAYVTLNHGEEPSAELYSEVRNWVRKEIGPLATPDVLHWTDSLPKTRSGKIMRRILRKIAAGDTSNLGDTSTLADPGVVEKLLEEKQSIAMPS

SEQ ID NO: 151432 - DNA, 1962 bp, Pectobacterium wasabiae WPP163
  CDS (1)..(1962): transl_table=11
atgacacaacataataaacacgccattcccgccgctattgcggaaaatgcactgattaatgcccagcaatacgaaaatatgtatcggctgtccgttgacgatcccgccaccttttggggtgagcagggaaagatcgtcgattggatcaaaccctatgaaacgatcaagaacacctcattcgacccaggccacatccgtattcgctggtttgaggacggtacgcttaatgtggcagcaaactgtctggaccgccatctggccgagcgtggcgatcaaaccgccattatttgggaaggcgatgacgcaacagaaagtaagaaagttacctatcgagagctgcaccaatctgtgtgccgcttcgccaatgtactgaagtcgcagggcgtcaagaaaggcgatgtcgttgccatttatatgccgatggtgccggaagcggctgtggcaatgctggcctgtgccagagtcggcgcgattcactcggtgatcttcgggggcttctctcccgaagcaatttccgggcgtatcatcgactccagcgccaaactcgttatcaccgctgatgaaggcgttcgcgccgggcgtgtgattccgctgaagaagaatattgatgaggcgttaaagaacccaaatgtcaccaccatttccagcgtcatcgttttccgtcgcacgggaaagagcggtgaatggaaagatgggcgcgatctgtggtggcacgatctggttgaaaaagcagacgaccattgcccaccagaagagatgaatgcggaagatccgctgtttatcctttatacatcgggttcaaccggcaaacccaaaggtgtattgcataccactggcggctatctggtttatgccgcactgaccttcaagtatgtcttcgactaccatcctggcgacatctactggtgcacggcagacgttggctgggttacagggcatagctacctgctttatggcccgctggcgtgtggcgcgattacgctgatgtttgaaggcgtgccaacctggccagatgccagccgtatggcacaagtagtcgataaacataaggtcaacattctctataccgcccctactgcaattcgcgcgctgatggctgaaggtgacaaggcgatcgagggcacatcgcgtgaatcgctcaggatcatggggtctgttggtgagccgatcaacccggaagcctgggagtggtatttcaacaaaatcggcaatggcaaatgcccgattgtcgatacctggtggcaaacggaaacgggcggcttcatgatcaccccgatccccggcgcaatcgaagcaaaagccggttccgcgacgcgtccattcttcggtgtacagcctgcgctagtcgacaatctcggcaatccacaggaaggtaccagcgaaggcaatctggtgattgtggattcctggccgggtcaggcaaggacgctgtttggcgatcacgatcgctttgagcaaacctacttttccactttcaaaggcatgtatttcagcggcgacggcgcgcgccgtgacgaggatggctattactggatcacgggtcgtgttgacgacgtgctgaacgtttccggccaccgtctgggaacggcagaaatcgagtctgcgctcgttgcccatcccaagattgctgaagcagccgtggtcggtatcccgcaccatatgaaaggacaggctatttacgcctatatcacactaaaccacggcgaagagccgtccagcgaactgtatacggaagtgcgcaactgggtgcgtaaggaaatcggcccgattgctacgcctgacattctgcactggacagactccttaccgaaaacgcgatccggcaaaattatgcgtcgtattttgcgtaagatcgccgccggtgacaccagcaacctgggggacacctcaacgctggccgatcctggcgtcgtcgaaaaactgctcgaagaaaagcaggccatgagtaccgcctctcaatag

SEQ ID NO: 151433 - protein, 653 aa, Pectobacterium wasabiae WPP163
MTQHNKHAIPAAIAENALINAQQYENMYRLSVDDPATFWGEQGKIVDWIKPYETIKNTSFDPGHIRIRWFEDGTLNVAANCLDRHLAERGDQTAIIWEGDDATESKKVTYRELHQSVCRFANVLKSQGVKKGDVVAIYMPMVPEAAVAMLACARVGAIHSVIFGGFSPEAISGRIIDSSAKLVITADEGVRAGRVIPLKKNIDEALKNPNVTTISSVIVFRRTGKSGEWKDGRDLWWHDLVEKADDHCPPEEMNAEDPLFILYTSGSTGKPKGVLHTTGGYLVYAALTFKYVFDYHPGDIYWCTADVGWVTGHSYLLYGPLACGAITLMFEGVPTWPDASRMAQVVDKHKVNILYTAPTAIRALMAEGDKAIEGTSRESLRIMGSVGEPINPEAWEWYFNKIGNGKCPIVDTWWQTETGGFMITPIPGAIEAKAGSATRPFFGVQPALVDNLGNPQEGTSEGNLVIVDSWPGQARTLFGDHDRFEQTYFSTFKGMYFSGDGARRDEDGYYWITGRVDDVLNVSGHRLGTAEIESALVAHPKIAEAAVVGIPHHMKGQAIYAYITLNHGEEPSSELYTEVRNWVRKEIGPIATPDILHWTDSLPKTRSGKIMRRILRKIAAGDTSNLGDTSTLADPGVVEKLLEEKQAMSTASQ

SEQ ID NO: 151434 - DNA, 1953 bp, Halothiobacillus neapolitanus c2
  CDS (1)..(1953): transl_table=11
atgaataatctcgaatcgattctaacggaaaacagggtattccaacccaaccccgagtttgcagcccacgcacgaattggttctctggatgcctacaacgcactggtcgccgaagctcaaaacgattacgagggcttctgggcccgtcaggcccgtgaatttttaacctgggatacgccgttcaccaccattctcgacgattcgaatgcgccgcactatcgctggtttaccgacggcaaactcaatgcatcagtgaattgcatcgaccgccatctgcccgccaaggcacagaaagttgcgatcattgccgaagcggacgacggcagcgtacgcgaaatcacctatcaacaactgcacgatgaagtcgccaaacttgccaatggcatcaaatcgctcggcgtcaccaaaggcgaccgtgtgattatctacatgccgatgatccccgaggccagcatcgccatgctcgcctgcgcacgcatcggcgccattcactcggtggtatttggcggcttctcggccgaagcgctgcgcgaccggatcaacgatacgggtgctcgcttggtcatcaccgccgacggcggcatgcgcggcggacgaaccgtgcccctcaagtctgcggtcgacaaagcgctcgaagccggatgtgccagcgtggagaaagtcgtggtattcgagcgcctcggcaatgccgcgctcaacgccggcacagatgtcgcctggagcgcacttattgccgacaagtcaaccacctgcgaccccgaaatggtcgaggccgaacacccgctgttcctgttatacacttccggctccaccggcaagcccaagggcgtacagcacgccaccggcggatttcttgtcaatgctgcactcaccaatgcctgggttttcgacctgaacgacgacgatgtgtactggtgcaccgccgatgtcggctggattaccggccacagctacgtcacctacggcccgctggcacttggcgttactcaagtcatgtttgagggcatcccctcttatccagatggtggccgtttttggcagatgatcgaacgccataaagtttccgtgttctacaccgcgccgactgccatacgtgccctgatgaagctcggcgatgacgttccggccaagtccgatctttccagccttcgcttgctcggcactgtgggagaacccatcaaccccgaggcctggatgtggtatcaccgcgtgattggctccgagcgctgcccgattgccgacacctggtggcaaaccgaaaccggcgcccacatgatcgcaccattacctggcgctatcgcaaccaaacccggctcctgtacgcgtcctttacctggaatcatcgcggacattgtcgatgacgagggtaaccccgtggggcacaatcagggcgggaatctggtcatcaagaagccttggccttcgatgatccgcaccatctggggtgatgatgcccgcttccagcgcagttattttccagaaaagctcaagggttattacctcgccggcgattcggcgcgccgcgacgacgatggctacttctggatcatgggccgtatcgatgacgtgctgaacgtatccggccatcgcctcggcaccatggaaatcgaatcggcgctcgtggctcacccgctggtggccgaggctgccgttgtcggtaaaccgcatgatattaaaggtgaatcgatcgtcgccttcgtcgtctgcaaaggcgatcgtccggagggcgatgccgccgatgccatggtcaaaaccctgcgcgactgggttgccgagcagatcggccccatcgccaaacccgacgacatccgatttggcgacaacctgcctaaaacccgctcggggaaaatcatgcgccggttgttgcgcggcatcgccatcggcgagttgcctcagggcgatgtatcgacacttgaaaatccggctatcctagaacaacttctcggtaaataa

SEQ ID NO: 151435 - protein, 650 aa, Halothiobacillus neapolitanus c2
MNNLESILTENRVFQPNPEFAAHARIGSLDAYNALVAEAQNDYEGFWARQAREFLTWDTPFTTILDDSNAPHYRWFTDGKLNASVNCIDRHLPAKAQKVAIIAEADDGSVREITYQQLHDEVAKLANGIKSLGVTKGDRVIIYMPMIPEASIAMLACARIGAIHSVVFGGFSAEALRDRINDTGARLVITADGGMRGGRTVPLKSAVDKALEAGCASVEKVVVFERLGNAALNAGTDVAWSALIADKSTTCDPEMVEAEHPLFLLYTSGSTGKPKGVQHATGGFLVNAALTNAWVFDLNDDDVYWCTADVGWITGHSYVTYGPLALGVTQVMFEGIPSYPDGGRFWQMIERHKVSVFYTAPTAIRALMKLGDDVPAKSDLSSLRLLGTVGEPINPEAWMWYHRVIGSERCPIADTWWQTETGAHMIAPLPGAIATKPGSCTRPLPGIIADIVDDEGNPVGHNQGGNLVIKKPWPSMIRTIWGDDARFQRSYFPEKLKGYYLAGDSARRDDDGYFWIMGRIDDVLNVSGHRLGTMEIESALVAHPLVAEAAVVGKPHDIKGESIVAFVVCKGDRPEGDAADAMVKTLRDWVAEQIGPIAKPDDIRFGDNLPKTRSGKIMRRLLRGIAIGELPQGDVSTLENPAILEQLLGK

SEQ ID NO: 151436 - DNA, 1986 bp, Rhodothermus marinus DSM 4252
  CDS (1)..(1986): transl_table=11
atgggtgttcaggaaacgatcagagaaacggcggccttctcgggacgcggactggtcttcgatcctccggaagcgtttcgcaaaagggctttcattagctcgatggagcaatatcgtgagctctacgagcgctccatcaaagatccggaaggcttctggcgcgagcaggcccagcgcatcacctggttcgagccgttccatacggttaaaaacacgtcgtacgacccctcgaatctctatatccgctggttcgagggcggcaaactgaacgcggcctacaactgcatcgaccgtcatctggaaaagcgggccgatcaggtggccttctactgggagccggacgatccgaacgaagagagcaaggcgatcacctaccgccagctctacgaagaagtctgccggctggccaatgtgctcaaaaagcacggcgtgaagaaaggcgaccgggtgacgatctacctgcccatgatcccggaagccatctacgccatgctggcctgcgcccggatcggggcgatccactcggtggtctttgcgggcttttcgcccgactcgctggccgatcgtattctggacggcgaggcgacctacctgatcacggccgacgaggggctccgggccgggcgtcgcgtgccgctcaagcggaatgccgataaggcgctcgaacgttgcccggacgtgaagaccgtgctggtcgtgcgtcgcacgggcggcgacatcccgtgggtggaaggccgcgaccgctggtatcatgaggaaatccagaccgtttcggccgagtgcccgcccgaggtgatggatgccgaagatccgctcttcttcctctacacctcgggttcgacaggcaagcccaagggcgtggtgcatacgaccggcggctatctggtctacacctcgctcacgcaccagctcgtcttcgactatcacgacggcgacgtctactggtgcgcggccgacatcggctgggtgacaggccacagctacatcgtctacgggccgctggccaacggcgtgaccgaggtgcttttcgagggcacgccgaactacccggatccgtcgcgtatctggcaggtggtcgacaaataccaggtgaacatcctgtacacctcacctacggccatccgggcgttgatgcgcgaaggcgacgagtgggtgaagaagacgagccggaagtcgctccggctgctgggcacggtcggggagccgatcaacccggaagcctggctctggtactaccgggtggtgggcgaagaacgctgcccgatcgtggacacctggtggcagaccgaaacgggcggcatcatgattacgccgctgccgggcgccacgccgctcaagccgggctcggccacgctgccgttcttcggtatccagccggccatcgtggacaacgacgggaacatcctggaagggccggccgacggcatgctggtcattctcgattcgtggcccggccagatgcgcacggtctacagggcccatgatcgcttcgtggagacctacttcacccgcttcccgggcaagtacttcacgggagacggcgcacgtcgggacgaggacggctactactggatcgtgggacgcgtcgacgacgtgatcaacgtctccggtcaccgtctgggcacggccgaaatcgaaagcgcgctggtgcagcatgaggcggtggcagaggcggccgtggtgggctatccgcacgaaatcaaagggcagggcatctacgccttcgtgacgctgaaggcgggcttcgagcccagcgacgaactccgcaaggaattgatccagcacgtgcggaacttgctggggccgatcttcacgatcgatctgctccagtttacgccggctttgcccaagacgcgttccggcaagatcatgcgccgcattctgcgcaagattgcggccaacgaatatcaggacctgggggatatttcgacgctggccgatccgtcggtcgtcgaagagctggtgcagaatcgactcaaccgctga

SEQ ID NO: 151437 - protein, 661 aa, Rhodothermus marinus DSM 4252
MGVQETIRETAAFSGRGLVFDPPEAFRKRAFISSMEQYRELYERSIKDPEGFWREQAQRITWFEPFHTVKNTSYDPSNLYIRWFEGGKLNAAYNCIDRHLEKRADQVAFYWEPDDPNEESKAITYRQLYEEVCRLANVLKKHGVKKGDRVTIYLPMIPEAIYAMLACARIGAIHSVVFAGFSPDSLADRILDGEATYLITADEGLRAGRRVPLKRNADKALERCPDVKTVLVVRRTGGDIPWVEGRDRWYHEEIQTVSAECPPEVMDAEDPLFFLYTSGSTGKPKGVVHTTGGYLVYTSLTHQLVFDYHDGDVYWCAADIGWVTGHSYIVYGPLANGVTEVLFEGTPNYPDPSRIWQVVDKYQVNILYTSPTAIRALMREGDEWVKKTSRKSLRLLGTVGEPINPEAWLWYYRVVGEERCPIVDTWWQTETGGIMITPLPGATPLKPGSATLPFFGIQPAIVDNDGNILEGPADGMLVILDSWPGQMRTVYRAHDRFVETYFTRFPGKYFTGDGARRDEDGYYWIVGRVDDVINVSGHRLGTAEIESALVQHEAVAEAAVVGYPHEIKGQGIYAFVTLKAGFEPSDELRKELIQHVRNLLGPIFTIDLLQFTPALPKTRSGKIMRRILRKIAANEYQDLGDISTLADPSVVEELVQNRLNR

SEQ ID NO: 151438 - DNA, 1956 bp, Edwardsiella tarda EIB202
  CDS (1)..(1956): transl_table=11
atgagccagatccatacctaccctgttccggcggatattgcccggcatgcctttatcaatgcggaaatgtatcgtgaaatgtatctggcctctgtcgaggaccccgaggcgttctgggcggagcagggacagatcatcagctggataaccccctatagccgggttaagaatacctccttcgatccaggccatatcaatatccgttggtttgaggatggcaccctcaacctggcggccaactgcctggatcgccatctggccgaacgcggcgaacagacggccatcatctgggagggcgacgatccgcaggagagccgcagagtaacctatcgtcagctgcacggtgaggtgtgccgcttcgccaacgtgctgaaatcactgcaggtagaaaagggcgacgtcgtcgcgatctatatgcccatggtggtcgaggcggcggttgccatgctggcctgcgcgcgaattggcgccgtacactcggtgatcttcggtggcttctccccagaggcggttgccgggcgcattatcgactccggagccaaactggtgatcacggcagatgaaggggttcgcgccgggcgaaccattccactcaagcgcaacgtcgacgaagcgctgcagcatcctcaggtcaacagcgtgcaccatgtcgtggtattccgccgtaccggcggcgccggcgaatgggacagcggccgcgatcgttggtggcatgagctgatggcccaggccgatgaacactgccccgcggtggagatgaacgccgaagatccgctgtttattctgtatacctccggatcgaccggtaaaccgaagggcgtactgcacagtaccggcggctatctggtatacgcggcgaccacctttaagtatgtgtttgactaccatcccggcgatatttactggtgtacggcggacgtcggctgggtcaccggccacagctatctgctgtatggccccttggccaacggcgccataacgctgatgtttgagggggtccccaactatcccggcattaatcgcctcagccagatcgtagacaagcatcaggtcaatattctgtataccgcgccgacggcgatccgcgcgctgatggcagagggacagcgcgccgtcgccgacacccagcggacctcgctgcgcataatgggatcggtcggtgagccgatcaaccccgaggcctgggagtggtattaccataccatcggcaacggccactgcccgatcatggatacctggtggcagaccgaaaccggcggctttatgatcaccccgctgcccggagccaccgagcttaaagccggatcggccacccgccccttttttggcgtacagcccgccctggtcgataacagcggggagatcctggagggcgccagtgaaggcaatctggtgatcctggactcttggcccgggcaggcacgtacgctgtttggcgcccatgaacgctttgaacagacctacttctccacctttaaggggatgtatttcagcggcgacggtgcccgacgtgacgaagacggctattactggataaccggtcgcgtcgacgatgtactcaacgtctcaggacaccgcctgggcacagcggagatcgaatctgcgctggtcgcgcacccgaagatcgccgaggcggccgtcgtcgggatcccccacagcattaaagggcaggcaatctatgcctatatcacgctgaacgtaggcgaggaaccatcgcccgcgctgtacgccgaggtccgagactgggtacgtaaagagatcggtcccatcgccacaccggatatcctgcactggaccgatgcgctgcccaaaactcgctccggcaagatcatgcgccgcatcctgcgcaaaattgccagcggcgatatcagcaatctgggcgatacctctacgctggccgatcctggcgtcgtagaaaaactgctggaggagaaacaggctatgcagccgcgttaa

SEQ ID NO: 151439 - protein, 651 aa, Edwardsiella tarda EIB202
MSQIHTYPVPADIARHAFINAEMYREMYLASVEDPEAFWAEQGQIISWITPYSRVKNTSFDPGHINIRWFEDGTLNLAANCLDRHLAERGEQTAIIWEGDDPQESRRVTYRQLHGEVCRFANVLKSLQVEKGDVVAIYMPMVVEAAVAMLACARIGAVHSVIFGGFSPEAVAGRIIDSGAKLVITADEGVRAGRTIPLKRNVDEALQHPQVNSVHHVVVFRRTGGAGEWDSGRDRWWHELMAQADEHCPAVEMNAEDPLFILYTSGSTGKPKGVLHSTGGYLVYAATTFKYVFDYHPGDIYWCTADVGWVTGHSYLLYGPLANGAITLMFEGVPNYPGINRLSQIVDKHQVNILYTAPTAIRALMAEGQRAVADTQRTSLRIMGSVGEPINPEAWEWYYHTIGNGHCPIMDTWWQTETGGFMITPLPGATELKAGSATRPFFGVQPALVDNSGEILEGASEGNLVILDSWPGQARTLFGAHERFEQTYFSTFKGMYFSGDGARRDEDGYYWITGRVDDVLNVSGHRLGTAEIESALVAHPKIAEAAVVGIPHSIKGQAIYAYITLNVGEEPSPALYAEVRDWVRKEIGPIATPDILHWTDALPKTRSGKIMRRILRKIASGDISNLGDTSTLADPGVVEKLLEEKQAMQPR

SEQ ID NO: 151440 - DNA, 1986 bp, Leptospira interrogans serovar Copenhageni str. Fiocruz L1-130
  CDS (1)..(1986): transl_table=11
ttgccgaattcggaggaagttatggcaaaagaacgagtcgtttcaccgtccgcagaatttaaaaagaatgcgaacattagtcttaagaattataaatctctttataaagaatccatagaaaacccgaacaagttttgggcaagagaagccaaccgcttgatttggtttaaaaaatggactaaagttttaagccacgattttaaaaacgcaaaagtagaatggtttaaaggtggcaaactcaatgtttcttacaactgtttagatcgtcatatcagcactcccttaaaaaacaaagccgctttaatttgggaaggtgataatcccacagaatctagagtgcttacctattatgatgtttacagagaagtaaatcgttttgcgaacattcttaaaaaatttggagtaaaaaaaggggatcgggttttggtttatctacctatgattccagaattagctattacaattcttgcatgtactcgaatcggtgcgatccattctgtcgtgtttggcggattttccccggaagcccttcaaagtagaatcgacgattgtaaaccaaagttagttgtcactgcggacggaggttttagaggtggaaagccaatcgagttgaaaaaaaacgtggaccttgctctcgaaaagtccaaagaaaaagtaaaaaccgtaatcgtagttcgtcgtactggaaacgagtccggtcttacttggaaagacggtcaagactactggtatcattttttgatgaacgatccggaactttctgcatattgtaagccggaagagatggatgctgaagatcctctttttatcctttatacttccggttcgactggaaaaccaaagggagttttacatactaccggaggttatcttttaggagctaatttaacatttcattatgtatttgatattaaacccgaggacacgtattggtgtaccgctgatattggttgggtaactggtcattcttatttagtttatggcccgttgtccaacggagcttcttccgtaatgtttgaaggggttccttcttatccggacgctgggagattttgggacgttatcgataaatacggtgtaaatatattttatacggcaccgactgcaattcgggctttgatgagagaaggattaaatcatattcaaaaaagagatttaagttctcttcgtcttttgggttctgttggagaaccgatcaatccagaagcttgggaatggtattttaaaaatataggaaaaggaaaatgtcctatcgtggatacttggtggcagacagaaacaggatcgattatgattacggctcttccgggagcgattcctcagaagccaggttctgcgacgttgccattttttggagtacagcctgttttagtggataacgatggtaaggagattactgataagggagaagtttctggaaatctatgtatcaaaggtccttggccttcaatgatgcgcggagtttacggagatcctaaacgattttttgaaacttacttttctcagtttaaaggatattattttacaggagacggagcgcgtagagataaagacggatatttttggatcactggaagagtggacgatgtgattaacgtttccggtcataggatcggaagcgcagaagtggaaagtgcactcgttgaaaataaatctgttgccgaagccgctgtagtaggttttccacacgacatcaaaggtcagggaatttacgcctacgttacggttaaagaaggtgttacgactaacgatgttttgaaaaaagagcttatctcaactgtggaaaaaatgatcggtaaaattgcaaggccggacgtgattcattgggctccaggtcttccaaaaacgcgttctggaaaaattatgagaaggattttaagaaaaattgcttctggagaatttgaaggtttaggagatacttctactcttgcagatccatctgtggttcaaaaattgatcgaagataaaaagaaatttcacagttaa

SEQ ID NO: 151441 - protein, 661 aa, Leptospira interrogans serovar Copenhageni str. Fiocruz L1-130
MPNSEEVMAKERVVSPSAEFKKNANISLKNYKSLYKESIENPNKFWAREANRLIWFKKWTKVLSHDFKNAKVEWFKGGKLNVSYNCLDRHISTPLKNKAALIWEGDNPTESRVLTYYDVYREVNRFANILKKFGVKKGDRVLVYLPMIPELAITILACTRIGAIHSVVFGGFSPEALQSRIDDCKPKLVVTADGGFRGGKPIELKKNVDLALEKSKEKVKTVIVVRRTGNESGLTWKDGQDYWYHFLMNDPELSAYCKPEEMDAEDPLFILYTSGSTGKPKGVLHTTGGYLLGANLTFHYVFDIKPEDTYWCTADIGWVTGHSYLVYGPLSNGASSVMFEGVPSYPDAGRFWDVIDKYGVNIFYTAPTAIRALMREGLNHIQKRDLSSLRLLGSVGEPINPEAWEWYFKNIGKGKCPIVDTWWQTETGSIMITALPGAIPQKPGSATLPFFGVQPVLVDNDGKEITDKGEVSGNLCIKGPWPSMMRGVYGDPKRFFETYFSQFKGYYFTGDGARRDKDGYFWITGRVDDVINVSGHRIGSAEVESALVENKSVAEAAVVGFPHDIKGQGIYAYVTVKEGVTTNDVLKKELISTVEKMIGKIARPDVIHWAPGLPKTRSGKIMRRILRKIASGEFEGLGDTSTLADPSVVQKLIEDKKKFHS

SEQ ID NO: 151442 - DNA, 1962 bp, Dickeya dadantii Ech586
  CDS (1)..(1962): transl_table=11
atgagccaatataataaacaccctatacctaccgcgattgcggagaacgccttaatcaccgccgaacaatataaaaagatgtatcaggaatcggtgcaagatcctgattctttctggcggaaacaaggcaagatcgtcgattggatcaaaccttatcagcaggtcaaaaacacctcttttgacccaggccatgttcgcattcgctggttcgaagacggtacgctcaatgtcgcggcgaactgtctcgatcgtcaccttgccacgcaaggtgatcaaaccgcgatcatctgggaaggtgacgatgccaaagaaagtaagaaagtcacctaccgcgagttgtatcaggcggtctgccgttttgccaacgtattaaaagcaaaagggatccgcaaaggtgatgtggtcgccatttatatgcctatggtgccggaagctgccgtcgcgatgctggcttgtgcccgtatcggtgccgtgcactcggttatcttcggggggttctcccctgaatcgatcgccgggcgcatcgtcgattccagcgccaaactggtgatcaccgccgatgaggggatccgcgccgggcgtacgatcccgctgaaaaagaacattgatgaagcactgcgtaaccctgctgttaccagcgtcagcaatgtcatcgttttccagcgcaccggcaaacccggtaactggcaggatggccgcgatctatggtggcatgagttggttgctcaggcgagcgatgactgcccgccggaagaaatgaatgcagaagaccccctgtttattctgtatacctccggctcaaccggtaaacccaaaggggttctgcacacaaccggtggctatctggtctacgccgccacaacctttaagtatgtctttgattaccatcccggcgacgtgtattggtgtaccgccgacgttggttgggtcactggccacagctatttgttgtacggcccgctggcctgcggtgccatcacgttgatgttcgaaggcgtacctaactggccaaccgccagccggatgggccaggtcgtagataaacatcaggtcaatattctgtataccgctcccactgctattcgcgcattgatggcagacggcgacaaagctatcgagggcacctcacgccagtcgctcaaaatcatgggctcggtgggggaacccatcaacccggaagcctgggaatggtacttcaagaaaattggtaacagccgctgcccaatcgttgatacctggtggcagacagagaccggaggattcatgatcaccccgctgcccggtgcgattgaagccaaacccggttctgcaacgttgccgtttttcggggtgcaaccggccctggtggataacgtcggtaacccgcaagacggtgcctgcgaaggcaatctggtgattactgactcctggccgggtcaggctcgcacgctgtttggtgaccatgaccgttttgaacagacctacttctctacgttcaaaggcatgtatttcagcggtgacggcgcacgccgtgatgaagacggttattactggataaccggccgcgtagacgacgtgctgaacgtatccggacaccgtctggggacagcagaaattgagtcggcactagtgtcacacccgaaaatcgccgaagctgcggtggttggcattccgcacagtctcaagggacaggctatctatgcctacatcacgcttaatcatggcgaagagcccaccagcgagttgtacaccgaggtgcgcaactgggtgagaaaagagatcggcccaattgcaactcccgatattctgcactggaccgatgcactaccgaaaacccgatccggcaaaatcatgcgccgtattctgcgcaaaattgcagccggagataccagcaatctgggtgatatttctaccctcgccgatcctggcgtagtagagaaattgctggaagaaaaacaagccatgggcaacacaccgtcttaa

SEQ ID NO: 151443 - protein, 653 aa, Dickeya dadantii Ech586
MSQYNKHPIPTAIAENALITAEQYKKMYQESVQDPDSFWRKQGKIVDWIKPYQQVKNTSFDPGHVRIRWFEDGTLNVAANCLDRHLATQGDQTAIIWEGDDAKESKKVTYRELYQAVCRFANVLKAKGIRKGDVVAIYMPMVPEAAVAMLACARIGAVHSVIFGGFSPESIAGRIVDSSAKLVITADEGIRAGRTIPLKKNIDEALRNPAVTSVSNVIVFQRTGKPGNWQDGRDLWWHELVAQASDDCPPEEMNAEDPLFILYTSGSTGKPKGVLHTTGGYLVYAATTFKYVFDYHPGDVYWCTADVGWVTGHSYLLYGPLACGAITLMFEGVPNWPTASRMGQVVDKHQVNILYTAPTAIRALMADGDKAIEGTSRQSLKIMGSVGEPINPEAWEWYFKKIGNSRCPIVDTWWQTETGGFMITPLPGAIEAKPGSATLPFFGVQPALVDNVGNPQDGACEGNLVITDSWPGQARTLFGDHDRFEQTYFSTFKGMYFSGDGARRDEDGYYWITGRVDDVLNVSGHRLGTAEIESALVSHPKIAEAAVVGIPHSLKGQAIYAYITLNHGEEPTSELYTEVRNWVRKEIGPIATPDILHWTDALPKTRSGKIMRRILRKIAAGDTSNLGDISTLADPGVVEKLLEEKQAMGNTPS

SEQ ID NO: 151444 - DNA, 1947 bp, Allochromatium vinosum DSM 180
  CDS (1)..(1947): transl_table=11
atgtcggaagaaaaggtctatccggttcctgcggcgatcgccgccaaggcccacatcaacgccgagcagtatgccgcgatgtatcagcgctcgatcgacgatccggccggcttctgggccgagcaggccgagcagttcgtgacctggagccggaagtgggactcggtcatggactacagctatcaggccgacgatctgcacatcaactggttccagggcggcaagctcaacgtctcctacaactgtctggaccgtcatctggccacccgtggcgatcaggtcgccatcatctgggaaggcgacgatccgaacgtggaccgcaagatcacctatcgcgagctgcacgaggaagtctgccgtctggccaacgtcctcaagtcgcgcggcgtccagaagggcgaccgggtctgcatctatctgccgatgatccccgaggcggcggtggccatgctggcctgtacccgcatcggcgcggtgcactcgatcgtcttcggcggcttctcgcccgactcgctgcgcgaccgcgtgctcgactccgagtgcaaactggtcatcacctcggatgagagcgtgcgcggcgggcgtcacgtcccgctcaagaagaacgccgacatcgccatgcgcgagtgcccgaacgtcgacaccgtgctcgtggtgcgccgcaccggcggcaacgtcgactgggtcgagggccgcgatgtctggtatcacgaggctgtcgccgcggccgccaccgagtgcgcgcccgaggagatggacgccgaagatcccttgttcatcctctacacctccggctccaccggcaagcccaagggcgccctgcacaccaccggcggctatctggtctatgccgccatgacccacaagtacaccttcgactaccaggacggcgagatctactggtgcaccgccgacgtcggctgggtcacgggtcacacctacatcgtctatggcccgctggccaacggcgccacctcggtcatgttcgagggcatcccgaactatccggacatgtcgcgcttctgggacgtggtcgacaagcacaatgtctccatcttctacaccgccccgaccgcgatccgctcgctgatgcgcgccggcgaggagccggtcaagaagacttcgcgccagtcgctgcgcatcctcggctcggtcggcgagccgatcaaccccgaggcctgggagtggtaccacaacgtcgtcggtgacggacgctgcccgatcgtcgacacttggtggcagaccgagaccggcggccatctgatcactccgctgccgggcgccacggcactcaagccgggttcggccacccgccccttcttcggcgtggtgccggcgctggtcgatccgtcgacgggcgtgcgcatcgagggcgcggctgaaggcgcacttgtcatctgccagccctggcccggtcagatgcgcaccgtctatggcgatcatcagcgctacgtcgacacctacttcaagcagtatccgggctactacttcaccggtgacggcgcgcgccgtgatgccgacggttactactggatcaccggccgcatcgacgacgtgctcaacgtctcgggccaccgtctcggcaccgccgagatcgagtcggcgctggtgctgcatccgcacgtcgccgaggcggcggtggtcggctatccgcacgacctcaagggtcagggcatctatgcctatgtcaccccgatggccggtgtcgagccgaccgacgagctgaagaaggaactggtatcactggtgcgcggcgagatcggcccgatcgccatcgtcgacatcatccagtgggcgccgggtctgcccaagacccgctcgggcaagatcatgcgccgcatcctgcgcaagatcgccgccaacgagatcgattcgctcggtgacacctccaccctggccgatccgaccgtggtcgaggatctgatcgagaaccgcgccgtcaagtaa

SEQ ID NO: 151445 - protein, 648 aa, Allochromatium vinosum DSM 180
MSEEKVYPVPAAIAAKAHINAEQYAAMYQRSIDDPAGFWAEQAEQFVTWSRKWDSVMDYSYQADDLHINWFQGGKLNVSYNCLDRHLATRGDQVAIIWEGDDPNVDRKITYRELHEEVCRLANVLKSRGVQKGDRVCIYLPMIPEAAVAMLACTRIGAVHSIVFGGFSPDSLRDRVLDSECKLVITSDESVRGGRHVPLKKNADIAMRECPNVDTVLVVRRTGGNVDWVEGRDVWYHEAVAAAATECAPEEMDAEDPLFILYTSGSTGKPKGALHTTGGYLVYAAMTHKYTFDYQDGEIYWCTADVGWVTGHTYIVYGPLANGATSVMFEGIPNYPDMSRFWDVVDKHNVSIFYTAPTAIRSLMRAGEEPVKKTSRQSLRILGSVGEPINPEAWEWYHNVVGDGRCPIVDTWWQTETGGHLITPLPGATALKPGSATRPFFGVVPALVDPSTGVRIEGAAEGALVICQPWPGQMRTVYGDHQRYVDTYFKQYPGYYFTGDGARRDADGYYWITGRIDDVLNVSGHRLGTAEIESALVLHPHVAEAAVVGYPHDLKGQGIYAYVTPMAGVEPTDELKKELVSLVRGEIGPIAIVDIIQWAPGLPKTRSGKIMRRILRKIAANEIDSLGDTSTLADPTVVEDLIENRAVK

SEQ ID NO: 151446 - DNA, 1941 bp, Azospirillum sp. B510
  CDS (1)..(1941): transl_table=11
atgaccgacaccagcttctttccggtgaagcccgagatcgcggcgaccgcccacgtgaatgcggaggcctatgcccgcatgtacgagcagtcggtcaaggaccccgaggcgttctggggcgagcagggcaagcggctcgactggatcaagccctattccaaggtgaaggacgtcgatttcaacggcgacgtccacatccgctggttccaggacggcacgctgaacgtgtcggccaactgcatcgaccgccatctggcgacccgcggcgaccagaccgcgatcctgttcgaaggcgacgaccccggcgtttccaaggccatcacctacaaggaactgcacgagaaggtctgccgcctcgccaatgtcctgaagaagaacggcgtcaggaagggtgaccgcgtcaccatctatctgccgatgatcccggaggccgcctatgcgatgctggcctgcacccgcatcggcgccatccattccatcgtcttcggcggcttctcccccgacagcctgaaggaccgcatcgtcgactgcgacagccatttcgtcatcacgtcggacgagggcctgcgcggcggccgcaaggtgccgctgaaggccaacgccgacaaggcggtggccggcgcgccgatggtccgccacgtcctggtggtcaagcacaccggcggcgccgtcgcctggaccgagggccgcgacctctggtatcacgaggagatcgagagcgtctccgccgactgcccgccggaggagatgagcgccgaggatccgctgttcatcctctacacttccggttcgaccggcaagccgaagggcgtgctgcacaccaccggcggctatctcgtctatgcgtcgatgacccaccagtatgtcttcgactacaaggagggcgaggtctattggtgcaccgccgacgtgggctgggtcaccggtcacagctacatcgtctacggtccgcttgccaacggcgccaccacgctgatgttcgaaggcatcccgacctacccggacgtttcgcgcttctggcaggtcatcgacaagcacaaggtcaacatcttctacaccgcgcccaccgccatccgctcgctgatgcgcgaaggcgaaggcccggtgaagaacacctcgcgcgcctcgctccgcgttctggggtcggtcggcgagccgatcaatccggaagcctggctgtggtattacaacgtggtcggcgacgcccgctgcccgatcgtcgacacctggtggcagaccgagaccggcggcatcctgatcaccccgctggtcggcgccatcggccagaagccgggctcggcgaccaagcccttcttcggcgtccagccggtcgtcgtcgacaatgagggccagatcctggagggcgagaccgagggcaacctctgcatcgccgacgcctggcccggcatgatgcgcaccgtctatggcgaccatgagcgcttcgtccagacctacttctcgaccttcccgggcaagtatttcaccggcgacggctgccgccgcgacgccgacggctattactggatcaccggccgcgtcgacgacgtcatcaacgtgtccggccaccgcatgggcaccgccgaggtcgaaagcgcgctggtcgcccatccgaaggtcgccgaggcggcggtcgtcggctatccgcacgacctcaagggccagggcatctacgcctatgtcacgctgaacgccggcgagaccccgacggaggagctgcgcaaggagctggtcgcctgggtccgcaaggagatcggcccgatcgcctcgcccgacctgatccagtgggctcccggcctgccgaagacccgctccggcaagatcatgcgccgcatcctgcgcaagatcgccgcgaacgagcatgacagcctgggcgacacctcgacgctggccgatccgggcgtcgtcaccgacctgatcgacaaccgcatgaacaacggttga

SEQ ID NO: 151447 - protein, 646 aa, Azospirillum sp. B510
MTDTSFFPVKPEIAATAHVNAEAYARMYEQSVKDPEAFWGEQGKRLDWIKPYSKVKDVDFNGDVHIRWFQDGTLNVSANCIDRHLATRGDQTAILFEGDDPGVSKAITYKELHEKVCRLANVLKKNGVRKGDRVTIYLPMIPEAAYAMLACTRIGAIHSIVFGGFSPDSLKDRIVDCDSHFVITSDEGLRGGRKVPLKANADKAVAGAPMVRHVLVVKHTGGAVAWTEGRDLWYHEEIESVSADCPPEEMSAEDPLFILYTSGSTGKPKGVLHTTGGYLVYASMTHQYVFDYKEGEVYWCTADVGWVTGHSYIVYGPLANGATTLMFEGIPTYPDVSRFWQVIDKHKVNIFYTAPTAIRSLMREGEGPVKNTSRASLRVLGSVGEPINPEAWLWYYNVVGDARCPIVDTWWQTETGGILITPLVGAIGQKPGSATKPFFGVQPVVVDNEGQILEGETEGNLCIADAWPGMMRTVYGDHERFVQTYFSTFPGKYFTGDGCRRDADGYYWITGRVDDVINVSGHRMGTAEVESALVAHPKVAEAAVVGYPHDLKGQGIYAYVTLNAGETPTEELRKELVAWVRKEIGPIASPDLIQWAPGLPKTRSGKIMRRILRKIAANEHDSLGDTSTLADPGVVTDLIDNRMNNG

SEQ ID NO: 151448 - DNA, 1959 bp, Escherichia coli O55:H7 str. CB9615
  CDS (1)..(1959): transl_table=11
atgagtcaaattcacaaacacaccattcctgccaacatcgcagaccgttgcctgataaaccctcagcagtacgaggcgatgtatcaacaatctattaacgcacctgataccttctggggcgaacagggaaaaattctcgactggatcaaaccgtaccagaaggtgaaaaacatctcctttgcccccggtaatgtgtccattaaatggtacgaggacggcacgctgaatctggcggcaaactgccttgaccgccatctgcaagaaaacggcgatcgtaccgccatcatctgggaaggcgacgacgccagccagagcaaacatatcagctataaagagctgcaccgcgacgtctgccgcttcgccaataccctgctcaagctgggcattaaaaaaggtgatgtggtggcgatttatatgccgatggtgccggaagccgcggttgcgatgctggcctgcgcccgtattggcgcggtgcattcggtaattttcggtggcttctcgccggaagcggttgccgggcgcattatcgattccaactcacgactggtgatcacttccgacgaaggcgtgcgcgccgggcgtagtattccgctgaagaaaaacgttgatgacgcactaaaaaacccgaacgtcaccagcgtagagcatgtggtggtactgaagcgtactggcgggaaaattgactggcaggaagggcgcgacctgtggtggcacgaccaggttgagcaagccagcgatcagcaccaggcggaagagatgaacgccgaagatccgctgtttattctctatacctccggttctaccggaaaaccaaaaggcgtactgcacactaccggcggttatctggtgtacgcggcgctgacctttaaatatgtctttgattatcatccgggcgatatctactggtgcaccgccgatgtgggctgggtgaccggacacagttatttgctgtacggcccgctggcctgcggcgcgaccacgctgatgtttgaaggcgtaccgaactggccgacgcctgcccgtatggcacaggtggtggacaagcatcaggtcaatattctctataccgcgcccacggcgattcgcgcgctgatggcggaaggcgataaagcgatcgaaggcaccgaccgttcgtcgctgcgcattctcggttccgtgggcgagccaattaacccggaagcgtgggagtggtactggaaaaaaatcggcaacgagaaatgtccggtggtcgatacctggtggcagaccgaaaccggcggtttcatgatcaccccgctgcctggcgctaccgagctgaaagccggttcggcaacacgtccgttcttcggcgtgcaaccggcgctggtcgataacgaaggtaacccgctggaaggggctaccgaaggtagcctggtgatcaccgactcctggccgggtcaggcgcgtacgctgtttggcgatcacgaacgttttgagcagacctatttttccaccttcaaaaatatgtatttcagcggcgacggcgcgcgtcgtgatgaagatagctattactggatcaccgggcgtgtggacgatgtgctgaacgtctccggtcaccgtctgggaacggcggagattgagtcggcgctggtggcgcatccgaaaatcgccgaagccgctgtcgtcggtattccgcacaatattaaaggtcaggcgatctacgcctacgtcacgcttaatcacggggaggaaccgtcaccagaactgtacgcagaagtccgcaactgggtgcgtaaagagattggcccgctggcgacgccagacgtgctgcactggaccgactccctgcctaaaacccgctccggcaaaattatgcgccgtattctgcgcaaaattgcggcgggcgataccagcaacctgggcgatacctcgacgcttgccgatcctggcgtagtcgagaagctgcttgaagagaagcaggctatcgcgatgccatcgtaa

SEQ ID NO: 151449 - protein, 652 aa, Escherichia coli O55:H7 str. CB9615
MSQIHKHTIPANIADRCLINPQQYEAMYQQSINAPDTFWGEQGKILDWIKPYQKVKNISFAPGNVSIKWYEDGTLNLAANCLDRHLQENGDRTAIIWEGDDASQSKHISYKELHRDVCRFANTLLKLGIKKGDVVAIYMPMVPEAAVAMLACARIGAVHSVIFGGFSPEAVAGRIIDSNSRLVITSDEGVRAGRSIPLKKNVDDALKNPNVTSVEHVVVLKRTGGKIDWQEGRDLWWHDQVEQASDQHQAEEMNAEDPLFILYTSGSTGKPKGVLHTTGGYLVYAALTFKYVFDYHPGDIYWCTADVGWVTGHSYLLYGPLACGATTLMFEGVPNWPTPARMAQVVDKHQVNILYTAPTAIRALMAEGDKAIEGTDRSSLRILGSVGEPINPEAWEWYWKKIGNEKCPVVDTWWQTETGGFMITPLPGATELKAGSATRPFFGVQPALVDNEGNPLEGATEGSLVITDSWPGQARTLFGDHERFEQTYFSTFKNMYFSGDGARRDEDSYYWITGRVDDVLNVSGHRLGTAEIESALVAHPKIAEAAVVGIPHNIKGQAIYAYVTLNHGEEPSPELYAEVRNWVRKEIGPLATPDVLHWTDSLPKTRSGKIMRRILRKIAAGDTSNLGDTSTLADPGVVEKLLEEKQAIAMPS

SEQ ID NO: 151450 - DNA, 1956 bp, Erwinia amylovora CFBP1430
  CDS (1)..(1956): transl_table=11
atgagccattcacatatttaccctatcccggccaacattgcgcaaaatacgctgataaatccccggcagtatcacttaatgtatcagcaatcgatacaggaccccgaggcattttggggagagcaaggcaagatcctggactggataaaaccttacgctacggtaaagaacacctcctttgcccctggcaatatctccattcgctggtatgaggacggcacgcttaacctggccgccaactgcctcgaccggcatctggcagcgcgcggcgatcgcccggcaattatctgggaaggggatgacgccagcgaaagcaaaaccattacttaccgcgaactgcatcacgacgtatgtcgctttgccaatgccctgcaagcgctgggaatcaaaaagggtgatgtggtggcgatctatatgccaatggtgccagaagccgctgtggcaatgctggcctgcgcgcgcatcggtgccgtgcattcggttatctttggcggtttttcaccggaagccgtcgccgggcgaattatcgacagtcatgcccgtctggtgatcaccgccgacgaaggcgtgcgtgccggacgcaccattccgctgaagcaaaacgtcgatgatgctctgactgatcgcggggtgaccagcgtcgacaaagtcattgtcctcaggcgcaccggcaaagatattcactggcaccacggccgtgacctttggtggcatgagcggatgaacagtgccagcgagcagcatcagcctgaagagatgaacgcggaagacccattattcatcctgtatacctccggttctaccggcaaaccaaagggggtgctgcataccactggcggttatctggtttatgccgcgaccactttcaaatacgttttcgattatcacccggaggatatctattggtgtaccgccgatgtcgggtggattaccggacacagttacctgctgtacggtccgctggcctgtggtgccaccacgctgatgtttgaaggagtgcctaactggccaaaaccaagtcgtatggccgaagtggtggataaacaccaggtgaccatcctgtatacggcgcccacggcagtgcgcgcgttaatggccgaaggggataaagcgattgccggcacccatcgttccagcctgcgcatccttggctcagtaggtgaaccgatcaacccggaggcctgggagtggttccatcaaaaaatcggtaatggccgatgccccatttcagatacctggtggcagacggaaacaggcggttttatgatcgctccgctccccggagccaccgcgctgaaacccggatcggctacccatccattttttggcgtacagccagcgctggtcgataacgaaggtaatctgcaggaaggtgccagcgaaggcaatctggttatcgttgattcctggcctggccaggcgcgcacgctatttggcgatcatcagcgctttgagcagacctacttctccaccttcaaaaaccgctatttcagcggcgacggcgctcgccgtgatgaagacggttattactggataaccggacgcgtcgacgacgtactgaatgtttccggtcatcggctgggcacggcagagatcgagtccgcgctggtctcgcatccgaaaattgctgaagccgccgtggtcgggattccacacgctttaaaaggccaggcaatctacgcctatataacgctgaacagtggtgaagaaccttcgccgcagctgtacagcgaagtgcgtgcctgggtgcgtaaagagattggccccattgctacgccggacgtgctgcactggaccgattcattacccaaaacccgctcggggaaaattatgcgccgtattttacgcaaaattgccaccggcgataccagcaatctcggcgatacttctacgctggccgatcccggcgtggtagacaaattactcgaagaaaaactgtcgattaaaatgccataa

SEQ ID NO: 151451 - protein, 651 aa, Erwinia amylovora CFBP1430
MSHSHIYPIPANIAQNTLINPRQYHLMYQQSIQDPEAFWGEQGKILDWIKPYATVKNTSFAPGNISIRWYEDGTLNLAANCLDRHLAARGDRPAIIWEGDDASESKTITYRELHHDVCRFANALQALGIKKGDVVAIYMPMVPEAAVAMLACARIGAVHSVIFGGFSPEAVAGRIIDSHARLVITADEGVRAGRTIPLKQNVDDALTDRGVTSVDKVIVLRRTGKDIHWHHGRDLWWHERMNSASEQHQPEEMNAEDPLFILYTSGSTGKPKGVLHTTGGYLVYAATTFKYVFDYHPEDIYWCTADVGWITGHSYLLYGPLACGATTLMFEGVPNWPKPSRMAEVVDKHQVTILYTAPTAVRALMAEGDKAIAGTHRSSLRILGSVGEPINPEAWEWFHQKIGNGRCPISDTWWQTETGGFMIAPLPGATALKPGSATHPFFGVQPALVDNEGNLQEGASEGNLVIVDSWPGQARTLFGDHQRFEQTYFSTFKNRYFSGDGARRDEDGYYWITGRVDDVLNVSGHRLGTAEIESALVSHPKIAEAAVVGIPHALKGQAIYAYITLNSGEEPSPQLYSEVRAWVRKEIGPIATPDVLHWTDSLPKTRSGKIMRRILRKIATGDTSNLGDTSTLADPGVVDKLLEEKLSIKMP

SEQ ID NO: 151452 - DNA, 1947 bp, Coraliomargarita akajimensis DSM 45221
  CDS (1)..(1947): transl_table=11
atggagacggtctcgcacgagcaccgtaagttttcgcccctacctgaattcgccgagcaggcgcgcatcggcagcatggaggcctatgaggaactctatgcacgcagcattgccgacccggaagcattttgggccgaggcggcccaagagttacactggttcaagccatgggacagtgtcctggatgagtcggaaaagcctttcttcaagtggtttgatggcagtcggacgaatttatcctacaactgtttggatcgtcatgttcttgaagggcgtggtgcaaagactgcgattcactgggaaggcgagccgggcgataagcgtgcacttagctattctgagttgctggcagaggtgtgtcgtttcgctaacgtcatgaagcgcttgggagtgcagaagggggatcgagttgcgatttacttgccgatgattccggagttggcggttgcggtcctcgcttgtgcccgaattggtgcggtgcactcggtgatcttcgcgggtttctcggctgactctatccgggaccgtgtgctggatagtcaggctcggatggtgatcaccggcgacgcaggctaccgccgtggtaagattttggagctgaagtcagttgtcgatgaaggtgtcgccaattgtgattgtatttccgaggttttggtggttcgtcgcgagtccacagttctaggagcctgccagttacaggaggggcgtgatcattggtatcacgaattggctgcggaggtgtcggacgagtgccctgcggaagagatggaagccgaagatttgctctttttgctttatacgagcggtaccaccggtaagcccaagggcatcatgcataccactgctggttaccaagtgtatagctactacaccgcaaagtatgtcttcgatctgagggaagatgatatctactggtgtactgcggatattggctggatcaccggacacagttatatcgtctatggtatcctgcagaacggtgcgacgcagttgatgtatgagggcgccccgaatcatccggatccgagccgcttctggcaattggtcgaagcgtataatgtgacgattttctacacggcaccgacagccattcgggcctttatgaagtggggcgatgattgggtcaccaagtacgacctgagttcacttcgcttgttgggtacggtgggggagccgatcaatcctgaagcatggatgtggtatcatgagcgcatcggtggcgggcgctgtccaatcgtagatacctggtggcagactgaaaccggcgggcacatgctgactccaattcccggggcggtgccgaccaagccggggtgtgcgacgctacccttctttggtattgagccattggtcttatcggaggacgatgacgaagaggttgcggttggtattttggcgatcaagaaaccttggccggggattatgcgtggggtgtatggtgacccgcaacgctacaaggacacctattggtgtaagtggaatggagcgtattactttccaggtgatggggcgcgtcgtgacgaagatggttatctctggatccttgggcgtgtggatgatgtcgtgaatgtctctgggcaccgtattgggaccgccgaacttgaaagcgtatttgttgaacatccggatgtcgctgagtccgcggtcatcggtgtaccgcatgagatcaaaggacagggcttgatggcttttgtgacggttatcgaggggcgtgagcatgatgcccatttgcgtcatgagttggttgcgatggtggataagagcattggcaaatttgcacgtcccgagaaaattatcttttcctctgatttgcccaaaacgcgttctggtaaaatcatgcgccgcttgctgcgtgatatcgctgaaggtcgagctttgggaaataccaccacacttgcagatcccggaattgtggaagccttgcagcatcaatttaatgcgtcttag

SEQ ID NO: 151453 - protein, 648 aa, Coraliomargarita akajimensis DSM 45221
METVSHEHRKFSPLPEFAEQARIGSMEAYEELYARSIADPEAFWAEAAQELHWFKPWDSVLDESEKPFFKWFDGSRTNLSYNCLDRHVLEGRGAKTAIHWEGEPGDKRALSYSELLAEVCRFANVMKRLGVQKGDRVAIYLPMIPELAVAVLACARIGAVHSVIFAGFSADSIRDRVLDSQARMVITGDAGYRRGKILELKSVVDEGVANCDCISEVLVVRRESTVLGACQLQEGRDHWYHELAAEVSDECPAEEMEAEDLLFLLYTSGTTGKPKGIMHTTAGYQVYSYYTAKYVFDLREDDIYWCTADIGWITGHSYIVYGILQNGATQLMYEGAPNHPDPSRFWQLVEAYNVTIFYTAPTAIRAFMKWGDDWVTKYDLSSLRLLGTVGEPINPEAWMWYHERIGGGRCPIVDTWWQTETGGHMLTPIPGAVPTKPGCATLPFFGIEPLVLSEDDDEEVAVGILAIKKPWPGIMRGVYGDPQRYKDTYWCKWNGAYYFPGDGARRDEDGYLWILGRVDDVVNVSGHRIGTAELESVFVEHPDVAESAVIGVPHEIKGQGLMAFVTVIEGREHDAHLRHELVAMVDKSIGKFARPEKIIFSSDLPKTRSGKIMRRLLRDIAEGRALGNTTTLADPGIVEALQHQFNAS

SEQ ID NO: 151454 - DNA, 1953 bp, Shewanella violacea DSS12
  CDS (1)..(1953): transl_table=11
atgagcacacagtctctctacaaagttcccagcgaaatagctgaaaacgcacacataaacgaagaaaaatacaaaaagatgtatcaagagtcgattgtgaatcctgaaggtttctggagagagcacggccaacgtatagactggataaaaccattcactaaggtaaagaaaacctcattcgacgatcataacctgtctatcaattggttctatgacggcacactcaacgcctcggctaactgcttagaccgtcaccttgaaaaaaatgccgacaaggtcgccataatttgggaaggcgatgatgctaaagatcaacgcagcgttacttatggtgaattacaccaggatgtgtgtaagtttgccaatgcattaaaaagccaaggtgtgagacgtggcgatgtggtcactatttacatgcccatggtcccggaagctgccgttgccatgttggcctgtgctcgcattggtgcggttcattccgtgatatttggtggtttctccccggactcaattgcaacacgcgtcatagatggtaactctaaggttatcgtcaccgccgatgaaggcgtgcgtgccggtcgcatcattccccttaaggccaatatcgatcaggctctagctaatccagatgtgacttgtgttgagcgtgtcatcgttctcgagcgtactggtggtaatatcaactggcaagaaggccgtgatatcaagtgggatactgtcatggagacagcatctgagcattgcgtacccgaagagatgggcgccgaagatcccctattcctgctttatacttcaggctcgactggtaaccctaaaggtgtgctacataccacaggtggttacatggtctacgcgtccatgacccatgaatatgtgttcgactataaagacggtgaagtttactggtgtaccgcagatgtgggttggatcaccggccactcttatatggtctatggccccctagccaatggcgccaccgtactgatacacgaaggggtacctaactacccgacaccttctcgtctgggtgaaattgtcgaccgccataaggtcaacatactctataccgcccccactcttattcgcgccctgatggctgaaggaaaagagcagtttgataagttcgatggcagctctttgcgcatcatgggatctgtaggtgagccaattaatcctgaagcttggcgctggtataacgaagtcataggccacgagcagtgcccaatcgtcgatacttggtggcaaaccgaaaccggtggcattttgatcagcccattacccggcgctatcgataccaagcctggttcggctacccgccccttcttcggcgtgcaaccggcccttgtcgataacatgggcaacatcatagagggcgcagccgaaggtaacctagtcatactcgactcttggcccggacagatgcgtactgtttttggtgatcatgacagatttgcactgacttacttcaagacgttccgcggcatgtacttcactggtgatggggcgaaacgggacgaggacggttattactggataacgggtcgcgtcgatgatgtgatcaacgtatccggccacagactcggcaccgccgagatagagagtgctttagttgcccatgaaaatgtggctgaagccgctgttgtgggttacccccatgacatcaagggtcaaggtatctatgcttacgtcacgctaactagaggcacggtagaatctgaagagctgcgtcaagacttgagaaagtgggtcagaaaagagattggtgccctagcgacaccggatctgattcaatgggctggcggcctgcctaagacacgttcgggtaagatcatgcgccgtttcctgagaaagatagccgcaaacgaagtgaccaacttaggagattcatcgacactggccgatcccgctgtgatcgatgtattgatagagtctcgcctcaaccgcagcgaataa

SEQ ID NO: 151455 - protein, 650 aa, Shewanella violacea DSS12
MSTQSLYKVPSEIAENAHINEEKYKKMYQESIVNPEGFWREHGQRIDWIKPFTKVKKTSFDDHNLSINWFYDGTLNASANCLDRHLEKNADKVAIIWEGDDAKDQRSVTYGELHQDVCKFANALKSQGVRRGDVVTIYMPMVPEAAVAMLACARIGAVHSVIFGGFSPDSIATRVIDGNSKVIVTADEGVRAGRIIPLKANIDQALANPDVTCVERVIVLERTGGNINWQEGRDIKWDTVMETASEHCVPEEMGAEDPLFLLYTSGSTGNPKGVLHTTGGYMVYASMTHEYVFDYKDGEVYWCTADVGWITGHSYMVYGPLANGATVLIHEGVPNYPTPSRLGEIVDRHKVNILYTAPTLIRALMAEGKEQFDKFDGSSLRIMGSVGEPINPEAWRWYNEVIGHEQCPIVDTWWQTETGGILISPLPGAIDTKPGSATRPFFGVQPALVDNMGNIIEGAAEGNLVILDSWPGQMRTVFGDHDRFALTYFKTFRGMYFTGDGAKRDEDGYYWITGRVDDVINVSGHRLGTAEIESALVAHENVAEAAVVGYPHDIKGQGIYAYVTLTRGTVESEELRQDLRKWVRKEIGALATPDLIQWAGGLPKTRSGKIMRRFLRKIAANEVTNLGDSSTLADPAVIDVLIESRLNRSE

SEQ ID NO: 151456 - DNA, 1971 bp, Rhodobacter capsulatus SB 1003; identical to SEQ ID NO: 122186
  CDS (1)..(1971): transl_table=11

SEQ ID NO: 151457 - protein, 656 aa, Rhodobacter capsulatus SB 1003 [sequence omitted]

SEQ ID NO: 151458 - DNA, 1971 bp, Rhodobacter capsulatus SB 1003
  CDS (1)..(1971): transl_table=11
atggggaagcaggaacaggtggtcgcagcgcccgagatgcgggaggttccggcggggtttgagtctgcgcatgcgaatggcgcgaaatacctcgagatgtatcgggaatcgctcgagaatccggatgcgttctgggggcgcgagggcaagcggctcgactggatcacgccctataccaaggtcaagaataccgatttcaccttcggcaaggtctcgatcaaatggttcgaggatggggtgctgaacgcgtccgtgaactgcatcgaccggcatctgcgcgaccgcgcgctgcaaaccgcgatcatcttcgagcccgatgacccgaaggaaccggcccgccacatcacctacaaggagctctccgaaaaggtgaaccggatggcgaatgtgctgctgtcccagggcatcatgcgcggcgaccgggtggtgatctatctgccgatgatcccggaggcggcctatgcgatgctggcctgcgcccggatcggcgcgatccattccattgttttcgcgggcttttcgcccgatgcgctggcgaaccggatcaatgattgcggcgccaagttggtgatcaccgccgacaccgcgccgcgcggcgggcggcgcacgccgctgaaagcgaacaccgatgcggcgctcttgcactgctcggacaaggtgcgctgcctggtggtcaagcacaccggcgatcagatcagctgggtgcatggccgcgatgtcgaccttttgtacctgatggagcacgtcagcccggaatgcccgccccgcccgatgaatgcggaagatccgctcttcatcctctacacctcgggctcgaccggcaaacccaaaggcgtcgtgcatacgaccggcggctacctcgtctatgccgcgatgacgcaccaatacacgtttgattacaaggacggcgacgtgttctggtgcaccgccgatgtgggctgggtgacggggcacagctacatcatctacgggcccttggcgaatggcgcgacgaccttgatgttcgagggcgtgccgaccttccccgatgcggggcggttctgggcggtgtgcgaaaagcacaaggtcaatcagttctacaccgcgccgacggcgatccgcgcgctgatgggtcagggcccggaatgggttgagaaatatgacctttcctcgcttcgggtgctggggtctgtgggcgagccgatcaaccccgaggcctgggtctggtacgacaaatatgtcggaaaagggaaatgtccgatcgtcgacaccttctggcagaccgagaccggcgggcacatgatcacgcccttgcccggcgcgacaccgacgaaaccgggctcggcgacgaacccgttctttggcgtcaagccggtggtgctggacccgcagaccgcggtgcggatcggcgaggtcgaatgcgagggggtgctctgcatttccgacagctggcccgggcagatgcggacggtctggggcgatcacgaccgcttccaggagacctatttcggccagtatcgcggctattacttcaccggcgacggctgtcggcgcgacaaggacggctattactggatcaccggccgggtcgatgacgtgatcaacgtctcggggcaccggatgggcacggccgaggtggaatcggcgctcgtcgcgcatccgcaggtggccgaggcggcggtggtgggctatccgcatgacatcaagggccagggcatctacgcctatgtgaccctgatgaacgggatcgagcccagcgaggatctgcgcaaggatctggtcaagtgggtgcgcaccgagatcggtccgatcgcctcgcccgatctgatccaatgggcgccgggcctgccgaagacgcgctcgggcaagatcatgcgccggatcctgcgcaagatcgccgagaacgactatggcgcgcttggcgacatctcgacgctggccgatccgggcgtggtgcaggagctgatcgacaaccggatgaaccgggcctga

SEQ ID NO: 151459 - protein, 656 aa, Rhodobacter capsulatus SB 1003
MGKQEQVVAAPEMREVPAGFESAHANGAKYLEMYRESLENPDAFWGREGKRLDWITPYTKVKNTDFTFGKVSIKWFEDGVLNASVNCIDRHLRDRALQTAIIFEPDDPKEPARHITYKELSEKVNRMANVLLSQGIMRGDRVVIYLPMIPEAAYAMLACARIGAIHSIVFAGFSPDALANRINDCGAKLVITADTAPRGGRRTPLKANTDAALLHCSDKVRCLVVKHTGDQISWVHGRDVDLLYLMEHVSPECPPRPMNAEDPLFILYTSGSTGKPKGVVHTTGGYLVYAAMTHQYTFDYKDGDVFWCTADVGWVTGHSYIIYGPLANGATTLMFEGVPTFPDAGRFWAVCEKHKVNQFYTAPTAIRALMGQGPEWVEKYDLSSLRVLGSVGEPINPEAWVWYDKYVGKGKCPIVDTFWQTETGGHMITPLPGATPTKPGSATNPFFGVKPVVLDPQTAVRIGEVECEGVLCISDSWPGQMRTVWGDHDRFQETYFGQYRGYYFTGDGCRRDKDGYYWITGRVDDVINVSGHRMGTAEVESALVAHPQVAEAAVVGYPHDIKGQGIYAYVTLMNGIEPSEDLRKDLVKWVRTEIGPIASPDLIQWAPGLPKTRSGKIMRRILRKIAENDYGALGDISTLADPGVVQELIDNRMNRA

SEQ ID NO: 151460 - DNA, 1959 bp, Starkeya novella DSM 506
  CDS (1)..(1959): transl_table=11
atgtccgacaagatctacgacgttcccgcagaatgggccaagcgcgctttcctgaacgagcatgcctatcgcgcgaagtacgaagcctccgtgcgtgatacggaaggtttctgggccgaggaaggcaagcgcatcgagtggttcgagccctataccattgtcaagaacacctcctacgaccccggccacgtctcgatcaaatggttcgaggacggcgtgaccaacgtcgcctggaactgcatcgaccgccatctgccgcgcctcgccgaccagaccgccatcatctgggaaggcgacgacccctcgcagtccaggcacatcacctatcaggagctgcatgacgaggtctgccgcttcgccaacgtgctgcgcaaccgcaatgtggagaagggcgaccgcgtcacgatctacatgccgatgatccccgaggcggcctatgcgatgctggcctgcgcgcggctcggcgccatccactccgttgttttcggcgggttttctcccgacagcttggccgggcgcattcgcgactgcggctccaaggtgatcatcaccgccgacgagggcctgcgcggcggccgcaaggtgccgctcaaggccaatgtcgacgccgccatcgccaaggtgagcgatgtcgagatcgaccacgtcatcgtggtcaagcgcacgggcggcgaggtcgacatgaagcccggccgcgacgtctggtaccatcaggccgccgacctcgtgaccagcgagtgcccggccgtgccgatgaacgcggaggacccgctgttcatcctctacacctcgggctcgaccggcctgcccaagggcgtgctgcacacgacgggcggctatctcgtctacgcctcgatgacgcaccaatacgtgttcgactaccatgacggcgacgtctactggtgcaccgccgacatcggctgggtgaccgggcacagctacatcgtctacggcccgctcgccaacggcgcgaccacgctgatgttcgagggcgtgccgaactacccgtccaactcccgcttctgggaggtgatcgacaagcacaaggtcaacatcttctacaccgccccgaccgccatccgcgcgctgatgcaggcgggcgacgagccggtgaagaagacgtcccgcgcgtcgctccgcctgctcggctcggtcggcgagccgatcaatccggaggcgtgggagtggtatcaccgcgtggtcggcgaggaccgctgccccatcgtcgacacctggtggcagaccgagaccggcggcatcctgatcaccccgctgcccggcgccacccggctgaagcccggctcggcgacgcagcccttcttcggcgtgatcccgcaggtggtggacgccgagggccgggtgctggagggcgcctgcgagggcaacctcgtcatcgcggactcgtggcccgggcaaatgcgcacagtctatggcgaccatgagcgcttcatgcagacctactttgccacctaccccggcaaatatttcaccggcgacggctgccgccgcgactcggacggctattattggatcaccggccgcgtcgacgacgtgatcaacgtctctggccaccgcatgggcacggccgaggtggagagcgccctcgtcgcccatccgaaggtgtcggaagcggcggtggtcggctatccgcacgacatcaagggccagggcatctacgcctatgtgacgctgatggctggcgccgagccgactgaggaattgcgcaaggagttggtcgcctgggtacgccgggagatcggcccgatcgcctcgcccgacctcatccagttcgcccccagcctgccgaagacgcgctcgggcaagatcatgcgccgcatcctgcgcaagatcgccgaggacgagttcggcaatctcggcgacacctccacgctcgctgaccccaccgtggtgcaggacctgatctcgcagcggcagaacaagaagcacgcggcggcgtga

SEQ ID NO: 151461 - protein, 652 aa, Starkeya novella DSM 506
MSDKIYDVPAEWAKRAFLNEHAYRAKYEASVRDTEGFWAEEGKRIEWFEPYTIVKNTSYDPGHVSIKWFEDGVTNVAWNCIDRHLPRLADQTAIIWEGDDPSQSRHITYQELHDEVCRFANVLRNRNVEKGDRVTIYMPMIPEAAYAMLACARLGAIHSVVFGGFSPDSLAGRIRDCGSKVIITADEGLRGGRKVPLKANVDAAIAKVSDVEIDHVIVVKRTGGEVDMKPGRDVWYHQAADLVTSECPAVPMNAEDPLFILYTSGSTGLPKGVLHTTGGYLVYASMTHQYVFDYHDGDVYWCTADIGWVTGHSYIVYGPLANGATTLMFEGVPNYPSNSRFWEVIDKHKVNIFYTAPTAIRALMQAGDEPVKKTSRASLRLLGSVGEPINPEAWEWYHRVVGEDRCPIVDTWWQTETGGILITPLPGATRLKPGSATQPFFGVIPQVVDAEGRVLEGACEGNLVIADSWPGQMRTVYGDHERFMQTYFATYPGKYFTGDGCRRDSDGYYWITGRVDDVINVSGHRMGTAEVESALVAHPKVSEAAVVGYPHDIKGQGIYAYVTLMAGAEPTEELRKELVAWVRREIGPIASPDLIQFAPSLPKTRSGKIMRRILRKIAEDEFGNLGDTSTLADPTVVQDLISQRQNKKHAAA

SEQ ID NO: 151462 - DNA, 1950 bp, Acinetobacter sp. DR1
  CDS (1)..(1950): transl_table=11
atgaatgagatctatccagtaccagaggaatttaaaaaaacagctcgtactgttgaagcagactattttaaacgttatcaaaactctatcgagaacccagatgaattctgggcagagcaagctaaaattgtcgattggataaagccatttacccaagttaaaaatacgagttttgacaaagacaatttcaagattgaatggtttgctgatggtgagttgaatgtgtcagcaaactgcctagacaggcatcttaaagaacaccctcataaacctgcaattatttgggaaggtgaccatccttctcgtcataaaattgtctcgtataaagaattacacgacgaagtctgccgttttgccaacgttttaaagaaatatggcattggtaaaggtgaccgtgttgtgctgtatatgccgatggtcactgaggctgcgattgccatgttagcctgtgcccgtattggtgctgttcactgcgtggtgtttggtgggttctcgccagactctttagcaagtcgtattgaagatagccaagctaaactggtgattaccgcagactcaagtctacgtgccggaaaactattaccactcaaagaaaatgtcgatttggctctagagttgccgggcacagagtgtgttgaaaatgtagtggtggtttaccgtaatgcgaacccgattgaaatgaaaccgggccgtgatttgtggtatcacctcattattatggaagtagatgccaactgtcctccagaaccgatgaaggctgaagacccattatttattctctatacctcgggctcgacaggtaaaccgaaaggtgttttgcataccacaggtggttatttagtatatgtaacaagtacctttaaagaggtctttgatttaaaacaagatgatgtgtactggtgtacggcagatgtaggttggattacaggtcatagttatctgatctatggcccacttgcaaatggtacgacgaccttaatgtttgagggtgtgcctcaatatccaacatgggcacgtcttggtcatgtggtcgataagcacaaagtctctattttatatacagcgccaactgcgattcgcgccatgatgcgagaaggtgattcgtttgtacgtgaaagtaaccgtagcagcctgcgtttacttggttcggtcggtgagcctattaaccctgaagcttggaattggtactacaacgttgttggtgaaggccgctgcccgattgttgatacatggtggcaaaccgaaacaggcggtattttgattgctccattgccgggtgcaacagctttaaaaccgggttctgcaacacgtccgttatttggtgttcaacctgccattgtagatggtgaaggcaatgagctggaaggtgcggctgaaggtaacctagtcattaaagattcatggccgggccagatgcgtactatttggggtgatcctgatcgctttattgaagcgtatttctcgacctttaaaaatacctattttacaggtgatggtgctcgtcgtgatgaagatggctattactggattacaggtcgagttgacgatgtcttgaacgtttcaggccatcgtttaggtacggctgaaattgaaagtgctctggtgtcacatgaagccgtggcagaagctgcggtggtgggtatgccgcatgatattaaaggacaaggtatttgtacttttgtgactctacaagcgggtgttccagagtcggaagaattgcgtaaagagttaatcaactgggtacgtaaagtactcgggccagtagcttcaccagatgcactacattgggcaccagcattacctaaaacgcgttcgggtaaaatcatgcgccgtattttaagaaagattgcggcaaatgaattagatagtttaggtgatacttcaactttggctgaacctgctgtggtagatcagttaattgcaacggtttatcccgataagcaaaactaa

SEQ ID NO: 151463 - protein, 649 aa, Acinetobacter sp. DR1
MNEIYPVPEEFKKTARTVEADYFKRYQNSIENPDEFWAEQAKIVDWIKPFTQVKNTSFDKDNFKIEWFADGELNVSANCLDRHLKEHPHKPAIIWEGDHPSRHKIVSYKELHDEVCRFANVLKKYGIGKGDRVVLYMPMVTEAAIAMLACARIGAVHCVVFGGFSPDSLASRIEDSQAKLVITADSSLRAGKLLPLKENVDLALELPGTECVENVVVVYRNANPIEMKPGRDLWYHLIIMEVDANCPPEPMKAEDPLFILYTSGSTGKPKGVLHTTGGYLVYVTSTFKEVFDLKQDDVYWCTADVGWITGHSYLIYGPLANGTTTLMFEGVPQYPTWARLGHVVDKHKVSILYTAPTAIRAMMREGDSFVRESNRSSLRLLGSVGEPINPEAWNWYYNVVGEGRCPIVDTWWQTETGGILIAPLPGATALKPGSATRPLFGVQPAIVDGEGNELEGAAEGNLVIKDSWPGQMRTIWGDPDRFIEAYFSTFKNTYFTGDGARRDEDGYYWITGRVDDVLNVSGHRLGTAEIESALVSHEAVAEAAVVGMPHDIKGQGICTFVTLQAGVPESEELRKELINWVRKVLGPVASPDALHWAPALPKTRSGKIMRRILRKIAANELDSLGDTSTLAEPAVVDQLIATVYPDKQN

SEQ ID NO: 151464 - DNA, 1956 bp, Erwinia billingiae Eb661
  CDS (1)..(1956): transl_table=11
atgagccaacaacaccgacatcctgttcccgccaatattgcggaaaacaccctgattaatgcccagcagtatgagtccatgtaccagcagtccgtgcaggaccccgatgccttttggggccaggaaggtaaaattctcgactggatcaaaccctataccgcggtgaagaacacctcgttcgcgccgggcaatatcactatccgctggtttgaagacggcacgctgaacctggcggccaactgtctcgatcgccatctgcacagccgcggtgaccatccggcaattatctgggaaggcgatgatgccagtgaaagcaaaaccctgaccttccgcgagttacaccgggaagtctgtcgctttgccaacgtgctgctggaactcggcgtgaagcgcggcgatgtggtggctatttatatgccaatggtgcctgaagcggccgttgccatgctcgcctgcgcccgcattggcgcggtgcattcggttatttttggcggcttttcaccggaagccgttgccggccgtattatcgactccaacgcccggctggtggtcaccgccgatgaaggcgtgcgcgccggccgttcaatcccgctaaagaaaaacgtcgacgatgcgctggccaatcctggggtgacatcgatcgccaacgtggtggtgtttcgccgcaccggcaaagaggtggcctgggaaaatggtcgcgatctctggtggcacgagctggtcaacaaagccagcgcccaccatcagcccgaagagatgaacgcggaagatccgctgtttatcctttatacctccggctccaccggcaagccgaaaggcgtgctgcacaccaccggtggctatctggtgtatgcggcgaccaccttcaaatatgtctttgattatcatccggatgacgtttactggtgtaccgctgacgttggctggatcaccgggcacagctatctgttgtatggcccgctagcctgtggcgccaccacgctgatgtttgaaggggtgccaaactggccgaaacccagccgcatggccgaagtggtcgataagcataaggtcaccctgctgtacaccgcgccgaccgccattcgcgccctgatggccgaaggcgacaaggcgattgcaggcaccgatcgcagcagcctgcgcattatgggttcggtcggcgagccgattaacccggaagcctgggaatggtattacaacaagattggcgacggccgttgcccgatcgtcgatacctggtggcagaccgaaaccggcggctttatgatcaccccgctgccgggtgccaccgagctgaaagccggttcggccaccaagccgttcttcggcgtgcagccggcactggtggacaacgaaggcaatccgcaggaaggcgcgggcgaaggcaatctggtgattgtcgactcctggccgggccaggcgcgcacgctgtacggcgatcacgatcgctttgaacagacctacttctccacctttaagaacatgtacttcagcggagacggtgcccgtcgcgatgaagatggctactactggatcaccggccgcgtggatgacgtgctgaacgtctcaggccaccgcctgggcacggcagagattgagtcggcgctggtgtcgcatccgaaaattgccgaagcggcagtggtcggtattcagcacagcattaaaggccaggcgatttatgcctatatcaccctgaacagcggtgaagaaccgtcagcagagctgtatgccgaagtgcgtaactgggtgcgtaaagagattggcccgattgccacgccggacgtcttgcactggacggattcactgccaaaaacccgctcggggaaaattatgcgccgtatcctgcgcaaaattgcctccggcgataccagcaatcttggcgatacctcaaccctggccgatcctggcgtggtagaaaaactacttgaagagaaacagtctattaagatgccttaa

SEQ ID NO: 151465 - protein, 651 aa, Erwinia billingiae Eb661
MSQQHRHPVPANIAENTLINAQQYESMYQQSVQDPDAFWGQEGKILDWIKPYTAVKNTSFAPGNITIRWFEDGTLNLAANCLDRHLHSRGDHPAIIWEGDDASESKTLTFRELHREVCRFANVLLELGVKRGDVVAIYMPMVPEAAVAMLACARIGAVHSVIFGGFSPEAVAGRIIDSNARLVVTADEGVRAGRSIPLKKNVDDALANPGVTSIANVVVFRRTGKEVAWENGRDLWWHELVNKASAHHQPEEMNAEDPLFILYTSGSTGKPKGVLHTTGGYLVYAATTFKYVFDYHPDDVYWCTADVGWITGHSYLLYGPLACGATTLMFEGVPNWPKPSRMAEVVDKHKVTLLYTAPTAIRALMAEGDKAIAGTDRSSLRIMGSVGEPINPEAWEWYYNKIGDGRCPIVDTWWQTETGGFMITPLPGATELKAGSATKPFFGVQPALVDNEGNPQEGAGEGNLVIVDSWPGQARTLYGDHDRFEQTYFSTFKNMYFSGDGARRDEDGYYWITGRVDDVLNVSGHRLGTAEIESALVSHPKIAEAAVVGIQHSIKGQAIYAYITLNSGEEPSAELYAEVRNWVRKEIGPIATPDVLHWTDSLPKTRSGKIMRRILRKIASGDTSNLGDTSTLADPGVVEKLLEEKQSIKMP

SEQ ID NO: 151466 - DNA, 1959 bp, Bartonella quintana str. Toulouse; identical to SEQ ID NO: 126585
  CDS (1)..(1959): transl_table=11

SEQ ID NO: 151467 - protein, 652 aa, Bartonella quintana str. Toulouse; identical to SEQ ID NO: 126586

SEQ ID NO: 151468 - DNA, 1959 bp, Bartonella henselae str. Houston-1; identical to SEQ ID NO: 126587
  CDS (1)..(1959): transl_table=11

SEQ ID NO: 151469 - protein, 652 aa, Bartonella henselae str. Houston-1; identical to SEQ ID NO: 126588

SEQ ID NO: 151470 - DNA, 1965 bp, Symbiobacterium thermophilum IAM 14863; identical to SEQ ID NO: 126593
  CDS (1)..(1965): transl_table=11

SEQ ID NO: 151471 - protein, 654 aa, Symbiobacterium thermophilum IAM 14863; identical to SEQ ID NO: 126594

SEQ ID NO: 151472 - DNA, 1989 bp, Methylococcus capsulatus str. Bath; identical to SEQ ID NO: 122012
  CDS (1)..(1989): transl_table=11

SEQ ID NO: 151473 - protein, 662 aa, Methylococcus capsulatus str. Bath; identical to SEQ ID NO: 122013

SEQ ID NO: 151474 - DNA, 1941 bp, Idiomarina loihiensis L2TR
  CDS (1)..(1941): transl_table=11
atgtcgcaactgtattcagttcctgaacatatcaaagctaaagccaaaatcgataatgacggttataagaaactttaccaacagtcagtagacgatcctgaaggtttctggagtgaacacggacagcgaattacttggttcacaccttacaccaaagttaaaaataccagtttcgaaccgggtaaagtcagtgttaagtggtacgaagacggcactctaaacgcctgttacaactgtgtcgaccgtcaccttgctgataaagccgataaaaccgcgattatctgggaaggcgacgaccctagtgtagacaaacacatcacctaccgcgagctacataaagaggtatcccgttttgctaatggcctgaaaaaactaggtataagcaaaggtgaccgcgttgctatttacatgccaatggtgccggaagcggcttatgccatgttggcttgtgcgcgcattggtgcggttcactcggttatcttcggtggcttttctccgaacgccattgctgaccgtattaacgactgtcaggcaaaagccattattaccgctgatgaaggtcgtcgtggtggcggcaccattggtttgaaagctaatgttgataaagccattgctgacgatgcttgtccaacgctggagcacagcattgtgtgccgtgtaacagagggtgatgttgactggactgagggtcgtgatgtttggtggcacgagctggttggcaacgtcagcgacgagtgtcaggcagaagtgatgaatgccgaagatccgctattcattctttatacctcgggttcaaccggaaaacctaaaggggttgtgcacaccaccggtggttatatggtgtacgcatccatgacccacgagtatgtttttgattatcatgaagacgaagtctattggtgtgcagcggacgttggctggattacaggccattcttatattgtttacggaccattagcaaacggcgcaacgaccctgatgtttgaaggtgtgcctacttatcccggtgttggtcgtattggcgaaattgtcgataaacacaaagtgaatattctttatacggcgccaaccgctattcgcgcgttaatggctaaaggcgacgaagcggccaaaacctcaacccgcgaaagcttgcgtattttgggcagcgtgggcgagccgattaaccctgaagcctgggagtggtatcaccgcgctattggtaacggtaagtgcccaattatggatacttggtggcagaccgagaacggcggtattttgattactccgctgccgggcgccacggatttgaagccgggttctgcaactcgtcctttcttcggtattcagcccgcgctggttgatagcgaaggcaacattcaggaaggtgaagccgaaggcgggttggttattaaagactcctggccgggtcaaatgcgcacattatggggtgaccatgagcgctttgagcaaacctacttctctacctttaaaggtatgtactttagtggcgacggcgcacgccgcgatgccgatggctattactggataaccggtcgtatggacgatgtactgaacgtttccggccatcgcctgggtaccgctgaaattgaaagtgctctggtttcgcataaagcggtagccgaagcagctgttgtcggatatccgcacgacttaaaaggtcagggcatctacgtttatgtcacgccggttgaaggtgttgaagttactgatgagctgactaaagaagttcgtaactgggttcgctctgaacttagcccaattgcaactccagacttaattcactggactacaggcttaccaaaaacccgctccggtaaaattatgcgtcgtattctgcgtaaaattgccgctaatgagtacgaaaaccttggtgacacctctacgcttgccgatccaagtgtggtagattctttgatagagaatcgaatgaataaataa

SEQ ID NO: 151475 - protein, 646 aa, Idiomarina loihiensis L2TR
MSQLYSVPEHIKAKAKIDNDGYKKLYQQSVDDPEGFWSEHGQRITWFTPYTKVKNTSFEPGKVSVKWYEDGTLNACYNCVDRHLADKADKTAIIWEGDDPSVDKHITYRELHKEVSRFANGLKKLGISKGDRVAIYMPMVPEAAYAMLACARIGAVHSVIFGGFSPNAIADRINDCQAKAIITADEGRRGGGTIGLKANVDKAIADDACPTLEHSIVCRVTEGDVDWTEGRDVWWHELVGNVSDECQAEVMNAEDPLFILYTSGSTGKPKGVVHTTGGYMVYASMTHEYVFDYHEDEVYWCAADVGWITGHSYIVYGPLANGATTLMFEGVPTYPGVGRIGEIVDKHKVNILYTAPTAIRALMAKGDEAAKTSTRESLRILGSVGEPINPEAWEWYHRAIGNGKCPIMDTWWQTENGGILITPLPGATDLKPGSATRPFFGIQPALVDSEGNIQEGEAEGGLVIKDSWPGQMRTLWGDHERFEQTYFSTFKGMYFSGDGARRDADGYYWITGRMDDVLNVSGHRLGTAEIESALVSHKAVAEAAVVGYPHDLKGQGIYVYVTPVEGVEVTDELTKEVRNWVRSELSPIATPDLIHWTTGLPKTRSGKIMRRILRKIAANEYENLGDTSTLADPSVVDSLIENRMNK

SEQ ID NO: 151476 - DNA, 1965 bp, Ruegeria pomeroyi DSS-3; identical to SEQ ID NO: 122016
  CDS (1)..(1965): transl_table=11

SEQ ID NO: 151477 - protein, 654 aa, Ruegeria pomeroyi DSS-3; identical to SEQ ID NO: 122017

SEQ ID NO: 151478 - DNA, 1944 bp, Xanthomonas campestris pv. campestris str. 8004
  CDS (1)..(1944): transl_table=11
atggctgatgtttatcccgtcgatcccgcgttcgccgctgatgcgcgcattacgcgcgagcagtacgcaacgctgtaccgcgaatcgatcgaacaccccgagcagttctggggcaaggccgcgcagcggctggactggttcaagcaacccacccagatcaaggacgtcagcttcgcgctggacgacttccacgtgcgctggttcggcgacggcgaactcaatgccagcgtcaactgcctggaccgccagctggccacccgcggcgacaagaccgcgctgctgttcgaacccgacagcccggattcgccgtcctacccggtcacctaccgcgagctctatgagcgcgtgtgcaagctgggcaacgcgctgcgcaacctgggcgtcaagaagggcgaccgggtcaccatctatctgccgatgatcgtcgatgcggccgtggcgatgctcgcctgcgcgcgcatcggtgcggtgcactcggtggtgtttggcggctttgcggccaactccatcgccgaccgcgtgatcgactgccagagcaagctgatcatcaccgccgacgaaggcctgcgcggcggcaagaagatcccgctcaaggcgaacgtggacgcggcgctgaagatccccggcaccaacacggtcgaaaccgtgctggtggtgcgccacaccggcggtgcagtggacatgcaggccccgcgcgaccgctggttccatgacgtggtcgatggccagccggccgagtgcgaacccgagcgcatgaacgcggaagacccgttgttcatcctctacacctccgggtccacaggcaagcccaagggcgtgctgcacaccaccgccggctacctgctgtttgccagctatacgcatgaagtggtgttcgacctgcgcgaggacgacatctactggtgcaccgccgacgtgggctgggttaccggccacagctacatcgtctacggcccgctggccaacggcgccaccgcggtgatgttcgaaggcgtgccgaattaccccaacgtctcgcgtttctgggaagtgatcgacaagcaccaggtcaccatcttctacaccgcgcccaccgccatccgcgcgctgatgcgcgaaggcgaagcaccggtcaagaagacctcgcgcagcagcctgcgcctgctcggcagcgttggcgagccgatcaatcccgaagcctggcgctggtactacgaggtggtcggcgacagccgttgcccgatcgtggacacctggtggcagaccgaaaccggcggcatcctgatctcgccgctggccggcgcggtggacctcaagcccggctcggccaccctgccgttcttcggcgtgcagccggccctggtcgatgccgaaggcaagatcctggaaggcgccaccgagggcaacctggtgctgctggattcgtggccgggccagatgcgcaccgtctacggcgaccaccagcgcttcatcgacacctacttccgcacctacccgggtagctacttcaccggtgacggctgccgccgcgacgccgatggctactactggatcaccggccgcgtggacgacgtgatcaacgtctccggccaccgcatcggcaccgccgaggtggaaagcgcgttggtgtcgcacccgaaggtggccgaagcggccgtggtcggcttcccgcacgacgtcaagggccagggcatctacgcctacgtgaccctgatcgccggcgagacgcccagcgaagagctgcacaaggaactggtgagctgggtgcgcaaggagatcggcccgatcgcctcgccggaccatctgcaatgggccccgggcctgccgaagacccgctcgggcaagatcatgcgccgcatcctgcgcaagatcgccgaaaacgccccggatcagctgggcgatacctccacgctggccgatccatcggtggtggattcgctggtcaatgagcggctgacgcgctga

SEQ ID NO: 151479 - protein, 647 aa, Xanthomonas campestris pv. campestris str. 8004
MADVYPVDPAFAADARITREQYATLYRESIEHPEQFWGKAAQRLDWFKQPTQIKDVSFALDDFHVRWFGDGELNASVNCLDRQLATRGDKTALLFEPDSPDSPSYPVTYRELYERVCKLGNALRNLGVKKGDRVTIYLPMIVDAAVAMLACARIGAVHSVVFGGFAANSIADRVIDCQSKLIITADEGLRGGKKIPLKANVDAALKIPGTNTVETVLVVRHTGGAVDMQAPRDRWFHDVVDGQPAECEPERMNAEDPLFILYTSGSTGKPKGVLHTTAGYLLFASYTHEVVFDLREDDIYWCTADVGWVTGHSYIVYGPLANGATAVMFEGVPNYPNVSRFWEVIDKHQVTIFYTAPTAIRALMREGEAPVKKTSRSSLRLLGSVGEPINPEAWRWYYEVVGDSRCPIVDTWWQTETGGILISPLAGAVDLKPGSATLPFFGVQPALVDAEGKILEGATEGNLVLLDSWPGQMRTVYGDHQRFIDTYFRTYPGSYFTGDGCRRDADGYYWITGRVDDVINVSGHRIGTAEVESALVSHPKVAEAAVVGFPHDVKGQGIYAYVTLIAGETPSEELHKELVSWVRKEIGPIASPDHLQWAPGLPKTRSGKIMRRILRKIAENAPDQLGDTSTLADPSVVDSLVNERLTR

SEQ ID NO: 151480 - DNA, 1962 bp, Psychrobacter arcticus 273-4; identical to SEQ ID NO: 122024
  CDS (1)..(1962): transl_table=11

SEQ ID NO: 151481 - protein, 653 aa, Psychrobacter arcticus 273-4; identical to SEQ ID NO: 122025

SEQ ID NO: 151482 - DNA, 1947 bp, Colwellia psychrerythraea 34H; identical to SEQ ID NO: 122026
  CDS (1)..(1947): transl_table=11

SEQ ID NO: 151483 - protein, 648 aa, Colwellia psychrerythraea 34H; identical to SEQ ID NO: 122027

SEQ ID NO: 151484 - DNA, 1959 bp, Shigella sonnei Ss046
  CDS (1)..(1959): transl_table=11
atgagccaaattcacaaacacaccattcctgccaacatcgcagaccgttgcctgataaaccctcagcagtacgaggcgatgtatcaacaatctattaacgtacctgataccttctggggcgaacagggaaaaattcttgactggatcaaaccttaccagaaggtgaaaaacacctcctttgcccccggtaatgtgtccattaaatggtacgaggacggcacgctgaatctggcggcaaactgccttgaccgccatctgcaagaaaacggcgatcgtaccgccatcatctgggaaggcgacgacgccagccagagcaaacatatcagctataaagagctgcaccgcgacgtctgccgcttcgccaataccctgctcgagctgggcattaaaaaaggtgatgtggtggcgatttatatgccgatggtgccggaagccgcggttgcgatgctggcctgcgcccgcattggcgcggtgcattcggtgattttcggcggcttctcgccggaagccgttgccgggcgcattattgattccaactcacgactggtgatcacttccgacgaaggtgtgcgtgccgggcgcagtattccgctgaagaaaaacgttgatgacgcgctgaaaaacccgaacgtcaccagcgtagagcatgtggtggtactgaagcgtactggcgggaaaattgactggcaggaagggcgcgacctgtggtggcacgacctggttgagcaagcgagcgatcagcaccaggcggaaaagatgaacgccgaagatccgctgtttattctctacacctccggttctaccggtaagccaaaaggtgtgctgcatactaccggcggttatctggtgtacgcggcgctgacctttaaatatgtctttgattatcatccgggtgatatctactggtgcaccgccgatgtgggctgggtgaccggacacagttacttgctgtacggcccgctggcctgcggtgcgaccacgctgatgtttgaaggcgtacccaactggccgacgcctgcccgtatggcgcaggtggtggacaagcatcaggtcaatattctctataccgcacccacggcgatccgcgcgctgatggcggaaggcgataaagcgatcgagggtaccgaccgttcgtcgctgcgcattctcggttccgtgggcgagccaattaacccggaagcgtgggagtggtactggaaaaaaatcggcaacgagaaatgtccggtggtcgatacctggtggcagaccgaaactggcggtttcatgatcacgccgctgcctggcgctaccgagctgaaagccggttcggcaacacgtccgttcttcggcgtgcaaccggcgctggtcgataacgaaggtaacccgctggaaggcgctaccgaaggcagcctggtgatcaccgactcctggccgggtcaggcgcgtacgctgtttggcgatcacgaacgttttgaacagacctacttctccaccttcaaaaatatgtatttcagcggcgacggcgcgcgtcgcgatgaagatggctattactggatcaccgggcgtgtggacgacgtgctgaacgtctccggtcaccgtctggggacggcagagattgagtcggcgctggtggcgcatccgaagattgccgaagccgccgtagtaggtattccgcacaatattaaaggtcaggcgatctacgcctacgtcacgcttaatcacggggaggaaccgtcaccagaactgtacgcagaagtccgcaactgggtgcgtaaagagattggcccgctggcgacgccagacgtgctgcactggaccgactccctgcctaaaacccgctccggcaaaattatgcgccgtattctgcgcaaaattgcggcgggcgataccagcaacctgggcgatacctcgacgcttgccgatcctggcgtagtcgagaagctgcttgaagagaagcaggctatcgcgatgccatcgtaa

SEQ ID NO: 151485 - protein, 652 aa, Shigella sonnei Ss046
MSQIHKHTIPANIADRCLINPQQYEAMYQQSINVPDTFWGEQGKILDWIKPYQKVKNTSFAPGNVSIKWYEDGTLNLAANCLDRHLQENGDRTAIIWEGDDASQSKHISYKELHRDVCRFANTLLELGIKKGDVVAIYMPMVPEAAVAMLACARIGAVHSVIFGGFSPEAVAGRIIDSNSRLVITSDEGVRAGRSIPLKKNVDDALKNPNVTSVEHVVVLKRTGGKIDWQEGRDLWWHDLVEQASDQHQAEKMNAEDPLFILYTSGSTGKPKGVLHTTGGYLVYAALTFKYVFDYHPGDIYWCTADVGWVTGHSYLLYGPLACGATTLMFEGVPNWPTPARMAQVVDKHQVNILYTAPTAIRALMAEGDKAIEGTDRSSLRILGSVGEPINPEAWEWYWKKIGNEKCPVVDTWWQTETGGFMITPLPGATELKAGSATRPFFGVQPALVDNEGNPLEGATEGSLVITDSWPGQARTLFGDHERFEQTYFSTFKNMYFSGDGARRDEDGYYWITGRVDDVLNVSGHRLGTAEIESALVAHPKIAEAAVVGIPHNIKGQAIYAYVTLNHGEEPSPELYAEVRNWVRKEIGPLATPDVLHWTDSLPKTRSGKIMRRILRKIAAGDTSNLGDTSTLADPGVVEKLLEEKQAIAMPS

SEQ ID NO: 151486 - DNA, 1959 bp, Nitrobacter winogradskyi Nb-255
  CDS (1)..(1959): transl_table=11
atgtccgacaagatttatgacgtaagcgcggattgggccaggcgggcctgggtcgacgacgccaagtatcgcgagatgtacgcgcgctcgatcaaggatccgaacggattctggtccgaggcggcgcaacgcctggactggatcacgccgttcaccaaggtcgagaacacctcgttcgaactcggcaaggtctcgatcaaatggttcgaggacggcgtgctcaacgccgcctataactgcatcgaccggcatctggaaaaacgcggcgaccagaccgcgattatctgggaaggcgacgatccttcgcagtccaggcacatcacctatcgcgaactgcacgacgaagtctgcaagatggccaacatcctgcggctgcgcaacgtcaagaagggcgaccgcgtcaccatctacctgccgatgattccggaagcggcctacgcgatcctcgcctgcgcgcgaatcggcgcgatccattcggtggtgttcggcggcttctcgccggattccatcgccggccgcctgcgcgattgcaaatcccgcgtcatcatcacctccgacgagggcctgcgcggcggccgcaccatcgcgatgaaggccaatgtcgacgccgcgatcgagaaggtcaacggcgaggtcgactgggtgatcgtcgtcaagcgcacgggcggcaatatcgacatgaatccgacgcgcgacgtctggtatcatgaggccgcggccgtggtcgaaagcgaatgtccgtgcgagccgatgaacgcggaagacccgctgttcattctctacacctcgggatcgaccggacagcccaagggcgtgctgcacaccaccgccggctacctggtcttcgtggcgatgacgcaccagtacgtcttcgactatcacgacggcgacatctactggtgcaccgccgacgtcggctgggtcaccggccacagctacattctctacggaccgctggcgaacggcgcgaccacgatgatgttcgagggcgtgccgaactatcccgacacgtcccgtttctggaacgtgatcgacaaacacaaggtcaacatcttctacaccgccccgaccgcgatccgtgccttgatgcaggcgggcgacgagccggtgaagaaaacctcgcgcgcgagcctgcgcctgcttggctcggtcggagagccgatcaaccccgaggcgtgggaatggtaccaccgcgtggtcggcgacggccgctgcccggtggtcgatacctggtggcagaccgagaccggcggcatcatgatctcggcgctgccgggcgcgatcgcgcagaagcccggctccgcgacgaaaccgttcttcggaatcgcgccggagatcgtcgatgccgacggcaatatcctggaaggcgaatgcagcggcaacctgtgcatcgcaagatcatggccggcccaggtgcgcacggtctatggcgatcacgcccgtttcgagcagacctacttctcctcctacaagggcaggtacttttccggcgacggctgccgccgcgacgccgacggttattactggatcaccggccgcgtcgatgacgtcatcaacgtctccggccatcgcatgggcacggcggaagtcgaaagttcgctggtggcgcatgagagcgtgtcggaggcggccgtggtcggctacccccataacatcaagggccagggcatctacgcctacgtgaccctgatgaagggcgtggaaccgagcgagtcgctgcgcaaggaactggtcgcctgggtgcgcaaggacatcggcccgatcgcttcgcccgacctgatccagttcgcgccgggcctgccgaaaacccgctcgggcaagatcatgcgccgcatcctgcgcaagatcgccgaggacgagccgtccagcctcggcgacaccacgacgctggccgatcccgccgtggtcgatgatctcgtcaggaaccgtcagaacaggaaagacggcgcggtggcgtag

SEQ ID NO: 151487 - protein, 652 aa, Nitrobacter winogradskyi Nb-255
MSDKIYDVSADWARRAWVDDAKYREMYARSIKDPNGFWSEAAQRLDWITPFTKVENTSFELGKVSIKWFEDGVLNAAYNCIDRHLEKRGDQTAIIWEGDDPSQSRHITYRELHDEVCKMANILRLRNVKKGDRVTIYLPMIPEAAYAILACARIGAIHSVVFGGFSPDSIAGRLRDCKSRVIITSDEGLRGGRTIAMKANVDAAIEKVNGEVDWVIVVKRTGGNIDMNPTRDVWYHEAAAVVESECPCEPMNAEDPLFILYTSGSTGQPKGVLHTTAGYLVFVAMTHQYVFDYHDGDIYWCTADVGWVTGHSYILYGPLANGATTMMFEGVPNYPDTSRFWNVIDKHKVNIFYTAPTAIRALMQAGDEPVKKTSRASLRLLGSVGEPINPEAWEWYHRVVGDGRCPVVDTWWQTETGGIMISALPGAIAQKPGSATKPFFGIAPEIVDADGNILEGECSGNLCIARSWPAQVRTVYGDHARFEQTYFSSYKGRYFSGDGCRRDADGYYWITGRVDDVINVSGHRMGTAEVESSLVAHESVSEAAVVGYPHNIKGQGIYAYVTLMKGVEPSESLRKELVAWVRKDIGPIASPDLIQFAPGLPKTRSGKIMRRILRKIAEDEPSSLGDTTTLADPAVVDDLVRNRQNRKDGAVA

SEQ ID NO: 151488 - DNA, 1941 bp, Pseudoalteromonas haloplanktis TAC125
  CDS (1)..(1941): transl_table=11
atgtcaaaaaatatctatccagttcctacgcatattaaaaacacagctctcgtcgataacgataaatataataaaatgtataaacactcgattgatgatccacaaagtttttgggctgaacacggtaagcgccttgattggtttactccttattctaaagtaaaaaataccacctttgataaaggccacataaatattaagtggtatgaagatggctaccttaatgcatcgtataactgtattgaccgccacttaaaaacaaaagccaataaagtagcgcttatatgggagggcgataacccatcgcaaagcgagcatattacttatcaaaaattacatgatgaagtagcaaagtttgctaatggtttaaaaaagctgggcgtacaaaaaggtgatcgcgtcgctatttatatgccaatgagcccacaagctatttacgcaatgcaagggtgtgcacgtattggtgctattcactcagttatatttggtggtttttcaccctctgcgattgccgatcgtattaaggattcgggcgcaaaagtggttattacttcagacgaaggacgccgtgctggtaactgcgtgccacttaaagcaaacgttgacgaagctgtgttgcaagagtcagtaacaagtatagagcatgttattgtgcaccaacttaccggtggcgatgttgattggcacgaccatgatatatggtggcacgatttagtagcagacgaagagcctgtgtgcgagcctgaggtaatgaacgctgaagacccgttatttattttatacacctcagggtcaacaggtcagccaaaaggagtggtgcataccacgggtggttatttagtttatgcatcgatgacgcacgaatatatatttgatgtaaaagaggacgatgttttttggtgtagcgccgatgtaggttggatcaccgggcacagttatattgcttatggtccgctggtaaatggttgtacccaagttgtatttgaaggtgtacctacttacccaaccgcagggcgtatgggcgaagttgttgataaacacggtgttactattttatataccgcgcctaccgctattcgtgccttaatggcaaaaggcgatgagcctgtagcgtcatctcatcgtaatagtttacgaattttaggatcggttggtgagccaattaaccctgaagcatggaattggtattacgaacaaataggtaagtcaaattgccctatcgttgatacctggtggcaaacagaaacgggtggcattatgatcaccccattaccaggtgctaccgatttaaaaccaggctctgcaacgcgtccattttttggtattgcgccggcaatatttgacgctgagggtaatacgcttgaaggtgaagctgatggtaacttagttattttagatagctggccatcgcaagcacgtactatttatggcgatcatgaacgttttgaacaaacttacttttctacctacccaggtgtgtatttttgtggcgatggctgtcgtcgtgacgaagatggttattattggatcactggtcgcgtagatgatgtacttaatatttcggggcatcgtttaggcactgctgaaatagaaagcgcactggttgcacacccagcagtagctgaagccgctgtagtaggttatccgcatgatattaaaggccaaggtatttatgtttacattacccctaacgaaggtataacggtaagcgatgagttaaccaaagaaattcgtaactgggttcgtaaagagttaagcccaattgcgtcacccgatatgattcagtggtcaccagggttaccaaaaacgcgttctggtaaaataatgcgtcgaattttacgtaaaattgcggccaacgagcacgaacaactaggtgatacatcaacacttgccgatccatctgtggttgatgagttaattgaaaatcgattaaatcgttaa

SEQ ID NO: 151489 - protein, 646 aa, Pseudoalteromonas haloplanktis TAC125
MSKNIYPVPTHIKNTALVDNDKYNKMYKHSIDDPQSFWAEHGKRLDWFTPYSKVKNTTFDKGHINIKWYEDGYLNASYNCIDRHLKTKANKVALIWEGDNPSQSEHITYQKLHDEVAKFANGLKKLGVQKGDRVAIYMPMSPQAIYAMQGCARIGAIHSVIFGGFSPSAIADRIKDSGAKVVITSDEGRRAGNCVPLKANVDEAVLQESVTSIEHVIVHQLTGGDVDWHDHDIWWHDLVADEEPVCEPEVMNAEDPLFILYTSGSTGQPKGVVHTTGGYLVYASMTHEYIFDVKEDDVFWCSADVGWITGHSYIAYGPLVNGCTQVVFEGVPTYPTAGRMGEVVDKHGVTILYTAPTAIRALMAKGDEPVASSHRNSLRILGSVGEPINPEAWNWYYEQIGKSNCPIVDTWWQTETGGIMITPLPGATDLKPGSATRPFFGIAPAIFDAEGNTLEGEADGNLVILDSWPSQARTIYGDHERFEQTYFSTYPGVYFCGDGCRRDEDGYYWITGRVDDVLNISGHRLGTAEIESALVAHPAVAEAAVVGYPHDIKGQGIYVYITPNEGITVSDELTKEIRNWVRKELSPIASPDMIQWSPGLPKTRSGKIMRRILRKIAANEHEQLGDTSTLADPSVVDELIENRLNR

SEQ ID NO: 151490 - DNA, 1938 bp, Pseudomonas fluorescens Pf0-1; identical to SEQ ID NO: 122036
  CDS (1)..(1938): transl_table=11

SEQ ID NO: 151491 - protein, 645 aa, Pseudomonas fluorescens Pf0-1; identical to SEQ ID NO: 122037

SEQ ID NO: 151492 - DNA, 1938 bp, Magnetospirillum magneticum AMB-1
  CDS (1)..(1938): transl_table=11
atgtccgaggtctatcctgtgcccgctgagaccgcgaagaacgctctcatcgacaacgacaagtacaatgaatggtatgagcgctcggtgaaggaccccgacgggttctggggcgagcacggcaagcgcatcgactggatcaagcccttcaccaaggtgaagaacgtttcctattccggcgacgtcagcatcaagtggttcgaggacggcacgctcaacgtgtcggccaactgcctggaccgccatctggccaagcgccgggaccagaccgccatcatctgggaaggcgacgaccccaacgaatccgcccatatcacctatggcgacctgcacgagcgcgtctgccgcctggccaatgccatgaccgatctgggcgtgaagaagggtgaccgcgtcaccatctatctgcccatgatccccgaggcggcggtggccatgctggcctgcgcccgcgtcggcgccgtgcattccatcgtgttcggcggcttctcgcccgacgccctggccggccgcatccaggattgcgattcctcgctgctgatcaccgccgacgagggtctgcgcggcggccgcaaggttccgctgaaggccaatgtggacaaggctctcgagacctgctggtcgtgcaagagcgtcatcgtcgtcaagcgcaccggcggcgacatccacatggtcacaggccgtgaccactggtaccacgacctggtggccaaggccgctccgacccacacccccgtggagatgagcgccgaggacccgctgttcctgctctacacctcgggctcgaccggcaagcccaagggcgtggtccacaccaccggcggctatctggtctatgcctccatgacccaccagtacgtcttcgactatcacgagggcgacatctactggtgcaccgccgatgtgggctgggtcaccggtcactcctacatcgtctatggtccgctggccaacggcgccatcaccctgatgttcgagggcattcccaactacccgaccgtgtcgcgcttctgggacgtggtggacaagcacaaggtcaacatcttctacaccgcgcccaccgccatccgctcgctgatgcgcgaaggcgaggagccggtgaagaagaccagccgcgcctcgctgcgcctgctgggttcggtgggcgagcccatcaaccccgaggcctggacctggtaccaccgcgtggtgggcgacggccgttgccccatcgtcgacacctggtggcagaccgaaaccggcggcatcctgatcaccccgctgccgggcgccaccgcgctgaagcccggttcggccacccgtccgttcttcggcgtcaagccggtgatggtcgacgccgagggcaagaccctggaaggcgccgtcgagggcaacctctgcctcgccgagcccggctggcccggccagatgcgcaccctgtggggcgatcacgagcgcttcaagcagtcgtacttcgccacctaccagggcatgtacttcaccggtgacggcgcgcgccgcgacgaggacggctattactggatcaccggccgcgtcgacgacgtgatcaacgtgtccggtcaccgcatgggcaccgccgaggtggaatccgccctggtcgcccatcccaaggtggccgaggccgccgtggtcggctatccccacgacatcaagggccagggcatctatgcctatgtcaccctggtcgccggggaagagccctccgaggatctgcgcaaggaactggtcaactgggtccgcaaggaaatcggccccatcgccagccccgacctgatccagtggtcgccgggcctgcccaagacccgttcgggcaagatcatgcgccgcatcctgcgcaagatcgccgagaacgacttcggctcgctgggcgacacctcgaccctggccgatcccggtgtggttgacgacctcatcgacagccgcatgaatcgcggctaa

SEQ ID NO: 151493 - protein, 645 aa, Magnetospirillum magneticum AMB-1
MSEVYPVPAETAKNALIDNDKYNEWYERSVKDPDGFWGEHGKRIDWIKPFTKVKNVSYSGDVSIKWFEDGTLNVSANCLDRHLAKRRDQTAIIWEGDDPNESAHITYGDLHERVCRLANAMTDLGVKKGDRVTIYLPMIPEAAVAMLACARVGAVHSIVFGGFSPDALAGRIQDCDSSLLITADEGLRGGRKVPLKANVDKALETCWSCKSVIVVKRTGGDIHMVTGRDHWYHDLVAKAAPTHTPVEMSAEDPLFLLYTSGSTGKPKGVVHTTGGYLVYASMTHQYVFDYHEGDIYWCTADVGWVTGHSYIVYGPLANGAITLMFEGIPNYPTVSRFWDVVDKHKVNIFYTAPTAIRSLMREGEEPVKKTSRASLRLLGSVGEPINPEAWTWYHRVVGDGRCPIVDTWWQTETGGILITPLPGATALKPGSATRPFFGVKPVMVDAEGKTLEGAVEGNLCLAEPGWPGQMRTLWGDHERFKQSYFATYQGMYFTGDGARRDEDGYYWITGRVDDVINVSGHRMGTAEVESALVAHPKVAEAAVVGYPHDIKGQGIYAYVTLVAGEEPSEDLRKELVNWVRKEIGPIASPDLIQWSPGLPKTRSGKIMRRILRKIAENDFGSLGDTSTLADPGVVDDLIDSRMNRG

SEQ ID NO: 151494 - DNA, 1941 bp, Rhodospirillum rubrum ATCC 11170; identical to SEQ ID NO: 122044
  CDS (1)..(1941): transl_table=11

SEQ ID NO: 151495 - protein, 646 aa, Rhodospirillum rubrum ATCC 11170; identical to SEQ ID NO: 122045

SEQ ID NO: 151496 - DNA, 1953 bp, Hahella chejuensis KCTC 2396
  CDS (1)..(1953): transl_table=11
atgagtacacacgaaacccatcctgcgccggccgatattgcaaaaaacgcatgggccgacaaagagacctacttgcgcatgtatcaggagtccatcgaggacccggaaggtttctggaggcagcatggaacgcgaatcgactggatcaagccttacagccaagttaaagacgtcgactactcacagcagaacctgcacatccgctggttccacgacggtacattgaacgcctgttataactgtcttgatcgccacctgccgcaacgcgcgcagcagaccgccatcatctgggaaggcgatgaccccgccgatgacgccaaaatcacttatcaagagctctacgacaaggtttgcaaactgtccaacgcactcaaggacatgggagtcaaaaaaggcgacgtagtcaccatctacatgccgatgattcctgaagccgccatggcgatgctggcctgcgcccggattggcgcgccgcactcagtggtgttcggcggtttttcgccggaagcgctggccggacgcattgaggactgcaagtcgcgctttgtcatcacggcggatgagggcgtgcgcggcggacgcattgtgccattgaagaagaatgtcgacgccgccgcggaaatcaccgccggcaaaggcgcggaagtggataaagtgctggtggtcaaacgcaccggcaatgcggtgaactggagcgaaggtcgcgacgtctggtatcacgacgccgtcgccaatgcgtcaacggactgcccgccggaagaaatgtcggcggaagatccgctgttcatcctttatacctccggctccaccggcaagcctaaaggcgtgctgcacaccaccggcggctacatggtttacgcctccatgacgcaccagtacgtgtttgactataaagacggcgatatctactggtgcaccgcggacgtgggctggatcaccggtcacagctacatcgtgtacggaccgttggcgaatggcgccgtcacgctgatgtttgaaggcgtgccgaactatcctgacgcctcacgctgctggcaagtggtggataagcacaacgttaatattttctatactgcgccaaccgcgattcgcgcgctcatgcgtctgggggacgaccctgtcgtcaaaagttcccgtaaaacactgaaactgctcggtactgtcggcgagccgatcaatccagaagcctgggattggtattacgatgtggtcggagaaaaacgttgccccatcgtcgatacctggtggcaaaccgagaccggcggcattctgatcacgccgctgccgggcgccaccgcgttgaaaccgggctccgccacgctgccgttctttggcgtcaagcctgcgctggtggataacgaaggcgcgctattggacggcgccgtgtccggcaacctggtgctgctggacagctggccaggacagatgcgcacggtgtacggcgatcatcagcgctttgtgcagacctatttctccagctatcccggtatgtatttcaccggagacggcgcccgtcgcgacgaagacggttactactggatcacggggcgggtggacgacgtactgaacgtttccggtcaccgactaggcaccgctgaagtggaaagtgcgctggtggaacatgatgcggtctccgaagccgccgtagtgggcttccctcacgacgtcaaagggcagggcatatacgcctatgtcaccctgggcgtaggcttcgagccttccgataccttgctggatgagttgaagcagatggtgcgcaaggaaattggtcccattgcgacgccggacgtgattcagttctcgccaggcctgccgaagacccgctccggtaaaatcatgcgtcgcattctgcgtaagattgctgcggacgagacggattccctgggggatacctccacactggcggacccctcggttgtggacgatctgatcagtaatcgcgtcagagcctga

SEQ ID NO: 151497 - protein, 650 aa, Hahella chejuensis KCTC 2396
MSTHETHPAPADIAKNAWADKETYLRMYQESIEDPEGFWRQHGTRIDWIKPYSQVKDVDYSQQNLHIRWFHDGTLNACYNCLDRHLPQRAQQTAIIWEGDDPADDAKITYQELYDKVCKLSNALKDMGVKKGDVVTIYMPMIPEAAMAMLACARIGAPHSVVFGGFSPEALAGRIEDCKSRFVITADEGVRGGRIVPLKKNVDAAAEITAGKGAEVDKVLVVKRTGNAVNWSEGRDVWYHDAVANASTDCPPEEMSAEDPLFILYTSGSTGKPKGVLHTTGGYMVYASMTHQYVFDYKDGDIYWCTADVGWITGHSYIVYGPLANGAVTLMFEGVPNYPDASRCWQVVDKHNVNIFYTAPTAIRALMRLGDDPVVKSSRKTLKLLGTVGEPINPEAWDWYYDVVGEKRCPIVDTWWQTETGGILITPLPGATALKPGSATLPFFGVKPALVDNEGALLDGAVSGNLVLLDSWPGQMRTVYGDHQRFVQTYFSSYPGMYFTGDGARRDEDGYYWITGRVDDVLNVSGHRLGTAEVESALVEHDAVSEAAVVGFPHDVKGQGIYAYVTLGVGFEPSDTLLDELKQMVRKEIGPIATPDVIQFSPGLPKTRSGKIMRRILRKIAADETDSLGDTSTLADPSVVDDLISNRVRA

SEQ ID NO: 151498 - DNA, 1950 bp, Hahella chejuensis KCTC 2396
  CDS (1)..(1950): transl_table=11
atgagtgcgtctactgtttatccgtccaaggcggaaatcatccaacattcctttctcgacgaacagaaataccaggatctttatcggcagtcgatcaccgagccggaaaagttctgggccgagcatgcgcaacgcctggactggttcaagcccttcagtaaggtcaaagacacctcctttcatgcgccggacgtgcatatacgctggtttgaggacggttatctgaatgtttcccataactgtctcgatcgtcatctggagcatcgcggcgaccagacggcgattatctggcagggggatgaccccagcgagcacaaacatatcagttatcgtgaattgcacacggcggtgtgtcggttcgccaatgtactgaaagcccagggcgtcgctaaaggggacgtagtgactttatatatgcccatgattccggaaacggcggtggccatgctggcctgcacccgcatcggcgcagtgcattccgtggtgtttggcggcttttctccagaggcgttggcgagccgtatattgaatggccggtctaagctggtgatcaccgctgacgaaggcttgcgcggggggaaaaccattccgcttaaagccaatgtggacgccgcactgacgcgttctgatctggacatggtggagaaggtgattgtggtcaaacgcactggcgttgacgtggggtggcgcgaaggccgggatatctgctatcaggaggcgatggcgcaagcctctgacgattgcccggcggaagtgatgaatgcggaagatcctctgtttattctctacacctctggctccaccggcgcgcccaaaggggtgttgcacacgacgggcggctatctgacctatgtgtcgctctctcaccaatatgtttttaactatcgtgaaggcgatgtgttctggtgcactgcggactttggctggatcaccggccacagctacgtgttgtacgggcccttgagcaatggcgctacgactctggtttatgagggcgtgccgaactacccggatctgtcccgcttctggcggattgtcgagcaacataaagtgaacctgttttacaccgcgccgacggcgatccgcgccatcatggcggcgggagatgaactggcccaagcggcggacagcagctctctacgggtaatgggtagctgcggagaacccattaacccggaagcctgggaatggttctatcgggtggtgggagactcccgctgtccgatcatggacacctggtggcaaaccgagaccggcggcatcatgatcacacccatcgctggcgtgaacgaccttaaacccggctccgcgacacgaccgtttttcggcgtgcagccggcgctggtggataacgaaggcaatgagatctccggagcaggcgagggcaacctgatcatcaaagacagctggccagcgcaaatgcgcaccgtctatggcgatcacgaccgctttgtgaagacctatttctctacttttaccggcgcctatttcaccggagatggtgcgcgcagggatgaagacgggtactattggataaccggcagagtggatgacgtcatcaacgtgtccgggcaccggatgggaaccgcggaagtggagagcgcgctggtttctcaccccaaagtggcggaggcggccgtggtcggatatccgcacgccatcaaggggcagggcatatatgtatacataacgcttaatgtaagcgaagcgccgactgacgccctgaaggaagagttgcgacagtgggtgagaaaagaaatcggtcctgtggcgtcgcctgacgttatacagtgggcgccgggattaccgaaaacccgatctggaaagataatgcggcgcattctgcgtaagatcgccgccgatgagcatgacaacctgggcgacgtatcgaccctggccgatccgtccgtcgttgacgagctgatcgccaatcgggttggcgcgccataa

SEQ ID NO: 151499 - protein, 649 aa, Hahella chejuensis KCTC 2396
MSASTVYPSKAEIIQHSFLDEQKYQDLYRQSITEPEKFWAEHAQRLDWFKPFSKVKDTSFHAPDVHIRWFEDGYLNVSHNCLDRHLEHRGDQTAIIWQGDDPSEHKHISYRELHTAVCRFANVLKAQGVAKGDVVTLYMPMIPETAVAMLACTRIGAVHSVVFGGFSPEALASRILNGRSKLVITADEGLRGGKTIPLKANVDAALTRSDLDMVEKVIVVKRTGVDVGWREGRDICYQEAMAQASDDCPAEVMNAEDPLFILYTSGSTGAPKGVLHTTGGYLTYVSLSHQYVFNYREGDVFWCTADFGWITGHSYVLYGPLSNGATTLVYEGVPNYPDLSRFWRIVEQHKVNLFYTAPTAIRAIMAAGDELAQAADSSSLRVMGSCGEPINPEAWEWFYRVVGDSRCPIMDTWWQTETGGIMITPIAGVNDLKPGSATRPFFGVQPALVDNEGNEISGAGEGNLIIKDSWPAQMRTVYGDHDRFVKTYFSTFTGAYFTGDGARRDEDGYYWITGRVDDVINVSGHRMGTAEVESALVSHPKVAEAAVVGYPHAIKGQGIYVYITLNVSEAPTDALKEELRQWVRKEIGPVASPDVIQWAPGLPKTRSGKIMRRILRKIAADEHDNLGDVSTLADPSVVDELIANRVGAP

SEQ ID NO: 151500 - DNA, 1959 bp, Sodalis glossinidius str. 'morsitans'
  CDS (1)..(1959): transl_table=11
atgagccaaccccatcgttacccgattcccgctagcctcgcggaacgtacgctggtttctgcggagcaatatcggaaattgtatgagcagtccatcaacgatcccgattccttttggcgggaatacgcccagattgtggaatggataacccctttccagacggtgaaaaatacgaccttcgatcctggccatgtcaatattcgctggtttgaagacggcacgctgaatgtggccgccaactgtctcgatcggcatttgcaggagcggggcgaccagactgccattatctgggagggggatgacgccagtcaaagcaaaaccctgacctaccggcaattacatcaggcggtgtgccgcttcgccaatgtcctgaaggcgcagggtatcggcaaaggggatgtggtggccctttacatgcccatggtgccggaagccgcggtggcgatgcttgcctgcgcacgcatcggcgccgttcactcggtcattttcgccggtttttcgccggaggcgatcgccggccgcatcatcgattccagcgccaaattggtggtaaccgccgacgaggggcttcgcgctggacgcaaaatccccctgaagaaaaacatcgacgatgcgttaaatcatccggaggtgaaaagcgtcaaccgggtcatcgtcttccgccgtaccggcaatgcaattgactggcaacctgagcgggatgtgtggtggcacgacgccatcgacggcgccgacgatacctgcccgcccgaggcgatgggggcggaagatccgctgttcattctctatacctccggctccaccggcactcccaagggggtgctgcacactaccggcggctatctggtttacgccgccacgacctttaaatatgtattcgactatcaccccggcgatgtttattggtgtaccgctgacgtcggctgggtaacggggcacagctatctgctgtacggcccgctggcctgctgcgccattaccctgatgtttgagggcgtgcccaactggccagccgccagccgcatggcgcaggtggtggacaaacatcaggtgaatattctctacaccgcgcccaccgccattcgcgcgctgatggccgaaggtgacaaggcgataaccggtacgcatcgttcgtcgctgcggatcatgggctctgtgggcgaacccatcaaccctgaagcctgggagtggtattaccataagatcggcaacggccgctgcccgatcgtcgatacctggtggcagaccgaaacgggcggcttcatgatcactccgctaccgggcgccatggcgttaaaacccggctcggcggcgctgccgtttttcggcgtccagcccgctctggtagataacgtcggcacgcctgtcgacggcgccggggaaggcaatcttgtcatcaccgactcctggcccggtcaagcgcgtaccctctatggcgatcacgatcggttcaagcagacctatttctacacctttaaaggcatgtatttcagcggcgacggcgcccggcgcgatgaggacggctattattggataaccggccgcgtcgatgatgtactcaacgtttccggccaccgcctcggcacctccgagatcgaatcggctttggtggcccatccgaaaattgccgaagcggcggtggtggggatgccgcacaacatcaaaggccaggcgatctacgcttatattacgctcaacgcgggcgaaaccccgacgcctgagctgtataacgaagtccgcgcctggatgcgtaaagaaatcggcgcaatcgccacccccgatgttctgcattggaccgattcgctgccgaaaacccgctccggcaagataatgcgccgcatcttgcgtaaaattgccgccggcgacaccggcaatctcggtgacacctccacgctggccgatcctggcgtggtcgaaaaactgctggaagaaaaacacactctgaccttgccttcgtaa

SEQ ID NO: 151501 - protein, 652 aa, Sodalis glossinidius str. 'morsitans'
MSQPHRYPIPASLAERTLVSAEQYRKLYEQSINDPDSFWREYAQIVEWITPFQTVKNTTFDPGHVNIRWFEDGTLNVAANCLDRHLQERGDQTAIIWEGDDASQSKTLTYRQLHQAVCRFANVLKAQGIGKGDVVALYMPMVPEAAVAMLACARIGAVHSVIFAGFSPEAIAGRIIDSSAKLVVTADEGLRAGRKIPLKKNIDDALNHPEVKSVNRVIVFRRTGNAIDWQPERDVWWHDAIDGADDTCPPEAMGAEDPLFILYTSGSTGTPKGVLHTTGGYLVYAATTFKYVFDYHPGDVYWCTADVGWVTGHSYLLYGPLACCAITLMFEGVPNWPAASRMAQVVDKHQVNILYTAPTAIRALMAEGDKAITGTHRSSLRIMGSVGEPINPEAWEWYYHKIGNGRCPIVDTWWQTETGGFMITPLPGAMALKPGSAALPFFGVQPALVDNVGTPVDGAGEGNLVITDSWPGQARTLYGDHDRFKQTYFYTFKGMYFSGDGARRDEDGYYWITGRVDDVLNVSGHRLGTSEIESALVAHPKIAEAAVVGMPHNIKGQAIYAYITLNAGETPTPELYNEVRAWMRKEIGAIATPDVLHWTDSLPKTRSGKIMRRILRKIAAGDTGNLGDTSTLADPGVVEKLLEEKHTLTLPS

SEQ ID NO: 151502 - DNA, 1941 bp, Erythrobacter litoralis HTCC2594
  CDS (1)..(1941): transl_table=11
atgagcgatcaatccgagtgggtacagcggccagcgagcgcgctgaagggcaccaattgcacggccgagcaatatgagaaaatgtatgccagcagcctgcaggacagtgatgccttctgggccaagcaggccgagcggatcgactggttccagaagccgtcgaagattgccaactggagcttcgaccccgtcgatatcaagtggttcgaagacggcacgctcaacatttgccacaacgccgtcgataggcatgtcgaggccggcaatggggatcggacagcgatcatcttcgagccagactcgcccgatggcgaagtgcgcacgttcagctacgcggatgtccagcgcgaagtcatccgcatggccaacacgctcaagaaactcggcgtcgccaagggcgatcgcgtcacgatctacatgccgatggtgcccgaaggcgccttcgcgatgcttgcctgcgcgcggatcggggcgatccactcggtgatcttcggtggcttctctcccgatgccatcgccggacgggtggacgactgcgagagcgactggatcgtcactgccgacgagggcctgcgcgggtcgaagactatcccgctcaaggccaatgtcgattcggcgctggaaaaagtctccgccaagggcgtgctggtgctgcgtcataccggcggcgacgtgtcgatgaccgatggccgcgaccattggtatcacgagctgtccgcagaggtgtccgatgaatgcctgtgcgagccgatgaacgccgaggatccgctcttcatcctctatacctcaggctcgaccggcaaacccaagggcgtgctgcacaccaccgggggctatgccgtctggaccgagaccaccttccgctacatcttcgactaccgcgacggcgaggtgttctggtgcaccgccgatatcggctgggtcaccgggcacagttatatcgtttacggccccctgcagaacggcgcgactgcgctgatgttcgaaggcgtgccgaactaccccgatcacgaccgcttctggcaggtttgcgccaagcacaaggtcaatatcttctacaccgccccgaccgcgatccgcgcgctgatgcgcgaaggcgaccatcacgtcgagaagcacgacctctcatcattgcgcctgctcggcagcgtcggcgaaccaatcaatcccgaggcctggcgctggtatcacgagaccgtcggcaaagagagaattcccatcatcgatacgtggtggcagaccgaaaccggcggctgcatgatcaccaccctgcccgccgcgcacgatatgaagccgggaagcgcaggcaagccattcttcggcgtccagccgcaactggtcgacaacgaaggtgctgagctggagggcgcggccagcgggaacctgtgcatcacgcatagctggcccggccaggcgcgcacggtctatggcgatcacgagcgcttcatccagacctatttcagcacctacccgggcaagtacttcaccggcgacggctgccgacgcgacgaggacggctattattggatcaccggccgcgtcgacgatgttatcaacgtctccggccaccgcatgggcaccgccgaagtcgaaagcgcgcttgtgctgcatccgaaggtcagcgaagcggcggtcgtcggcttcccgcacgatatcaagggccagggcatctattgctacgtcaccctgatggacggagtcgaggaaagcgacgagctgagcgccgaactgcgccagtgggtgcgcaaggaaatcggcccgatcgcgacgccagaccacttgcatttcacgcccgccctgcccaagacccgcagcggcaagatcatgcgccgcatcctgcgcaagatcggcgagaacgaattcggatcgctcggcgacacttcgacgctggcggatccgggtgtcgtcgatgcgctgatcgaggggcggaagaaccggtag

SEQ ID NO: 151503 - protein, 646 aa, Erythrobacter litoralis HTCC2594
MSDQSEWVQRPASALKGTNCTAEQYEKMYASSLQDSDAFWAKQAERIDWFQKPSKIANWSFDPVDIKWFEDGTLNICHNAVDRHVEAGNGDRTAIIFEPDSPDGEVRTFSYADVQREVIRMANTLKKLGVAKGDRVTIYMPMVPEGAFAMLACARIGAIHSVIFGGFSPDAIAGRVDDCESDWIVTADEGLRGSKTIPLKANVDSALEKVSAKGVLVLRHTGGDVSMTDGRDHWYHELSAEVSDECLCEPMNAEDPLFILYTSGSTGKPKGVLHTTGGYAVWTETTFRYIFDYRDGEVFWCTADIGWVTGHSYIVYGPLQNGATALMFEGVPNYPDHDRFWQVCAKHKVNIFYTAPTAIRALMREGDHHVEKHDLSSLRLLGSVGEPINPEAWRWYHETVGKERIPIIDTWWQTETGGCMITTLPAAHDMKPGSAGKPFFGVQPQLVDNEGAELEGAASGNLCITHSWPGQARTVYGDHERFIQTYFSTYPGKYFTGDGCRRDEDGYYWITGRVDDVINVSGHRMGTAEVESALVLHPKVSEAAVVGFPHDIKGQGIYCYVTLMDGVEESDELSAELRQWVRKEIGPIATPDHLHFTPALPKTRSGKIMRRILRKIGENEFGSLGDTSTLADPGVVDALIEGRKNR

SEQ ID NO: 151504 - DNA, 1944 bp, Syntrophus aciditrophicus SB; identical to SEQ ID NO: 126653
  CDS (1)..(1944): transl_table=11

SEQ ID NO: 151505 - protein, 647 aa, Syntrophus aciditrophicus SB; identical to SEQ ID NO: 126654

SEQ ID NO: 151506 - DNA, 1971 bp, Syntrophus aciditrophicus SB
  CDS (1)..(1971): transl_table=11
atgggagaagagtcgatattgaaagagttctatccggtacctgagagaatcaaggcaaaagcctgggtgaaaggccggggagagtatgacaaactgtatgcggaatccattgccgattcggctgcctggtgggcgaagcaggctgacgagatcctgaccttctacaagaagtgggacaaggtcgaggatttcaactttgacattcgcaaaggcccgattcatgtgaagtacttcgaaggcgcgaaactgaacgtctcctacaactgcctggaccgccatctggcaacgaagggcgacaaagtggccattcagtgggaaggcaacgaacccggtgagcagaaggcctatacctataaggatctccatacggaagtctgcaagttcgctaatgttttgaagaagcacggcatcaagagaggcgaccgcgtctgcatctacacccccatggtggttgaagccgccatcgccatgctggcctgcacgcgtatcggcgccgtccacgccatcgttttcggtggattcagctccgacgctctggctgttcgcattcaggacgcccaggcgaaactcctcgtggtctgcgacggcaccttccgcggcgccaaggccgttcctcagaagaaggacgccgatgtggccctgaaggaatgccccaccatcgaaaaagtcatcgtcgtccggcgcgttggcgacaagatcgcgtgcgacatgactccgggaagagacctctggtggcatgatgaaatggccacggtggatgccaactgcgagtgcgagcagatggatgcggaagacaccctcttcatcctctacacttccggttcaacgggacagcccaagggcgccctccacacgacggccggctatctcctctatgccgcctacacctccaagtttgcctttgatctccatgatgaagacattcactggtgcaccgccgacatcggctgggtaaccggccacagctatgtcgtctacggacctctcgccctcggcgcaacctccatcatgttcgaaggcgttcccaactatccgacttacagccgtttctggcaggttgtggagaagtacaaggtcacatccttctacaccgcgccgacggctatccgcgccatcgccaaggaaggcgacgaatggctcaagggaatcgatctgtcctccctgagagttctctcctccgtcggcgagcctctgaatcccgaggcatggcagtggttctacgagaagatcggcaacagccagtgcccgatcgtcgatacctggtggcagaccgaaacgggcggacacatgattctgcctctgcccggcgccatcgacatcaaaccggccaaaccggcactgcccatcatgggtgtcattcccactctggtcgacgatcagaccggtgaagagctgaagaacatggaagccaacggcgctctctgcttcaagaccgcctggcccggcatcacccggaccatctacggcgaccacaaacgctatgaggaaacctacttcgaaccctatccgggcaattacttctccggtgacggcgcgctgcgcgacaaggacggctactaccggatcaccggtcgtatcgacgacgtcatcaacgtctccggtcaccgcatgggaaccgccgagatcgaggcgaccctgaacgctcatgagaaggttgccgagtccgccgtggtcggttatccccacgaggtcaaagggcagtccatctatgcctacatcaccctgaagaccggcttcgaaccgtctgaagacctgaagaaagaactgactcagtacgtcagaacgatcatcgggccgatcgcgacccctgaaaagattcagtgggcggatggtcttcccaagacaagaagcggcaagatcatgcggcgcatcctgaagaaggttgccgccaatgagcttggcgacctgggcgacaccagcacgctggccgatcccgccgtcgtggacgatctggtaaagaacagactgtaa

SEQ ID NO: 151507 - protein, 656 aa, Syntrophus aciditrophicus SB
MGEESILKEFYPVPERIKAKAWVKGRGEYDKLYAESIADSAAWWAKQADEILTFYKKWDKVEDFNFDIRKGPIHVKYFEGAKLNVSYNCLDRHLATKGDKVAIQWEGNEPGEQKAYTYKDLHTEVCKFANVLKKHGIKRGDRVCIYTPMVVEAAIAMLACTRIGAVHAIVFGGFSSDALAVRIQDAQAKLLVVCDGTFRGAKAVPQKKDADVALKECPTIEKVIVVRRVGDKIACDMTPGRDLWWHDEMATVDANCECEQMDAEDTLFILYTSGSTGQPKGALHTTAGYLLYAAYTSKFAFDLHDEDIHWCTADIGWVTGHSYVVYGPLALGATSIMFEGVPNYPTYSRFWQVVEKYKVTSFYTAPTAIRAIAKEGDEWLKGIDLSSLRVLSSVGEPLNPEAWQWFYEKIGNSQCPIVDTWWQTETGGHMILPLPGAIDIKPAKPALPIMGVIPTLVDDQTGEELKNMEANGALCFKTAWPGITRTIYGDHKRYEETYFEPYPGNYFSGDGALRDKDGYYRITGRIDDVINVSGHRMGTAEIEATLNAHEKVAESAVVGYPHEVKGQSIYAYITLKTGFEPSEDLKKELTQYVRTIIGPIATPEKIQWADGLPKTRSGKIMRRILKKVAANELGDLGDTSTLADPAVVDDLVKNRL

SEQ ID NO: 151508 - DNA, 1956 bp, Rhizobium etli CFN 42
  CDS (1)..(1956): transl_table=11
atgtcggagaagatccatccggtgccgaagcaggtgaaggcgcaggccctcatcgataaggaaaagtacctgaaatggtacgaggaaagcgtcgagaacccggacaagttctggggcaaacacggcaagcggatcgactggttcaagccctataccaaggtcaagaacacctcctttaccggcaaggtctcgatcaaatggttcgaggacggccagaccaacgtttcctataattgcatcgaccgccatctgaagacgaatggcgaccaggtggcgatcatctgggaaggcgacaacccctatatcgacaagaaaatcacctataacgagctctatgagcacgtctgccgaatggcgaatgtgttgaagaagcacggcgtcaagaagggcgatcgcgtcacgatctatatgccgatgatccccgaagcggcttacgcgatgctcgcctgcgcccgcatcggcgcagtgcattcggtcgtcttcggcggcttctcccccgaggccctggcgggacgtattgtcgactgtgaatccaccttcgtcatcacctgcgatgaaggcgtgcgcggcggcaagccggtgccgctgaaggacaacaccgatacggcaatccacatcgccgcccgccagcatgtcaatgtcagcaaggtgctggtcgtgcgccgcaccggcggcaagacgggctgggcgccgggccgcgacctctggtatcaccaggaagtcgccaccgtgaaggcggaatgcccgccggtgaagatgaaggcggaagatccgctgttcattctctatacgtcaggttcgaccggcaagccgaagggcgtgctacacacgaccggcggctatctcgtctatgcctcgatgacgcatgaatatgtcttcgactatcatcatggcgatatctactggtgcacggccgatgtcggctgggtcaccggccattcctatatcgtctatgggccgctttcgaactgcgcgacgacgctgatgttcgagggcgtgccgaatttccccgatcagggccgcttctgggaagtcatcgacaagcacaaggtcaatatcttctataccgcaccgacggcgatccgttcgctgatgggcgctggcgacgacttcgtcacgcgctcctcccgctcgtcgctgcgcctgctcggcacggtcggcgagccgatcaaccccgaagcctgggagtggtattacaatgtcgtcggcgacaagcgctgccctgtgatcgatacctggtggcagacggaaaccggcggccacatgatcacgccgctgccgggtgcgatcgatctgaaaccgggttcggcgacggtgccgttcttcggcgtcaagcctgaactggtcgacaatgagggcaaggtgctggaaggggccgccgacggcaatctctgcatcgccgacagctggcccggccagatgcgcacggtctatggcgatcacgagcgcttcatccagacctatttctccacttataagggcaagtacttcaccggcgatggctgccggcgcgacgaagacggctattactggatcaccggccgcgtcgacgacgttctcaatgtctccggccatcggctcggcaccgcggaggtggaatcggcgctcgtctcgcacaatctggtttcggaagccgcggtcgtcggttatccgcatgcgatcaagggccaggggatctattgctatgtgacgctgatggccggccacgaaggaacggacacgcttcgccaggaactggtgaagcatgtgcgcgccgagatcggcccgatcgcctcgcctgacaagatccagttcgcccccggcctgccgaagacccgctcgggcaagatcatgcgccgcatcctgcgcaagatcgccgaggacgatttcggcgctctcggcgatacctcgacacttgccgatcccgcggtcgtcgatgatctcatcgccaatcggcagaacaaggcgacggcctga

SEQ ID NO: 151509 - protein, 651 aa, Rhizobium etli CFN 42
MSEKIHPVPKQVKAQALIDKEKYLKWYEESVENPDKFWGKHGKRIDWFKPYTKVKNTSFTGKVSIKWFEDGQTNVSYNCIDRHLKTNGDQVAIIWEGDNPYIDKKITYNELYEHVCRMANVLKKHGVKKGDRVTIYMPMIPEAAYAMLACARIGAVHSVVFGGFSPEALAGRIVDCESTFVITCDEGVRGGKPVPLKDNTDTAIHIAARQHVNVSKVLVVRRTGGKTGWAPGRDLWYHQEVATVKAECPPVKMKAEDPLFILYTSGSTGKPKGVLHTTGGYLVYASMTHEYVFDYHHGDIYWCTADVGWVTGHSYIVYGPLSNCATTLMFEGVPNFPDQGRFWEVIDKHKVNIFYTAPTAIRSLMGAGDDFVTRSSRSSLRLLGTVGEPINPEAWEWYYNVVGDKRCPVIDTWWQTETGGHMITPLPGAIDLKPGSATVPFFGVKPELVDNEGKVLEGAADGNLCIADSWPGQMRTVYGDHERFIQTYFSTYKGKYFTGDGCRRDEDGYYWITGRVDDVLNVSGHRLGTAEVESALVSHNLVSEAAVVGYPHAIKGQGIYCYVTLMAGHEGTDTLRQELVKHVRAEIGPIASPDKIQFAPGLPKTRSGKIMRRILRKIAEDDFGALGDTSTLADPAVVDDLIANRQNKATA

SEQ ID NO: 151510 - DNA, 1959 bp, Rhodopseudomonas palustris HaA2
  CDS (1)..(1959): transl_table=11
atgtccgagaagatctacgacgtgccctcggaatgggcgagccgcgccttcgtcgacgacgcgaagtaccgcgagatgtacgcccgctcggtcaatgacccgaacggcttctgggccgaccaagccaaacgcatcgactggatcaagccgccgcacaagatcgagaactgctcgttcgcgcccggcaacgtctcgatcaaatggttcgaggacggcgtcctcaacgtcgcgcacaactgcatcgaccgccatctcgccacccgcggcgaccaggtcgcgatcatctgggagggcgacgacccgtcgcagtcgcgccacatcacctatcgcgagctgcacgacgaggtctgcaaattcgccaacatcctgcgcagccgcaatgtcgagaagggcgaccgcgtcaccatctatctgccgatgatccccgaagcggccttcgcgatgctggcctgcgcgcggatcggcgcgatccattcggtggtgttcgccggcttctcgccggactcgctggccggccgcatcaacgactgccagtccaagatcgtgatcaccgccgacgaaggcctgcgcggcggcaagaaggtgccgctgaaggccaatgtcgacgccgcgctgaagaagtgcgacggcgtcgactgggtgatggtggtgaagcgcaccagcgccgccatcgagatggatgacgttcgcgacttctggtaccacgaggccgccgagatggtgaccaccgagtgcccgatcgagcacatgcacgcggaagatccgctgttcatcctgtacacgtcgggatcgaccggccagcccaagggcgtgctgcacacctcgggcggctatctggtgttcgcctcgatgacgcaccaatacgtgttcgattatcacgacggcgacatctactggtgcaccgccgacgtcggctgggtcaccggccacagctacatcctctatgggccgctcgccaatggcgccaccacgctgatgttcgaaggcgtgccgaactacccgaccaattcgcggttctgggacgtcatcgacaagcacaaggtcaacatcttctacaccgcgccgaccgcgatccgggcgctgatgcaggccggcgacgagccggtgaaaaagacctcgcgcaaatcgctgcggctgctcggctcggtcggcgagccgatcaacccggaagcctgggagtggtatcaccgcgtcgtcggcgacgaccgctgcccgatcgtcgatacctggtggcagaccgaaaccggcggcatcctgatcacgccgctgcccggcgcgaccaagctgaagcccggctcggcgacgcggccgttcttcggcgtggtgccggagatcctcgatccggaaggcgtggtgctggaaggcgaatgcaccggcaatctgtgcctggcgcggtcctggccggggcagatgcgcaccgtctatggcgaccacgaacggttcgagcagacctatttctcggcctataagggcaaatacttcaccggcgacggctgccgccgcgacgccgacggctattactggatcaccggccgggtcgacgacgtcatcaacgtctccggccaccgcatgggcaccgccgaggtcgagtcctcgctggtggcgcatcccaaggtgtcggaggccgccgtggtcggctatccgcacgacatcaagggtcagggcatctacgcctatgtgaccctgatggccgggatcgagccgtcggaggagctgcgcaaggagctggtggcctgggtccgcaaggacatcggcccgatcgcctcgccggacctgatccagttcgcgcccggcctgccgaagacccgctccggcaagatcatgcgccgcatcctgcgcaagatcgccgaggacgagccctcgacgctcggcgatacctcgacgctggccgatcccgcggtggtcgacgatctcgtcgagcatcgccagaacaagcaccacaaggacaaggtcggctga

SEQ ID NO: 151511 - protein, 652 aa, Rhodopseudomonas palustris HaA2
MSEKIYDVPSEWASRAFVDDAKYREMYARSVNDPNGFWADQAKRIDWIKPPHKIENCSFAPGNVSIKWFEDGVLNVAHNCIDRHLATRGDQVAIIWEGDDPSQSRHITYRELHDEVCKFANILRSRNVEKGDRVTIYLPMIPEAAFAMLACARIGAIHSVVFAGFSPDSLAGRINDCQSKIVITADEGLRGGKKVPLKANVDAALKKCDGVDWVMVVKRTSAAIEMDDVRDFWYHEAAEMVTTECPIEHMHAEDPLFILYTSGSTGQPKGVLHTSGGYLVFASMTHQYVFDYHDGDIYWCTADVGWVTGHSYILYGPLANGATTLMFEGVPNYPTNSRFWDVIDKHKVNIFYTAPTAIRALMQAGDEPVKKTSRKSLRLLGSVGEPINPEAWEWYHRVVGDDRCPIVDTWWQTETGGILITPLPGATKLKPGSATRPFFGVVPEILDPEGVVLEGECTGNLCLARSWPGQMRTVYGDHERFEQTYFSAYKGKYFTGDGCRRDADGYYWITGRVDDVINVSGHRMGTAEVESSLVAHPKVSEAAVVGYPHDIKGQGIYAYVTLMAGIEPSEELRKELVAWVRKDIGPIASPDLIQFAPGLPKTRSGKIMRRILRKIAEDEPSTLGDTSTLADPAVVDDLVEHRQNKHHKDKVG

SEQ ID NO: 151512 - DNA, 1950 bp, Novosphingobium aromaticivorans DSM 12444; identical to SEQ ID NO: 126657
  CDS (1)..(1950): transl_table=11

SEQ ID NO: 151513 - protein, 649 aa, Novosphingobium aromaticivorans DSM 12444; identical to SEQ ID NO: 126658

SEQ ID NO: 151514 - DNA, 1938 bp, Jannaschia sp. CCS1
  CDS (1)..(1938): transl_table=11
gtgcccaaagatcaactgccgcccctgttgcctgacgcccatatcgacgctgcccgctatgacgagatgtacgcggcctccgttgcggacccggaggctttctgggacgagcatggcaagcgcatcgactggatcaagccctatacaaaggtgaaagacacgtctttcgcccatgacgatgtgcatatccgctggtttgaagacggcaccctgaacgtcagcgccaactgcatcgaccgtcatctggcggagcgtggcgaccagaccgcgatcctgtttgagcccgatgagccgacagatcccgcacagcatatcacctacaaccagcttcatgtcgaagtcagcaaattcgccaacgtcctgaagggcctgggcgtggggcgcggcgaccgtgtggtcctttacatgccgatgatcccggaggcggcctacgcgatgctggcctgcacgcgcatcggggcggtgcattccatcgtcttcgcgggcttctctcccgatgcgctgtccgcccggatcaatggctgtgacgccaagctggtgatcacctctgacggggccccgcgcgggggtcgggtgacggagctgaaagacaacgtcaacaaggcgctcttgcacaaccagatcaagacccagtgcctcgttgtgaagcgcaccggcgggcaggttgcctggatcgcggaccgggaccattggtatcacgagctggccgaaaccgtttcagccgattgcccgcccgaagagatgggggccgaagacccgctgttcattctttacacgtccggctccaccggcatgcccaagggcgtggtgcatacgacgggcggctacatcgtctatgcctccatgacccacgaatacacgtttgactacaaggacggcgacgtcttctggtgcacggcggatgtgggctgggtcacgggccacagctatatcgtctatggcccgctggccaatggcggcaccacgctgatgtttgagggcgtgcccacctaccccgacgcgggccggttctgggaagtctgcgagaaacacaaggtcaaccagttctacaccgcccccaccgccatccgcgcgttgatgggtaaggggacgtcctttgtggagaagtacgacctgagcagtctgaaattgctgggaacggtcggcgaaaacatcaaccctgaggcctggaactggtacaacgagaatgtcggtaagggccgctgccccatcgtcgacacgtggtggcagacggaaacgggcggccacatgatgacccccctgcccggcgcgcatacgttgaagcccggatcggcgcagaagccgttctttggcgtgcaaccgctggtgctggacccgacgagcgcggaggttattgagggcaatgacgtggaaggcgtgctggtcatcgccgacagctggcccggccagatgcgcaccgtctggggcgaccatgagcggttcgtggccacctatttcagcgactacaagggctactacttcagcggcgacggctgcaaacgcgacgcggacggtgagtattggatcacgggccgcgtggacgatgtgatcaacgtatcgggccaccgcatgggcacgcccgagatcgagagcgcgctggtcgcccatgaaaccgtgtccgaggccgccgtggtcggctacccgcatccggtcaaaggccagggcatctattgctacgtgaccctgatgaatgatgagacgccgtccgatgaattgaaggccacgttgcaggcctgggtccggcaagagattggcccaatcgccaagccggacgtcatccaatgggcgccgggcctgcccaagacccgctccggcaagatcatgcggcgcatcctgcgcaagatcgccgagaatgattacggcgcgcttggcgatacgtccacattggccgatccatcggtggtggacgatctgatcgccaaccgcgcggacacctga

SEQ ID NO: 151515 - protein, 645 aa, Jannaschia sp. CCS1
MPKDQLPPLLPDAHIDAARYDEMYAASVADPEAFWDEHGKRIDWIKPYTKVKDTSFAHDDVHIRWFEDGTLNVSANCIDRHLAERGDQTAILFEPDEPTDPAQHITYNQLHVEVSKFANVLKGLGVGRGDRVVLYMPMIPEAAYAMLACTRIGAVHSIVFAGFSPDALSARINGCDAKLVITSDGAPRGGRVTELKDNVNKALLHNQIKTQCLVVKRTGGQVAWIADRDHWYHELAETVSADCPPEEMGAEDPLFILYTSGSTGMPKGVVHTTGGYIVYASMTHEYTFDYKDGDVFWCTADVGWVTGHSYIVYGPLANGGTTLMFEGVPTYPDAGRFWEVCEKHKVNQFYTAPTAIRALMGKGTSFVEKYDLSSLKLLGTVGENINPEAWNWYNENVGKGRCPIVDTWWQTETGGHMMTPLPGAHTLKPGSAQKPFFGVQPLVLDPTSAEVIEGNDVEGVLVIADSWPGQMRTVWGDHERFVATYFSDYKGYYFSGDGCKRDADGEYWITGRVDDVINVSGHRMGTPEIESALVAHETVSEAAVVGYPHPVKGQGIYCYVTLMNDETPSDELKATLQAWVRQEIGPIAKPDVIQWAPGLPKTRSGKIMRRILRKIAENDYGALGDTSTLADPSVVDDLIANRADT

SEQ ID NO: 151516 - DNA, 1938 bp, Saccharophagus degradans 2-40; identical to SEQ ID NO: 122048
  CDS (1)..(1938): transl_table=11

SEQ ID NO: 151517 - protein, 645 aa, Saccharophagus degradans 2-40; identical to SEQ ID NO: 122049

SEQ ID NO: 151518 - DNA, 1944 bp, Rhodopseudomonas palustris BisB18
  CDS (1)..(1944): transl_table=11
atgtccgagaagatctatgacgtgtccccggaatgggcggcgcgcgccttcatcgacgacgcaaaataccaggaaatgtacgcccgctcggtgagcgatccgaacggattctggggcgagcaggcgcagcgaatcggctggatcaagccgttcaccaaggtcgaggacacctcgttcgcgcccggccacgtctcgatcaaatggttcgaggacggcgtgctcaacgtcgcctggaattgcatcgatcggcatctgcccgatcgcgccgagcagaccgcgatcatctgggaaggcgacgatccgtcggaatcccgcgagatcagctatcgcgagctgcacgacgaagtctgcaaattcgccaacatcctgcgcagccgcaacgtccagaagggcgaccgcgtcaccatctatctgccgatgattcccgaagccgccttcgccatgctggcctgcgcgcggatcggcgcgattcattcggtggtgttcgccggcttctcgccggactcacttgcccagcgcatcaccgactgccagtcgaagatcgtgatcaccgccgacgaaggcctgcgcggcggccgcaaggtgccgctgaaggccaatgtcgacgccgccttgaagaagtgcgagggcgtcgactgggtggtggtggtgaagcgcaccggcgccgacgtgttcatggatgacgtgcgcgacttctggtacgccgaagccgccgagatggtgaccacggagtgcccgtgcgagccgatgcacgccgaagacccgctgttcatcctctacacctcgggctccaccggccagcccaagggcgtgctgcacacctccggcggctacctggtgttcgccgcgatgacgcatcaatacgtgttcgactatcacgacggcgacatctactggtgcaccgccgacgtcggctgggtcaccggccacagctacattctctatgggccgctggccaacggcgccaccacgctgatgttcgaaggcgtgccgaactatccgaccaactcccggttctgggaggtgatcgacaagcataaggtcaacatcttctacaccgcgccgaccgcgatccgcgccttgatgcagggcggcgacgagccggtgaaaaagacctcgcgcaagagcctgcggctcttgggctcggtcggcgagccgatcaatccggaagcctgggaatggtatcaccgcgtgatcggcgaggaccgctgtccgatcgtcgatacctggtggcagaccgagaccggcggcatcctgatcacgccgctgcccggcgccaccaaattgaagcccggctcggcgacaaggccgttcttcggcgtggtgccgcagatcctcgacgccgaagccaacgtgctggaaggcgaatgccagggcaatctgtgcctggcgcggtcctggccggggcagatgcgcaccgtctatggcgatcacgcccgtttcgagagcacctacttctcggcctatccgggcaagtacttcaccggcgacggctgccgccgcgacgccgacggctactattggatcaccggccgggtcgacgacgtcatcaacgtttccggccaccgcatgggcaccgccgaagtcgagagttcgttggtggcgcacgccaaggtctcggaggccgcagtggtcggctatccgcacgacatcaagggccagggcatctacgcttacgtcacgctgatggacggcaccgagccgaccgaggagctgcgcaaggaattggtcgcctgggtgcgcaaggacatcggtccgatcgcctcgcccgatttgatccagttcgcccccagcctgccgaagacccgctccggcaagatcatgcggcgaatcttacgcaagatcgccgaggacgagccgtcgacgctcggcgacacctcgacgctggccgatccggcggtggtcgaggatctggtcgagcaccgccagaacaagcgggtgtga

SEQ ID NO: 151519 - protein, 647 aa, Rhodopseudomonas palustris BisB18
MSEKIYDVSPEWAARAFIDDAKYQEMYARSVSDPNGFWGEQAQRIGWIKPFTKVEDTSFAPGHVSIKWFEDGVLNVAWNCIDRHLPDRAEQTAIIWEGDDPSESREISYRELHDEVCKFANILRSRNVQKGDRVTIYLPMIPEAAFAMLACARIGAIHSVVFAGFSPDSLAQRITDCQSKIVITADEGLRGGRKVPLKANVDAALKKCEGVDWVVVVKRTGADVFMDDVRDFWYAEAAEMVTTECPCEPMHAEDPLFILYTSGSTGQPKGVLHTSGGYLVFAAMTHQYVFDYHDGDIYWCTADVGWVTGHSYILYGPLANGATTLMFEGVPNYPTNSRFWEVIDKHKVNIFYTAPTAIRALMQGGDEPVKKTSRKSLRLLGSVGEPINPEAWEWYHRVIGEDRCPIVDTWWQTETGGILITPLPGATKLKPGSATRPFFGVVPQILDAEANVLEGECQGNLCLARSWPGQMRTVYGDHARFESTYFSAYPGKYFTGDGCRRDADGYYWITGRVDDVINVSGHRMGTAEVESSLVAHAKVSEAAVVGYPHDIKGQGIYAYVTLMDGTEPTEELRKELVAWVRKDIGPIASPDLIQFAPSLPKTRSGKIMRRILRKIAEDEPSTLGDTSTLADPAVVEDLVEHRQNKRV

SEQ ID NO: 151520 - DNA, 1956 bp, Shewanella denitrificans OS217
  CDS (1)..(1956): transl_table=11
atgaattcgccaactgtttacccagtacccagccagatcagtgcccatgctcatatcgatgagcaaacctaccagcgcatgtatcaggcctctatcgacaatccagagcgcttctggggcgaacaaggcaaacgcatagattggatcaccccttacagtcaaactcaagtgaagaaaaccagcttcgatgcaaacaacttgtctatccaatggttcgccgatggcacactgaatgcctcaagtaattgcctcgacaggcaccttgagcgcaatggcgacaagattgccatcctctgggaaggtgatgatgccaaagagcagcgccaattaagctatcgtgagcttcacacccaagtgtgtcagtttgccaatgtgcttaaagctcaaggggtagtgaagggcgatatcgttaccctttatatgcccatggtgccagaggccgccgtggccatgttagcctgcgcccgcattggcgccgtgcattcggtgatttttggcggtttctcaccagattctatcgcttcacgcgtgattgatggtaaatcaaaagttatcatcaccgccgatgaaggcattcgcgctggccgcactatccccctaaaacacaacgtcgatgaagccctagcccgtcctagcgtcacttgcgtgaataatgtcatcgtgcttaaacgcacaggcgccaacgttgactggcagcaaggtcgtgatttggactgggatgaattaatggctggcgtcagcagtgattgccccgccgaagaaatgaacgcagaagatccgctatttctactctacacttcaggctcgaccggtaacccaaaaggcgtgctgcataccacaggcggctatctggtttatgccgccatgactcatgaatatgtttttgattataaagaaaatgaagtctattggtgcaccgccgatgttggctggatcacaggccattcctacatggtttacggcccctttgccaatggggctactgtgctgatgcacgagggcgtgcccaactatcccacccctgcccgcctcggcgaaatagtggacaggcataaagtgaatatcctctataccgcgcccacgctaattcgggcattaatggccgaaggcaaggagcatttcaacggctttagtggcgagtcattacgcattatggggtctgtgggcgagcccattaacccagaagcctggcgttggtaccacgaagtcatcggccatgagcattgccctatcgtggatacttggtggcaaactgaaaccggcggcatcctaatcagcccattaccaggcgccattgccactaaacctggctcagcgactcggcctttctttggagtaaagcctgctattgtggatagcacgggacaaatacttgagggcgctgtggaaggcaatctggtgatgttggattcttggccgggtcagatgcgcactgtgtatggcgaccatgcacgcttcgccctcacctactttagtacctttaaaggcatgtatttcaccggtgatggtgcaagacgtgatgaagacgggtattactggataacaggtcgagtggacgatgtgataaacgtctcaggccaccgcctcggcactgcggaagttgaaagcgcattggtggcccatgagcaggtcgccgaagctgcggttgtgggctatccccatgacattaaaggccaaggcatttacgcctacgtcactttagtccatgacgccgagccttcagaggccctgcgtcaagaattaaggcagtgggtccgtaaagaaattggcgctctggcaaccccagatctgattcaatgggccacaggcttacctaagacacgttcaggcaagataatgcgccgcttcctgcgtaaaattgccgccaatgaagtcaccaacttaggggattcatccaccttggccgatccctccgtcatagacaccttgatcgccagccgcttaaatcagcgttaa

SEQ ID NO: 151521 - protein, 651 aa, Shewanella denitrificans OS217
MNSPTVYPVPSQISAHAHIDEQTYQRMYQASIDNPERFWGEQGKRIDWITPYSQTQVKKTSFDANNLSIQWFADGTLNASSNCLDRHLERNGDKIAILWEGDDAKEQRQLSYRELHTQVCQFANVLKAQGVVKGDIVTLYMPMVPEAAVAMLACARIGAVHSVIFGGFSPDSIASRVIDGKSKVIITADEGIRAGRTIPLKHNVDEALARPSVTCVNNVIVLKRTGANVDWQQGRDLDWDELMAGVSSDCPAEEMNAEDPLFLLYTSGSTGNPKGVLHTTGGYLVYAAMTHEYVFDYKENEVYWCTADVGWITGHSYMVYGPFANGATVLMHEGVPNYPTPARLGEIVDRHKVNILYTAPTLIRALMAEGKEHFNGFSGESLRIMGSVGEPINPEAWRWYHEVIGHEHCPIVDTWWQTETGGILISPLPGAIATKPGSATRPFFGVKPAIVDSTGQILEGAVEGNLVMLDSWPGQMRTVYGDHARFALTYFSTFKGMYFTGDGARRDEDGYYWITGRVDDVINVSGHRLGTAEVESALVAHEQVAEAAVVGYPHDIKGQGIYAYVTLVHDAEPSEALRQELRQWVRKEIGALATPDLIQWATGLPKTRSGKIMRRFLRKIAANEVTNLGDSSTLADPSVIDTLIASRLNQR

SEQ ID NO: 151522 - DNA, 1953 bp, Rhodopseudomonas palustris BisB5
  CDS (1)..(1953): transl_table=11
atgtccgagaaaatctacgacgtgccctcggaatgggcgagccgcgccttcgtggacgatgcgaagtatcgcgagatgtacgcccgctcggtcagcgacccgaacggcttctgggccgagcaggccaagcgcctcgattggatcaagccgccgcacaagatcgagaactgctccttcgcgcccggcaacgtctcgatcaaatggttcgaggacggcgtcctcaacgtcgcgcataattgcatcgaccggcatctgcacacccgcggcgatcaggtcgcgatcatctgggagggcgacgatccctcgcagtcgcgcaagatcacctatcgcgagctgcatgacgaggtctgcaaattcgccaacatcctgcgcaaccgcaatgtcggcaagggcgaccgcgtcaccatctatctgccgatgattccggaagccgccttcgcgatgctggcctgcgcccggatcggcgcgatccattcggtggtgttcgccggcttctcgccggacagtctcgcccagcgcatcaccgactgtcagtccaaggtggtgatcaccgccgacgaaggcctgcgcggcggccgtaaggtgccgctgaaggccaatgtggatgccgcgctcgccaaatgcggcggcgtcgactgggtggtcgtggtgaagcgcaccggcgctgcggtcgaaatggatgacgtccgcgacttctggtaccacgaggccgccgaaatggtgaccacggagtgcccgatcgagccgatgcacgccgaagacccgctgttcatcctctacacctcggggtcgaccggccagcccaagggcgtgctgcacaccaccggcggctatctggtgttcgccgggatgacgcaccaatacgtgttcgattatcacgacggcgacgtctactggtgcaccgccgacgtcggctgggtcaccggtcacagctacatcctgtacgggccgctcgccaacggcgcgaccacgctgatgttcgaaggcgtgccgaactacccgaccaattcgcggttctgggaagtgatcgacaagcaccaggtcaacatcttctacaccgcgccgaccgcgatccgcgcgctgatgcaggccggcgacgagccggtgaagaagacgtcgcgcaagagcctgcggctgctcggttcggtcggcgagccgatcaatccggaagcctgggagtggtatcaccgcgtcgtcggcgacgaccgttgcccgatcgtcgacacctggtggcagaccgagacgggcggcatcctgatcacgccgctgcccggcgcgaccaagctcaagcccggctcggcgacgcggccgttcttcggcgtggtgccggagatcctcgatccggaaggcgtggtgctggagggcgaatgcaccggcaatctgtgtctggcgcgatcctggccgggccagatgcgcacggtgtacggcgatcacgcccggttcgagcagacctacttctcggcctataagggcaagtacttcaccggcgacggctgccgccgcgacgccgacggctattactggatcaccggccgggtcgacgacgtcatcaacgtctccggccaccgcatgggcaccgccgaggtcgaaagctcgctggtcgcgcatcccaaggtgtcggaagccgccgtggtcggctatccgcacgacatcaagggccagggcatctacgcctatgtgacgctgatggccgggatcgagcccagcgaggagctgcgcaaggagctggtcgcctgggtccgcaaggacatcggcccgatcgcctcgccggacctgatccagttcgcgcccggcctgccgaagacccgctccggcaagatcatgcgccgcatcctgcgcaagatcgccgaggacgagccctcgacgctcggcgacacctcgacgctggccgatcccgcggtggtcgacgatctcgtcgagcaccggcagaacaagcaccacaaggcggtctga

SEQ ID NO: 151523 - protein, 650 aa, Rhodopseudomonas palustris BisB5
MSEKIYDVPSEWASRAFVDDAKYREMYARSVSDPNGFWAEQAKRLDWIKPPHKIENCSFAPGNVSIKWFEDGVLNVAHNCIDRHLHTRGDQVAIIWEGDDPSQSRKITYRELHDEVCKFANILRNRNVGKGDRVTIYLPMIPEAAFAMLACARIGAIHSVVFAGFSPDSLAQRITDCQSKVVITADEGLRGGRKVPLKANVDAALAKCGGVDWVVVVKRTGAAVEMDDVRDFWYHEAAEMVTTECPIEPMHAEDPLFILYTSGSTGQPKGVLHTTGGYLVFAGMTHQYVFDYHDGDVYWCTADVGWVTGHSYILYGPLANGATTLMFEGVPNYPTNSRFWEVIDKHQVNIFYTAPTAIRALMQAGDEPVKKTSRKSLRLLGSVGEPINPEAWEWYHRVVGDDRCPIVDTWWQTETGGILITPLPGATKLKPGSATRPFFGVVPEILDPEGVVLEGECTGNLCLARSWPGQMRTVYGDHARFEQTYFSAYKGKYFTGDGCRRDADGYYWITGRVDDVINVSGHRMGTAEVESSLVAHPKVSEAAVVGYPHDIKGQGIYAYVTLMAGIEPSEELRKELVAWVRKDIGPIASPDLIQFAPGLPKTRSGKIMRRILRKIAEDEPSTLGDTSTLADPAVVDDLVEHRQNKHHKAV

SEQ ID NO: 151524 - DNA, 1950 bp, Chromohalobacter salexigens DSM 3043
  CDS (1)..(1950): transl_table=11
atgaccgaacagcagaaagtctacccggtggcggaggagttcgccgccaatgcctgggcggataacgagacttacctgagcctctatcagcgctccgtcgacgatcccgagggcttctgggccgagcaggccgagtcgctggaatggttcaagacgccgaccaagatcaagaacacgtcattcgcgtcatccaacgtggatatccgctggttcgaggatggcgaactcaatgcctcctacaattgcctcgaccgccacctcgagacgcgtggcgatcagccggcgatcatctgggagggcgacgacccgagccacgacaagaccatcacctaccgcgagctgcatgctcaggtctgtcggctgggcaacgcgctcaaggagatgggcgtcggcaagggggacaccgtcacgctctacatgccgatgatccccgaggcggcggtcgccatgctggcgtgtgcccgcatcggggcggtgcactcggtggtgttcggcggcttctcgccggatgccctggcgcaacgcgtggtcgatgcccagtctcgcgtggtcattaccgccgacgagtcggtacgcggcggcaagcacgtaccgctcaaggacaatgtcgatgcagcgctgacacgcgacggcaccgatatcgtcgagaaggtgctggtggtccagcggaccggcggcgacatcgagtggcacgacggtcgcgacgcctggtaccacgagtgggtcgagcgccagtcgagcgaatgcccggccgagcggatgaacgccgaggatgccttgttcatcctgtatacctcgggctccaccggccgtcccaaggggctcaagcataccaccgggggctatctgctctacgcggcactgacgcaccgctacgtgttcgattaccacgatggcgaggtgtactggtgcagcgccgacgtggggtgggtgaccgggcacagctacatcgtctatggccccctggccaacggcgccaccacgctgatgttcgaaggcgtgccgagctatccctcgcacgggcgtctcggcgagatcgtcgacaagcacggcgtgtcgattctctatacgtcgccgacggcgattcgtgccttgatggcgcacggcgagaacatcatggactccagccggcgcgacactctgcgcgtgctggggtcggtgggcgagccgatcaatcccgaggcatggagctggttccaccgggtgatcggcaattcgcgctgcccgatcgtcgatacctggtggcagaccgagaccggcgggatcatgatcacgccgctgcccggtgccaccgacctcaagccgggctccgccacacggccgttcttcggtgttcagccggcgctgctcgacaacgacggcaacctgctcgaaggcgccacgtccggcaacctggtgatcctcgactcctggccggggcaggcgcgcaccatctggaacgaccacgagcgtttcgtgcagacgtacttctccgcctatgaaggcgtctatttcacgggtgacggctgccgccgcgacgaggacggctattactggatcaccgggcgcatcgacgacgtgctcaacgtgtccggccatcgcatgggaaccgcggaaatcgagtcgtccctggtggcgcacagcgccgtggccgaggcagccgtggtagggtacccgcacgacatcaagggccagggcatctatatctacgtgaccctgagcgacgatgccgaacccagcgaggaattgcgcaaggagctcacccagtgggtgcgcaaggacatcggcccgatcgcgacgccggatgtcattcagtgggcgccgggcctgcccaagacgcgctccggcaagatcatgcggcgcattttgcgcaagattgccgccaatgagtgcgaaggcctgggggatacgagtacactggcggatccgagcgtggtcgatgagttgatcgagcaccgcgccaatcgttga

SEQ ID NO: 151525 - protein, 649 aa, Chromohalobacter salexigens DSM 3043
MTEQQKVYPVAEEFAANAWADNETYLSLYQRSVDDPEGFWAEQAESLEWFKTPTKIKNTSFASSNVDIRWFEDGELNASYNCLDRHLETRGDQPAIIWEGDDPSHDKTITYRELHAQVCRLGNALKEMGVGKGDTVTLYMPMIPEAAVAMLACARIGAVHSVVFGGFSPDALAQRVVDAQSRVVITADESVRGGKHVPLKDNVDAALTRDGTDIVEKVLVVQRTGGDIEWHDGRDAWYHEWVERQSSECPAERMNAEDALFILYTSGSTGRPKGLKHTTGGYLLYAALTHRYVFDYHDGEVYWCSADVGWVTGHSYIVYGPLANGATTLMFEGVPSYPSHGRLGEIVDKHGVSILYTSPTAIRALMAHGENIMDSSRRDTLRVLGSVGEPINPEAWSWFHRVIGNSRCPIVDTWWQTETGGIMITPLPGATDLKPGSATRPFFGVQPALLDNDGNLLEGATSGNLVILDSWPGQARTIWNDHERFVQTYFSAYEGVYFTGDGCRRDEDGYYWITGRIDDVLNVSGHRMGTAEIESSLVAHSAVAEAAVVGYPHDIKGQGIYIYVTLSDDAEPSEELRKELTQWVRKDIGPIATPDVIQWAPGLPKTRSGKIMRRILRKIAANECEGLGDTSTLADPSVVDELIEHRANR

SEQ ID NO: 151526 - DNA, 1959 bp, Nitrobacter hamburgensis X14
  CDS (1)..(1959): transl_table=11
atgtccgacaagatttatgacgtaagcgcggattgggccaagcgggcctgggtcgacgacgccaaatatcacgagatgtacgcgcgctcgatcaaggacccgaacgggttctggtccgaggccgccaagcgggtcgactggatcacgcccttcaccaaggtcgagaacacctcgttcgaactcggcaaggtgtcgatcaaatggttcgaggatggcgtgctcaacgccgcctacaactgcatcgaccggcatctggaagagcgcggcgaccagaccgcgatcatctgggaaggcgacgatccctcgcagtcgaggcacatcagctatcgcgaactgcacgacgaagtctgcaagatggccaacatcctgcggctgcgcaacgtcaagaagggcgatcgcgtcaccatctacctgccgatgattccggaagccgcctacgccattctcgcctgcgcgcggatcggcgcgatccactcggtggtgttcggcggcttctcgcccgattccatcgccggacgtctgcgcgattgcaaatcccgcgtcgtcatcacctccgacgagggcctgcgcggcggccgcaccatcgccatgaaggccaacgtcgataccgcgatcgaaaaggtcaacggcgaggtcgactgggtgatcgtcgtcaagcgcaccggcggcaaggtcaacatgaacccgacgcgcgacgtctggtatcacgaggccgcggccgtggtcgaaagcgaatgtccgtgcgagccgatgcacgcggaagacccgctgttcatcctctacacctcgggctcgaccggacagcccaagggcgtgctgcacaccaccgccggctacctgatcttcgtggcgatgacgcaccagtacgtgttcgactatcacgacggcgacatctactggtgcaccgccgacgtcggctgggtcaccggccacagctacattctctacgggccgctgtgcaacggcgcgaccacgatgatgttcgagggcgtgccgaactatccggacaattcgcggttctggaatgtgatcgacaagcacaaggtcaacatcttctacaccgcgccgaccgcgatccgggccttgatgcaggggggcgacgatccggtgaagaaaacctcgcgcgcaagcctgcgcctgctcggctcggtcggcgagccgatcaatccggaagcctgggaatggtaccaccgcgtggtcggcgacggccgctgcccggtggtcgatacctggtggcagaccgagaccggcggcatcatgatctcgccgctgccgggtgcgatcgcgcagaagcccggctcggcgaccaggccgttcttcggaatcgtgcccgagatcgtcgatgccgacggcaaggtgctggaaggcgaatgcagcggcaatctgtgcatcgcgcggtcgtggccggcccaggtgcgcacggtctatggcgatcacgcccgcttcgagcagacttacttctcctcctacaagggcaagtacttctccggtgacggctgccgccgcgacgccgacggctactactggatcaccggccgcgtcgatgacgtcatcaacgtctccggccaccgcatgggcacggcggaagtcgaaagctcgctggtggcgcacgagagcgtgtcggaggctgccgtggtcggctatccccataacatcaagggccagggcatctacgcctacgtgaccctgatgcagggcgtggagccgagcgagacgctgcgcaaggaattggtcgcctgggtgcgcaaggacatcggcccgatcgcgtcgcccgacctgatccagttcgcgccgggcctgccgaaaacccgttccggcaagatcatgcgccgcatcctgcgcaagattgccgaggacgagccgtccagccttggcgacaccacgacgctggccgatcccggcgtcgtcaccgacctcgtcaagaatcgtcagaacaagaaggacggcgccgtggcgtag

SEQ ID NO: 151527 - protein, 652 aa, Nitrobacter hamburgensis X14
MSDKIYDVSADWAKRAWVDDAKYHEMYARSIKDPNGFWSEAAKRVDWITPFTKVENTSFELGKVSIKWFEDGVLNAAYNCIDRHLEERGDQTAIIWEGDDPSQSRHISYRELHDEVCKMANILRLRNVKKGDRVTIYLPMIPEAAYAILACARIGAIHSVVFGGFSPDSIAGRLRDCKSRVVITSDEGLRGGRTIAMKANVDTAIEKVNGEVDWVIVVKRTGGKVNMNPTRDVWYHEAAAVVESECPCEPMHAEDPLFILYTSGSTGQPKGVLHTTAGYLIFVAMTHQYVFDYHDGDIYWCTADVGWVTGHSYILYGPLCNGATTMMFEGVPNYPDNSRFWNVIDKHKVNIFYTAPTAIRALMQGGDDPVKKTSRASLRLLGSVGEPINPEAWEWYHRVVGDGRCPVVDTWWQTETGGIMISPLPGAIAQKPGSATRPFFGIVPEIVDADGKVLEGECSGNLCIARSWPAQVRTVYGDHARFEQTYFSSYKGKYFSGDGCRRDADGYYWITGRVDDVINVSGHRMGTAEVESSLVAHESVSEAAVVGYPHNIKGQGIYAYVTLMQGVEPSETLRKELVAWVRKDIGPIASPDLIQFAPGLPKTRSGKIMRRILRKIAEDEPSSLGDTTTLADPGVVTDLVKNRQNKKDGAVA

SEQ ID NO: 151528 - DNA, 1962 bp, Pseudomonas entomophila L48
  CDS (1)..(1962): transl_table=11
atgagtgcggctccactgtatcccgttcgtcccgaggttgcggccagtaccctgaccgacgaggccacctacaaggccatgtaccagcaatcggtgatcaacccggacggcttctggcgcgagcaggcccagcgtctggactggatcaagcccttcaccaaggtcaagcagacctcgttcgacgaccaccatgtcgatatcaagtggttcgccgacggcactctgaacgtttcctacaactgcctggaccgccaccttgccgagcgcggtgaccaggtcgccatcatctgggagggcgacgatccttccgagcaccgcaacatcacctaccgcgagctccacgagcaggtctgcaagttcgccaacgccctgcgtggccaggacgtgcaccgtggcgacgtggtgaccatctacatgccgatgatccccgaggccgtggtcgccatgctggcctgcgcccgcatcggcgcgatccactcggtggtgttcggtggcttctcaccggaagcactggccgggcgcatcatcgactgcaagtcgaaagtggtgatcactgccgacgaaggtgtgcgcggtgggcgtcgcaccccgctcaaggccaacgtcgacctggccctgaccaaccctgaaaccagcagcgtgcagaagatcatcgtgtgcaagcgcaccggtggcgacatcgcctggcaccagcaccgcgacatctggtacgaagacctgatgaaggtcgcctccagccactgcgcgccgaaagagatgggcgcggaagaagcgctgttcatcctttatacctccggttcgaccggcaagccgaagggcgtgctgcacaccaccggcggctacctggtctacgccgcgctgactcatgagcgcgtgttcgactaccgtccgggcgaggtctactggtgcaccgccgacgtgggctgggtcaccgggcacagctatatcgtctacggcccgctggccaatggtgcggccacgctgctgttcgagggcgtgccgaactatccggacatcactcgcgtgtcgaagatcgtcgacaagcacaaggtcaatatcctctacaccgcgccaactgctattcgcgccatgatggccgagggcgaggcggcggtggccggtgccgatggctccagcctgcgcctgctgggttcggtgggcgagccgatcaaccccgaggcctggaactggtactacaagaccgtcggcaagcagcgctgcccgatcgtcgatacctggtggcagaccgagaccggtggcgtgctgatcagcccgctgccgggcgccaccgcgctgaaaccgggctcggcaacccgtccgttcttcggtgtggtaccggcgctggtggacaacctgggcaacctgatcgaaggtgccgccgagggcaacctggtgatcctcgactcctggccgggtcagtcgcgttcgctgtacggcgaccacgaccgtttcgtcgacacctacttcaagaccttccgcggcatgtacttcaccggtgacggtgcccgtcgcgacgaagacggctactactggatcaccggccgcgtggacgacgtactcaacgtatccgggcaccgcatggggaccgccgagatcgagagcgccatggtggcgcacgcgaaagtcgccgaggcggcggtggtgggtgtgccgcacgacatcaaggggcagggtatctatgtctatgtcaccctcaatgctggtgaggaaccgagcgagcagctgcgtctggagctgaagaactgggtgcgcaaggagatcggtccgatcgcctcgccggatgtgatccagtgggcgcccggcttgccgaagacccgctcgggcaagatcatgcgccgcatcctgcgtaagatcgccaccgccgaatacgatgcgctgggtgatatctcgacgctggccgatccgggtgtggtgcagcacctgatcgacacccacaaggcgatgaacctggcgtcggcctga

SEQ ID NO: 151529 - protein, 653 aa, Pseudomonas entomophila L48
MSAAPLYPVRPEVAASTLTDEATYKAMYQQSVINPDGFWREQAQRLDWIKPFTKVKQTSFDDHHVDIKWFADGTLNVSYNCLDRHLAERGDQVAIIWEGDDPSEHRNITYRELHEQVCKFANALRGQDVHRGDVVTIYMPMIPEAVVAMLACARIGAIHSVVFGGFSPEALAGRIIDCKSKVVITADEGVRGGRRTPLKANVDLALTNPETSSVQKIIVCKRTGGDIAWHQHRDIWYEDLMKVASSHCAPKEMGAEEALFILYTSGSTGKPKGVLHTTGGYLVYAALTHERVFDYRPGEVYWCTADVGWVTGHSYIVYGPLANGAATLLFEGVPNYPDITRVSKIVDKHKVNILYTAPTAIRAMMAEGEAAVAGADGSSLRLLGSVGEPINPEAWNWYYKTVGKQRCPIVDTWWQTETGGVLISPLPGATALKPGSATRPFFGVVPALVDNLGNLIEGAAEGNLVILDSWPGQSRSLYGDHDRFVDTYFKTFRGMYFTGDGARRDEDGYYWITGRVDDVLNVSGHRMGTAEIESAMVAHAKVAEAAVVGVPHDIKGQGIYVYVTLNAGEEPSEQLRLELKNWVRKEIGPIASPDVIQWAPGLPKTRSGKIMRRILRKIATAEYDALGDISTLADPGVVQHLIDTHKAMNLASA

SEQ ID NO: 151530 - DNA, 1935 bp, Pseudomonas entomophila L48
  CDS (1)..(1935): transl_table=11
atgttcgatatccgcgactccccccaggccctggccgtcagccaggccgcgcaactctccgacgacgactaccgccgcctctatcgccagtcgatcgacgaccccgacaccttctgggccaaacaggccaagcgcctggactggatcaagccctggtcgagcgtgcaacaatgcgacctcaagaccggcaaggcacgctggttcgatggcgctcaactgaacgtcagccacaactgcatcgaccgccacctggcgcaacggggcgaacagaccgccctgctatgggaaggcgacgatcccggcgacagcaaggccgtcagctaccgcgaactgcaccgccaggtctgccgcctggccaacgcactcaaagcgcgaggcgtgaaaaagggcgaccgggtgtgcatctacatgccgatgatccccgaggccgcctacgccatgctcgcctgcacgcgcattggcgccatccactccgtggtgttcggcggtttctcgcccgatgccctgcgcgaccgcattctcgatgccgactgccgcaccgtgatcaccgccgacgaaggtatacgtggcggcaagcgaatcccgctcaaggaaaacgtcgacaaggcgctcgccagctgcccggcggtgagcagcgtgctggtggtcaagcgcaccggggcggatgtgacctggagccagggccgcgatctctggtatcacgaggcaaccgagaaagccggtgacgactgcccggccgaacccatggaggccgaggatccgctgttcatcctctatacctccggcagcaccggcaaacccaagggcgtgctgcacaccaccggcggctacctgctgcaggccaccctcaccttcaaggtggtgttcgactaccgcgatggcgaggtgttctggtgtacagccgacgtcggctgggtcaccggccacagctacatcgtctacgggccgctggccaacggtgcaacttcgctgatgttcgagggcgtgcccaactatcccgacacctcgcgcttctggcaggtggtggacaagcacaaggtgaatatcttctacaccgcgcccacggccctgcgggcgctgatgcgcgaaggctccgcccccctgcagaccacatcacgccagagcctgcgcctgctcggcagcgtcggtgagccgatcaacccggaagcctgggaatggtacttcgaggcggtcgggcagaaacgctgccccatcgtcgacacctggtggcagaccgagaccggcggcatcatgctcacgcccttgcccggcacccccaggctcaagcccggttgcgcgacccagcccatgttcggcgtgcagccggtactgctggatgaaaaaggcaagctcatcgaaggccccggcgccggcctgctggcgatcaaggccagctggccggggcagatccgcagcgtctacggcgaccaccagcgcatggtcgacacctacttcaaacccctgcccggctactacttcaccggcgacggcgcgcgccgcgacgccgatggcgactactggatcaccgggcgcatcgacgatgtgatcaacgtctccggccaccgcatcggcaccgccgaggtggaaagcgccctggtgctgcacgacagcgtcgccgaagccgccgtggtgggctacccccacgacctcaagggccagggtatctatgccttcgtcacccccatgagcggcgtcacgcccgacgatgcactcaagcaggaattgctggcgctggtcagcaaggagatcggcagcttcgccaaacccgaactgatccagtgggccccggccttgcccaagacgcgctcgggcaagatcatgcggcgtatactgcgcaagatcgcctgcaacgaactggacaacctgggagacacctccaccctcgccgacccgagcgtggtccagggcttgatcgacaagcgtctcaaccaatag

SEQ ID NO: 151531 - protein, 644 aa, Pseudomonas entomophila L48
MFDIRDSPQALAVSQAAQLSDDDYRRLYRQSIDDPDTFWAKQAKRLDWIKPWSSVQQCDLKTGKARWFDGAQLNVSHNCIDRHLAQRGEQTALLWEGDDPGDSKAVSYRELHRQVCRLANALKARGVKKGDRVCIYMPMIPEAAYAMLACTRIGAIHSVVFGGFSPDALRDRILDADCRTVITADEGIRGGKRIPLKENVDKALASCPAVSSVLVVKRTGADVTWSQGRDLWYHEATEKAGDDCPAEPMEAEDPLFILYTSGSTGKPKGVLHTTGGYLLQATLTFKVVFDYRDGEVFWCTADVGWVTGHSYIVYGPLANGATSLMFEGVPNYPDTSRFWQVVDKHKVNIFYTAPTALRALMREGSAPLQTTSRQSLRLLGSVGEPINPEAWEWYFEAVGQKRCPIVDTWWQTETGGIMLTPLPGTPRLKPGCATQPMFGVQPVLLDEKGKLIEGPGAGLLAIKASWPGQIRSVYGDHQRMVDTYFKPLPGYYFTGDGARRDADGDYWITGRIDDVINVSGHRIGTAEVESALVLHDSVAEAAVVGYPHDLKGQGIYAFVTPMSGVTPDDALKQELLALVSKEIGSFAKPELIQWAPALPKTRSGKIMRRILRKIACNELDNLGDTSTLADPSVVQGLIDKRLNQ

SEQ ID NO: 151532 - DNA, 1959 bp, Ruegeria sp. TM1040; identical to SEQ ID NO: 126673
  CDS (1)..(1959): transl_table=11

SEQ ID NO: 151533 - protein, 652 aa, Ruegeria sp. TM1040; identical to SEQ ID NO: 126674

SEQ ID NO: 151534 - DNA, 1977 bp, Myxococcus xanthus DK 1622; identical to SEQ ID NO: 122056
  CDS (1)..(1977): transl_table=11

SEQ ID NO: 151535 - protein, 658 aa, Myxococcus xanthus DK 1622; identical to SEQ ID NO: 122057

SEQ ID NO: 151536 - DNA, 1965 bp, Myxococcus xanthus DK 1622; identical to SEQ ID NO: 122058
  CDS (1)..(1965): transl_table=11

SEQ ID NO: 151537 - protein, 654 aa, Myxococcus xanthus DK 1622; identical to SEQ ID NO: 122059

SEQ ID NO: 151538 - DNA, 1935 bp, Rubrobacter xylanophilus DSM 9941; identical to SEQ ID NO: 126681
  CDS (1)..(1935): transl_table=11

SEQ ID NO: 151539 - protein, 644 aa, Rubrobacter xylanophilus DSM 9941; identical to SEQ ID NO: 126682

SEQ ID NO: 151540 - DNA, 1896 bp, Cytophaga hutchinsonii ATCC 33406; identical to SEQ ID NO: 126685
  CDS (1)..(1896): transl_table=11

SEQ ID NO: 151541 - protein, 631 aa, Cytophaga hutchinsonii ATCC 33406; identical to SEQ ID NO: 126686

SEQ ID NO: 151542 - DNA, 1938 bp, Alcanivorax borkumensis SK2
  CDS (1)..(1938): transl_table=11
atgtcccaagtacatattcaccctgttcccgccgactataaaaagcaaacactgatggatcgcgagacttacgatcgctggtacagccaatccattaatgatccgggcaccttctgggccgagcgcgcagaacagcttctggactggaaaactccgtgggacacggtaagcgaatgggactttaacgaaggccgggccgcttggttcaaaggcgccaccctcaacgcctgttacaattgtgtcgaccgccacctgccggaacgggccaaccagaccgccattatctgggagggcgacgagccagatcaggacaaacacataagctatcaacagctgttcgaggaagtgagcaagttcggcaatgtgctcaagaatcgaggtgttaagaaaggcgatcgcgttgtcatctatatgccgatgattccggaagcggcctacgccatgctggcctgcgctcgcattggcgccatccactctgttgtctttggcggtttctcgccggaagctctgaaagaccgcattctcaatgctgaggcttgcgctctgattaccgccgacgaaggggtacgcggtggcaaaaccatcccgctgaaagtaaatgcagacaaggccctagacggtatcgactgtgttcacacctgcctgaccgtaaagcgcaccggcggagatgtggattggcaagcaccgcgagatgtctggtaccacgaggccatggcggatgcgtccagcgattgcgaaccggagtgggtcgaggctgaagacccattattcaccctctacacctctggctccaccggcaaacccaaaggggttgtccacaccaccgccggctatttgctcaacactgctctaacccataaatacgtgttcgactatcaggacggggacatctactggtgcaccgccgatgtgggctggatcactggacacagctacattgtttacggcccgctggctaacggcgccaccacgctgatgttcgaaggcgtgcccacctacccggacgcctcacgctgctggcaggtagtcgacaagcacaaggtaaacattttctacaccgcgcctaccgctattcgcgccctcatggggctgggcgatgcccctgtggaacaaacctcccgcgccagcctgaagctgctgggcaccgtgggcgaacccatcaacccggaagcctgggagtggtattacagggtagtcggtgacagccgctgcccgattgtagacacctggtggcaaactgaaaccggcgccatcatgattgcgccgctacccggcgcagtggacctgaaagccgggtctgccactctgcccatgttcggggtgcaacccggcctaatggaccctgacggtaacgaactggacggtgccgcctccggcaacctagtgctcaaggccagttggcctagccaaattcgcaccgtctatggcgatcaccaacgcctaatcgatacctacttcagtgcctacaagggctgctacttcactggcgacggcgcccgccgcgatgaagatggctactactggattactggccgggtggatgacgtgctcaacgtgtctggccaccgcctaggcacagctgaaatcgaatccgctctagtactacaccccagcatctctgaagcggccgtggtgggctaccagcatgacgtaaaagggcaagggatctatgcctacgtatcgttaatggccggcaaggaaggcagcgaagaactggtcaaggctctccgcgacctagtgacacaggaaattgggcccatcgccaagcccgacctgattcactttgcaccgggcctgccgaaaacccgctctggcaaaatcatgcgccgtattttacgcaaaatcgccgcggatgaactggatagcctgggcgacacctccaccttagctgatcccagcgtggttgatcagctcatcgataaccgccaaaacaagtaa

SEQ ID NO: 151543 - protein, 645 aa, Alcanivorax borkumensis SK2
MSQVHIHPVPADYKKQTLMDRETYDRWYSQSINDPGTFWAERAEQLLDWKTPWDTVSEWDFNEGRAAWFKGATLNACYNCVDRHLPERANQTAIIWEGDEPDQDKHISYQQLFEEVSKFGNVLKNRGVKKGDRVVIYMPMIPEAAYAMLACARIGAIHSVVFGGFSPEALKDRILNAEACALITADEGVRGGKTIPLKVNADKALDGIDCVHTCLTVKRTGGDVDWQAPRDVWYHEAMADASSDCEPEWVEAEDPLFTLYTSGSTGKPKGVVHTTAGYLLNTALTHKYVFDYQDGDIYWCTADVGWITGHSYIVYGPLANGATTLMFEGVPTYPDASRCWQVVDKHKVNIFYTAPTAIRALMGLGDAPVEQTSRASLKLLGTVGEPINPEAWEWYYRVVGDSRCPIVDTWWQTETGAIMIAPLPGAVDLKAGSATLPMFGVQPGLMDPDGNELDGAASGNLVLKASWPSQIRTVYGDHQRLIDTYFSAYKGCYFTGDGARRDEDGYYWITGRVDDVLNVSGHRLGTAEIESALVLHPSISEAAVVGYQHDVKGQGIYAYVSLMAGKEGSEELVKALRDLVTQEIGPIAKPDLIHFAPGLPKTRSGKIMRRILRKIAADELDSLGDTSTLADPSVVDQLIDNRQNK

SEQ ID NO: 151544 - DNA, 1938 bp, Alkalilimnicola ehrlichii MLHE-1; identical to SEQ ID NO: 122062
  CDS (1)..(1938): transl_table=11

SEQ ID NO: 151545 - protein, 645 aa, Alkalilimnicola ehrlichii MLHE-1; identical to SEQ ID NO: 122063

SEQ ID NO: 151546 - DNA, 1935 bp, Granulibacter bethesdensis CGDNIH1
  CDS (1)..(1935): transl_table=11
atgtccgagccgaccctgattcatgtgaagccgtctcttgcggattcggcccatgtgaatgcccgccgtcacagcctgatgactcatcaggccggaacggatcccgatgctttctgggccgaagaagccaggcgcatcccgtggttccgggaaccgaccctgatcaaaagcacgtccttcgagggtgatgtctcgatccgctggttcgaggatggccgcctgaacgcttctgtcgcctgtctggatcagcatctggaaacgcgcggcgatcagagcgcgattctgtgggaaggcgatgaacccggaacacagggcagcctgacctatcgccagttgcatgaccgcgtctgccgtctggcgaatgtcatgaaatccatgggcatcgggcgaggtgatcgcgttacgatctacctgccgatggtgatagaagccgccattgcgatgctggcctgcgcccgtatcggcgcggtgcatgctgtggtgttcggcggcttttcccccgacagccttgccgaccgtatccgtgacagcgaatccagcctgctcatcaccgccgatgaaggtcgccggggcggacggaaagtgccgctgaagcgcaatgccgatgaggccctgtccagggttgactgcatccggaacgtgattgtcgtcaccgtcaccggcggcgatgtcaacatgcaggcagggcgcgatcaacgatacgaaaccctgatcgaggcagcctcccccgactgtccgccagaggaaatgaacgccgaagatcctctgttcattctctatacctccggcagcaccggcacgccgaaaggcgtcctgcataccaccggcggctatatggtctgggccagcttcacgcatgagctggtgttcgactaccacgcccccgaagtatactggtgcaccgcggatgtgggctggatcaccggccatacctatatcgtgtacggaccgctggcgaatggcgcgaccacgctgatgttcgagggcgtgccgaactacccggacagcagccgtttctggcaggtggtcgacaaatacaacgtttcgatcttctacaccgcgccgaccgcaatccgtgcgctgatgcgggaaggcgatgcaccggtcaaaaagacctcccgcaaatccctgcgcattctcggcacggtgggcgagccgatcaatccggaagcatggcgctggtattacgaggtcgtcggcgaagaacgctgcccggtgatcgacacatggtggcagacggaaaccggcggtcatctgatcacgccgctgcccggcgcgatcgcccagaaacccggcagtgccaccctgccactccccggcgtcaaggcggttctggtcgataacgaaggcaatgtgctggagggcgaagccgaaggcagtctctgcatcgccgatagctggccgggccagatgaggacgctgtatggcgatcatgaacggttcgtgcagacctatttctccacctacaaaggcctgtatttcaccggcgacggcgcccgtcgcgatgcagatggctatttctggatcaccgggcgtatcgacgatgtgctgaacgtctccggccaccgtctcggcacggccgaggtggaaagcgcactggttgcgcatggcgatgttgccgaagccgccgtggtcggtgttccgcacgacatcaagggtcagggaatctatgcgttcgtcaccctgaaggacgggtacgaacccagcgacacactgcgcagcgagctgatcaactgggtccggcggcagatcgggccgatcgccacgccggatgtgatccagtgggcacccggactgccgaaaacccgcagcggcaagatcatgcgccggattctgcgtaagatcgcctgcaatgaaaccgatgggctgggggatatctcaaccctggccgatccctcggtggtggaagatctgattgccaatcgcccggcctga

SEQ ID NO: 151547 - protein, 644 aa, Granulibacter bethesdensis CGDNIH1
MSEPTLIHVKPSLADSAHVNARRHSLMTHQAGTDPDAFWAEEARRIPWFREPTLIKSTSFEGDVSIRWFEDGRLNASVACLDQHLETRGDQSAILWEGDEPGTQGSLTYRQLHDRVCRLANVMKSMGIGRGDRVTIYLPMVIEAAIAMLACARIGAVHAVVFGGFSPDSLADRIRDSESSLLITADEGRRGGRKVPLKRNADEALSRVDCIRNVIVVTVTGGDVNMQAGRDQRYETLIEAASPDCPPEEMNAEDPLFILYTSGSTGTPKGVLHTTGGYMVWASFTHELVFDYHAPEVYWCTADVGWITGHTYIVYGPLANGATTLMFEGVPNYPDSSRFWQVVDKYNVSIFYTAPTAIRALMREGDAPVKKTSRKSLRILGTVGEPINPEAWRWYYEVVGEERCPVIDTWWQTETGGHLITPLPGAIAQKPGSATLPLPGVKAVLVDNEGNVLEGEAEGSLCIADSWPGQMRTLYGDHERFVQTYFSTYKGLYFTGDGARRDADGYFWITGRIDDVLNVSGHRLGTAEVESALVAHGDVAEAAVVGVPHDIKGQGIYAFVTLKDGYEPSDTLRSELINWVRRQIGPIATPDVIQWAPGLPKTRSGKIMRRILRKIACNETDGLGDISTLADPSVVEDLIANRPA

SEQ ID NO: 151548 - DNA, 1953 bp, Shewanella frigidimarina NCIMB 400
  CDS (1)..(1953): transl_table=11
atgaccccgcagtctctttacaaagttcctagtgacattgcagaaaacgcactggttaataacgatcaatataagaaaatgtaccaggagtccattattaatccagaaggtttctggagagaacacggcaaacgtattgattggattaaaccttataccaaaattaagaaaacgtcttttgatgatcataatctttcgattaattggttttatgatggcacgctcaatgcctcggccaattgtttagatcgtcaccttgaagaacacggcgataagcttgccattatttgggaaggcgatgacgccaacgaacaacgcaaattaacttacgcagagctacacacacaagtgtgtaagtttgccaatgcgctacgtagccaaggggttaataagggagatatcgtcactatctacatgccgatggtgcctgaagcggcagtcgctatgcttgcttgtgctcgcattggtgcagttcattcagtggtatttggtggcttctcacccgactcgatagcagcaagggtaattgatggaaaatcaaaagtcttaattactgccgacgaaggtattcgtggtggccgtaaaatccctttaaaacgcagcattgatgaagccatatcaaatcctgatgttacttgcgtcgaaaaagttattgtatttaagcgcacaggtggtgacatcgattgggttgaaggtcgagacgtttggtggcattcactcatggaagtggcttcagaattttgccaaccagcagaaatgaacgccgaagatccactatttttgctttatacctctggctctacaggtaatcctaaaggtgtgcttcatactaccggtggttatatggtgtatgcctcgatgacacacgaatacgtgtttgattataaagctgacgaagtatattggtgtaccgccgatgtaggctggattaccggtcattcctatatggtatatggaccttttgctaatgccgccacggtattaattcatgaaggtgtacctaatcaccctactccagctcgattaggtgaaatgattgaccgacataaggtcaatatcctgtataccgctcctacattaattcgtgcattaatggctgaaggtaaagaacaatttagcagctataaaggtgactcattgcgcattatgggttcagtaggtgaacccataaaccctgaggcttggcgttggtaccatgaggtaatcggtcatgaaaactgccctattgtcgacacttggtggcaaactgaaactggcggcatcctgatcagcccattacctggtgcaacggataccaaacctggctctgcaactcgaccattttttggtgtgcaaccagcactggttgataacatgggtgatattgttgaaggtactggtgaaggtaacttagttatccttgactcgtggccaggccaaatgcgaacagtgtacggtgaccatgatagatttgcgctgacttattttaaaacattccgcggtatgtattttaccggtgatggcgcacgtcgtgatgaagatggctattattggatcactggtcgtgtcgatgatgtcatcaacgtttctgggcatcgcttaggtacggctgaagtggaaagcgctctagtgtcgcatgaactcgttgctgaagcggccgttgtgggttacccacatgacattaaaggccaaggaatttatgcatacgtcaccctaacccgtggcattgaaccgacagaagagttacgtcaagagttacgtcaatgggttcgtaaagaaattggtgcacttgctacaccagaccttatccagtgggcaagtggtttacctaaaacgcgttcaggcaaaattatgcgtcgattcttacgtaaaattgcggctaacgaagtaaccaacttaggtgattcttctactctggcagatcctgcagtgattgatacgttgattgagtctcgcttaaacaaaactgagtaa

SEQ ID NO: 151549 - protein, 650 aa, Shewanella frigidimarina NCIMB 400
MTPQSLYKVPSDIAENALVNNDQYKKMYQESIINPEGFWREHGKRIDWIKPYTKIKKTSFDDHNLSINWFYDGTLNASANCLDRHLEEHGDKLAIIWEGDDANEQRKLTYAELHTQVCKFANALRSQGVNKGDIVTIYMPMVPEAAVAMLACARIGAVHSVVFGGFSPDSIAARVIDGKSKVLITADEGIRGGRKIPLKRSIDEAISNPDVTCVEKVIVFKRTGGDIDWVEGRDVWWHSLMEVASEFCQPAEMNAEDPLFLLYTSGSTGNPKGVLHTTGGYMVYASMTHEYVFDYKADEVYWCTADVGWITGHSYMVYGPFANAATVLIHEGVPNHPTPARLGEMIDRHKVNILYTAPTLIRALMAEGKEQFSSYKGDSLRIMGSVGEPINPEAWRWYHEVIGHENCPIVDTWWQTETGGILISPLPGATDTKPGSATRPFFGVQPALVDNMGDIVEGTGEGNLVILDSWPGQMRTVYGDHDRFALTYFKTFRGMYFTGDGARRDEDGYYWITGRVDDVINVSGHRLGTAEVESALVSHELVAEAAVVGYPHDIKGQGIYAYVTLTRGIEPTEELRQELRQWVRKEIGALATPDLIQWASGLPKTRSGKIMRRFLRKIAANEVTNLGDSSTLADPAVIDTLIESRLNKTE

SEQ ID NO: 151550 - DNA, 1956 bp, Maricaulis maris MCS10
  CDS (1)..(1956): transl_table=11
atgtcccaatccgctcagaatgccatctacccggtcgccgccgaacgcgccgcggcggcgggcattgatgccgaccgccgtgccgacatgtatcgccgttcgctcgacacgccggatgaattctggcgcgaggaagcgcagcggatcgactggatagtgcccttcacagaagtctcggatgtcagctggaacaaggatgacctgcacatccgctggtttgccgacggcaccctcaatgccagcgccaactgcatcgaccggcacttgcccgcgcgagccgatgaccccgccatcatctgggagggtgatgatccgaccgtcgatgcgaccatcacctatgcccagttgcacgagaaagtctgccgcctggccaatggcctcaaatctgtcggcgtgaagaagggcgacagggtcacgatctacatgccgatggtcccggaagcggcctatgccatgctggcctgtgcccgcatcggtgccgttcactcggtcgtcttcggcggcttttcgccggacgcgctggccggccgtatcatcgattgcgaaagccgtttcgtcattaccgccgatgaaggcctgcgcggctccagaccaatcccgctgaaggccaatgtcgacaaggcggtcgcgaccgccgggattgtcgacaaggtgatcatggtgaaacgcacaggcggcgcggttgactgggacgccagccgcgatgtcgcctacgaagcgctggtccaggcggccagccccgactgtccgcccgagccgatgaatgccgaggacccgctctttatcctctacacctcaggatcgaccggcaagcccaagggcgtgttgcacacgaccggcggttacatggtctgggcctcgatgacccatgaatatgtgttcgactacaagccgggcgagatctactggtgcaccgccgatgtcggctgggtcaccgggcacacctatatcgtctacggaccgctggccaatggcgccaccacgctgatgttcgagggcgtgccgacctggccgggaccggatcgcctctggcaggtggtcgacaagcaccaggtcaacacgctctacacggcacccaccgcgatccgggccctgatgcgtgagggggatgggccggtgaagaagcactcccgctcatccctgcgcctgctgggcacggttggcgagccgatcaatccggaagcctggaactggtattacaatgtggtcggcgacgggcgctgcccgattgtcgatacctggtggcagaccgagacaggtggcgcgctgatcacccccctgcccggtgcaacggcgctgaaaccgggctcggcgacattgccgatcttcggggtcgagccggccctgatggatgccgaaggccagcggatcgccgatagcggaccggcctcgggcaatctcgtcatctgccgctcctggcccggtcagatgcggaccatttacggcgatcaccaacgtttcatcgagacctatttctcgacctatcccggcctttatttcaccggcgacggggcccggcgtgatgaggacggctattggtggatcaccgggcgggtcgatgatgtgctcaacgtctccggacaccgtctcggcacggccgagatcgagagcgcactggtcgcccacaaggatgtcgccgaagcggccgtggtcggttatccgcatgacctcaagggtcagggcatttattgctatgtcaccctgatgggcggacgtgtcgccgccgatgaggatgtcgaccagctcaggaaatgggtacgccaggaaatcgggccggtggcgacaccggacctgatccagttcgccccggccctgcccaagacccgctcaggcaagatcatgcgccgcatcctgcgcaagatcgccgagaacgaatttggcaatctgggagacacgtcaacgctcgccgaccccggcgttgttgacgacctgatcgagaaccggaagaaccgttag

SEQ ID NO: 151551 - protein, 651 aa, Maricaulis maris MCS10
MSQSAQNAIYPVAAERAAAAGIDADRRADMYRRSLDTPDEFWREEAQRIDWIVPFTEVSDVSWNKDDLHIRWFADGTLNASANCIDRHLPARADDPAIIWEGDDPTVDATITYAQLHEKVCRLANGLKSVGVKKGDRVTIYMPMVPEAAYAMLACARIGAVHSVVFGGFSPDALAGRIIDCESRFVITADEGLRGSRPIPLKANVDKAVATAGIVDKVIMVKRTGGAVDWDASRDVAYEALVQAASPDCPPEPMNAEDPLFILYTSGSTGKPKGVLHTTGGYMVWASMTHEYVFDYKPGEIYWCTADVGWVTGHTYIVYGPLANGATTLMFEGVPTWPGPDRLWQVVDKHQVNTLYTAPTAIRALMREGDGPVKKHSRSSLRLLGTVGEPINPEAWNWYYNVVGDGRCPIVDTWWQTETGGALITPLPGATALKPGSATLPIFGVEPALMDAEGQRIADSGPASGNLVICRSWPGQMRTIYGDHQRFIETYFSTYPGLYFTGDGARRDEDGYWWITGRVDDVLNVSGHRLGTAEIESALVAHKDVAEAAVVGYPHDLKGQGIYCYVTLMGGRVAADEDVDQLRKWVRQEIGPVATPDLIQFAPALPKTRSGKIMRRILRKIAENEFGNLGDTSTLADPGVVDDLIENRKNR

SEQ ID NO: 151552 - DNA, 1947 bp, Hyphomonas neptunium ATCC 15444; identical to SEQ ID NO: 126701
  CDS (1)..(1947): transl_table=11

SEQ ID NO: 151553 - protein, 648 aa, Hyphomonas neptunium ATCC 15444; identical to SEQ ID NO: 126702

SEQ ID NO: 151554 - DNA, 1956 bp, Rhizobium leguminosarum bv. viciae 3841; identical to SEQ ID NO: 122064
  CDS (1)..(1956): transl_table=11

SEQ ID NO: 151555 - protein, 651 aa, Rhizobium leguminosarum bv. viciae 3841; identical to SEQ ID NO: 122065

SEQ ID NO: 151556 - DNA, 1941 bp, Rhizobium leguminosarum bv. viciae 3841; identical to SEQ ID NO: 122066
  CDS (1)..(1941): transl_table=11

SEQ ID NO: 151557 - protein, 646 aa, Rhizobium leguminosarum bv. viciae 3841; identical to SEQ ID NO: 122067

SEQ ID NO: 151558 - DNA, 1947 bp, Rhodopseudomonas palustris BisA53
  CDS (1)..(1947): transl_table=11
atgtccgagaagatttacgacgtgcctgccgaatgggccaagcgcgctttcgtcgacgacgcgaaataccaggagatgtatgcgcgatcggtgaacgatccgaacggattctggaaggacgaggcccagcgcgtcgactggatcaagccgttctccgtcgtggaaaacacctcctttgcccccggcaatgtctcgatcaaatggttcgaggacggcgtgctcaacgtcgccgccaattgcatcgatcgtcatctgaaggatcgcgccgatcaggtcgcgatcatctgggaaggcgacgatccgtcggaatcgcgcaagatcacctatcgccagctgcacgatgaagtctgcaagatggccaacgtgctgcgcaaccgcaacgtccagaagggcgaccgcgtcaccatctatctgccgatgattccggaagccgcgttcgcgatgctggcctgcgcccggatcggcgcgatccactcggtggtgttcggcggtttttcgcccgacagcctcgcccagcgcatcaccgattgcgcctccaaggtagtgatcaccgccgacgagggcctgcgcggcggccgcactgtgccgctgaaggccaatgtcgacgccgcgctgcgcaagtccagcgccgtcgattgggtggtcgtggtcaagcgcaccggcgccgacgtgttcatggatgacgtccgcgacttctggtatcacgaggccgccgagatggtgaccacggaatgcccggtcgagccgatgcatgccgaggatccgctgttcattctctacacctcgggctccaccggccagcccaagggcgtgctgcacaccaccggcggctatctggtgttcgcgtcgatgacgcaccaatacgtgttcgactatcatgacggcgacgtctattggtgcaccgccgacgtcggctgggtcaccggccacagctacatcctctacgggccgctggccaacggcgccaccacgctgatgttcgagggcgtgccgaactacccgaccaattcgcggttctgggaagtgatcgacaagcaccaggtcaacatcttctacaccgcgccgaccgcgatccgcgccttgatgcagggcggcgacgagccggtgacgaagacctcgcgcaaaagcctgcggctgctgggttcggtcggcgagccgatcaatccggaagcctgggaatggtatcaccgcgtggtcggcgaggaccgctgcccgatcgtcgatacctggtggcagaccgaaaccggcggcatcctgatcacgccgctgccgggcgcgaccaagttgaagcccggctcggcgacccggccgttcttcggcgtggtgccgcagatcatggacgccgacgccaatgtgctggagggcgaatgcaccggcaatctgtgcctggccaaatcctggcccgggcagatgcgcacggtctatggcgaccacgcccgcttcgagcagacctacttctcggcctatccgggcaaatacttcaccggcgacggctgccggcgcgacgccgacggctattactggatcaccggccgggtcgacgacgtcatcaacgtctccggccaccgcatgggcacggcggaagtggaatcctcgctggtggcgcatccgcaggtgtcggaagccgccgtcgtcggctatccgcacgacatcaagggccagggcatctacgcctatgtcacgttgatgaccggcgtcgagccgaccgaggcgctgcgcaaggagctggtggcctgggtccgcaaggacatcggcccgatcgcctcgccggatctgatccagttcgcccccggcctgcccaaaacccgctccggcaagatcatgcgccgcatcctgcgaaaaatcgccgaggacgagtcctcgacgctcggcgacacctcgacgctggccgatcccggcgtggtcagcgaactggtcgaacaccgccagaacaagcgccacgtctga

SEQ ID NO: 151559 - protein, 648 aa, Rhodopseudomonas palustris BisA53
MSEKIYDVPAEWAKRAFVDDAKYQEMYARSVNDPNGFWKDEAQRVDWIKPFSVVENTSFAPGNVSIKWFEDGVLNVAANCIDRHLKDRADQVAIIWEGDDPSESRKITYRQLHDEVCKMANVLRNRNVQKGDRVTIYLPMIPEAAFAMLACARIGAIHSVVFGGFSPDSLAQRITDCASKVVITADEGLRGGRTVPLKANVDAALRKSSAVDWVVVVKRTGADVFMDDVRDFWYHEAAEMVTTECPVEPMHAEDPLFILYTSGSTGQPKGVLHTTGGYLVFASMTHQYVFDYHDGDVYWCTADVGWVTGHSYILYGPLANGATTLMFEGVPNYPTNSRFWEVIDKHQVNIFYTAPTAIRALMQGGDEPVTKTSRKSLRLLGSVGEPINPEAWEWYHRVVGEDRCPIVDTWWQTETGGILITPLPGATKLKPGSATRPFFGVVPQIMDADANVLEGECTGNLCLAKSWPGQMRTVYGDHARFEQTYFSAYPGKYFTGDGCRRDADGYYWITGRVDDVINVSGHRMGTAEVESSLVAHPQVSEAAVVGYPHDIKGQGIYAYVTLMTGVEPTEALRKELVAWVRKDIGPIASPDLIQFAPGLPKTRSGKIMRRILRKIAEDESSTLGDTSTLADPGVVSELVEHRQNKRHV

SEQ ID NO: 151560 - DNA, 1938 bp, Pseudomonas aeruginosa UCBPP-PA14; identical to SEQ ID NO: 122068
  CDS (1)..(1938): transl_table=11

SEQ ID NO: 151561 - protein, 645 aa, Pseudomonas aeruginosa UCBPP-PA14; identical to SEQ ID NO: 122069

SEQ ID NO: 151562 - DNA, 1965 bp, Leptospira borgpetersenii serovar Hardjo-bovis L550
  CDS (1)..(1965): transl_table=11
atggcaaaagaacgaatagttttaccatccgcggaatttaaaaagaattcaaacattacccttaaggattataaatctctttataaagaatccattgagaacccgaacaaattttgggcaaaagaagcgaatcgactgacctggtttaaaaaatggaccaaggttttaaatcacgattttaaaaatgcaaaagtggaatggttcaaaggcggaaaactcaacgtttcctacaattgtctagatcgtcacatcagtactcctttgaaaaacaaagccgctttgatctgggaaggagataatccttcggaatccaaagtccttacgtattacgacgtttacagagaggtaaatcgttttgcgaacgttctcaaaaaatatggagtaaaaaaaggagatcgggttcttgtttatctccctatgatcccggaattagcaattacgattcttgcatgtactcgaattggcgcaattcattccgttgttttcggaggtttttctccggaagcgcttcaaagtagaatcgacgattgtaaaccgaagttgatcgtcaccgccgacggaggtttccgaggcggtaaacccatcgaactcaaaagaaacgtcgacattgctctcgaaaagtccaaagaggatgttaaaacggtaattgttgttcgtcgtacaggaaacgaatccggtctagtttggaaagacggccgggattattggtatcattttttgatcagcgatcccgatttatccccttattgtaaaccggagtccatggatgcggaagatcctctttttattctttatacttccggttcaacgggaaaaccgaaaggagttttacatactacgggcggttatcttctcggagttaatttaacatttcattatgtattcgatataaaaccggaagacacatattggtgcactgcggacataggttgggtgacgggtcattcttacttagtttatggtcccttgtccaacggagcctcttctgtgatgtttgaaggagtgccttcgtatccggacgcaggaagattttgggacgttatcgataagtacggagtgaatatcttttatacggctccaaccgcgattcgtgctttgatgagagaagggttgactcacgttcaaaaaagaaatttgagttctttacgtcttctaggttccgtcggagaaccgatcaaccccgaagcttgggaatggtattttaaaattatcggaaaagaaaaatgtccaatcgtggatacctggtggcaaaccgaaaccggatccattatgatcactgcgttacccggagccatcccacaaaaaccgggttcggctactttaccgtttttcggagttcagcccgtattagtggacaacgacggaaaagaaataaacgacaaaggagaagtttccggaaatttgtgtatcaaaagtccttggccgtcgatgatgcgtggagtttacggagattcgaaacgattttttgatacatatttctctcaattcaaaggatattattttacaggagatggagcgcgcagagataaagacggttactattggattaccgggcgtgtagatgacgtaattaatgtttccggtcatagaatcggaagtgcagaagtcgaaagtgcgctcgttgaaaatagatccgttgccgaggccgctgtagtcggattccctcacgacatcaaaggacaggggatatatgcttatgtaaccgtaaaggaaggtattgcgactaatgataccttgaaaaaagaactcgttgcaattgttgaaaaggtaatcggcaaaattgcgagaccggacgtgattcattgggcgccgagtcttccaaaaactcgttccggaaaaattatgagaagaattttaagaaagattgcttcgggagaattcgaaggcctcggtgatacttcgactctcgcggatccgtcggtggttcaaaaattgatcgaagataaaagaaaattccacagttaa

SEQ ID NO: 151563 - protein, 654 aa, Leptospira borgpetersenii serovar Hardjo-bovis L550
MAKERIVLPSAEFKKNSNITLKDYKSLYKESIENPNKFWAKEANRLTWFKKWTKVLNHDFKNAKVEWFKGGKLNVSYNCLDRHISTPLKNKAALIWEGDNPSESKVLTYYDVYREVNRFANVLKKYGVKKGDRVLVYLPMIPELAITILACTRIGAIHSVVFGGFSPEALQSRIDDCKPKLIVTADGGFRGGKPIELKRNVDIALEKSKEDVKTVIVVRRTGNESGLVWKDGRDYWYHFLISDPDLSPYCKPESMDAEDPLFILYTSGSTGKPKGVLHTTGGYLLGVNLTFHYVFDIKPEDTYWCTADIGWVTGHSYLVYGPLSNGASSVMFEGVPSYPDAGRFWDVIDKYGVNIFYTAPTAIRALMREGLTHVQKRNLSSLRLLGSVGEPINPEAWEWYFKIIGKEKCPIVDTWWQTETGSIMITALPGAIPQKPGSATLPFFGVQPVLVDNDGKEINDKGEVSGNLCIKSPWPSMMRGVYGDSKRFFDTYFSQFKGYYFTGDGARRDKDGYYWITGRVDDVINVSGHRIGSAEVESALVENRSVAEAAVVGFPHDIKGQGIYAYVTVKEGIATNDTLKKELVAIVEKVIGKIARPDVIHWAPSLPKTRSGKIMRRILRKIASGEFEGLGDTSTLADPSVVQKLIEDKRKFHS

SEQ ID NO: 151564 - DNA, 1965 bp, Leptospira borgpetersenii serovar Hardjo-bovis JB197
  CDS (1)..(1965): transl_table=11
atggcaaaagaacgaatagttttaccatccgcggaatttaaaaagaattcaaacattacccttaaggattataaatctctttataaagaatccattgagaacccgaacaaattttgggcaaaagaagcgaatcgactgacctggtttaaaaaatggaccaaggttttaaatcacgattttaaaaatgcaaaagtggaatggttcaaaggcggaaaactcaacgtttcctacaattgtctagatcgtcacatcagtactcctttgaaaaacaaagccgctttgatctgggaaggagataatccttcggaatccaaagtccttacgtattacgacgtttacagagaggtaaatcgttttgcgaacgttctcaaaaaatatggagtaaaaaaaggagatcgggttcttgtttatctccctatgatcccggaattagcaattacgattcttgcatgtactcgaattggcgcaattcattccgttgttttcggaggtttttctccggaagcgcttcaaagtagaatcgacgattgtaaaccgaagttgatcgtcaccgccgacggaggtttccgaggcggtaaacccatcgaactcaaaagaaacgtcgacattgctctcgaaaagtccaaagaggatgttaaaacggtaattgttgttcgtcgtacaggaaacgaatccggtctagtttggaaagacggccgggattattggtatcattttttgatcggcgatcccgatttatccccttattgtaaaccggagtccatggatgcggaagatcctctttttattctttatacttccggttcaacgggaaaaccgaaaggagttttacatactacgggcggttatcttctcggagttaatttaacatttcattatgtattcgatataaaaccggaagacacatattggtgcactgcggacataggttgggtgacgggtcattcttacttagtttatggtcccttgtccaacggagcctcttctgtgatgtttgaaggagtgccttcgtatccggacgcaggaagattttgggacgttatcgataagtacggagtgaatatcttttatacggctccaaccgcgattcgtgctttgatgagagaagggttgactcacgttcaaaaaagaaatttgagttctttacgtcttctaggttccgtcggagaaccgatcaaccccgaagcttgggaatggtattttaaaattatcggaaaagaaaaatgtccaatcgtggatacctggtggcaaaccgaaaccggatccattatgatcactgcgttacccggagccatcccacaaaaaccgggttcggctactttaccgtttttcggagttcagcccgtattagtggacaacgacggaaaagaaataaacgacaaaggagaagtttccggaaatttgtgtatcaaaagtccttggccgtcgatgatgcgtggagtttacggagattcgaaacgattttttgatacatatttctctcaattcaaaggatattattttacaggagatggagcgcgcagagataaagacggttactattggattaccgggcgtgtagatgacgtaattaatgtttccggtcatagaatcggaagtgcagaagtcgaaagtgcgctcgttgaaaatagatccgttgccgaggccgctgtagtcggattccctcacgacatcaaaggacaggggatatatgcttatgtaaccgtaaaggaaggtattgcgactaatgataccttgaaaaaagaactcgttgcaattgttgaaaaggtaatcggcaaaattgcgagaccggacgtgattcattgggcgccgagtcttccaaaaactcgttccggaaaaattatgagaagaattttaagaaagattgcttcgggagaattcgaaggcctcggtgatacttcgactctcgcggatccgtcggtggttcaaaaattgatcgaagataaaagaaaattccacagttaa

SEQ ID NO: 151565 - protein, 654 aa, Leptospira borgpetersenii serovar Hardjo-bovis JB197
MAKERIVLPSAEFKKNSNITLKDYKSLYKESIENPNKFWAKEANRLTWFKKWTKVLNHDFKNAKVEWFKGGKLNVSYNCLDRHISTPLKNKAALIWEGDNPSESKVLTYYDVYREVNRFANVLKKYGVKKGDRVLVYLPMIPELAITILACTRIGAIHSVVFGGFSPEALQSRIDDCKPKLIVTADGGFRGGKPIELKRNVDIALEKSKEDVKTVIVVRRTGNESGLVWKDGRDYWYHFLIGDPDLSPYCKPESMDAEDPLFILYTSGSTGKPKGVLHTTGGYLLGVNLTFHYVFDIKPEDTYWCTADIGWVTGHSYLVYGPLSNGASSVMFEGVPSYPDAGRFWDVIDKYGVNIFYTAPTAIRALMREGLTHVQKRNLSSLRLLGSVGEPINPEAWEWYFKIIGKEKCPIVDTWWQTETGSIMITALPGAIPQKPGSATLPFFGVQPVLVDNDGKEINDKGEVSGNLCIKSPWPSMMRGVYGDSKRFFDTYFSQFKGYYFTGDGARRDKDGYYWITGRVDDVINVSGHRIGSAEVESALVENRSVAEAAVVGFPHDIKGQGIYAYVTVKEGIATNDTLKKELVAIVEKVIGKIARPDVIHWAPSLPKTRSGKIMRRILRKIASGEFEGLGDTSTLADPSVVQKLIEDKRKFHS

SEQ ID NO: 151566 - DNA, 1953 bp, Syntrophobacter fumaroxidans MPOB
  CDS (1)..(1953): transl_table=11
atggcaggcaacatttttcccgttcccgagtcgtgggccaagtcggcattctgcgacaatgagacgtatttgaagatgtatgagcagtcggtcaaggatccagagggattctggggggaacacgcgaagcgcatcgactggtttcagccgtggacgaaggtaaagagcggttccttcgaaggagacgtccggttcaagtggttcgagaacggcaagctcaacgtagcctacaactgccttgaccggaacctcgccaagcggggcgatcaggtggccatcatctgggaaggtgacgacccgaaggtgagcaagtacatcacctatcgcgagctccacgaccaggtctgccgttttgcgaatgtgctgaaggcacagggcttgaaaaaaggcgaccgggcgaccatctatcttcccatgatccccgagcttgcggtggcgatgctggcctgcgcccgcataggcgtagtccattccatcgtatttgccggtttctctccggaatctctggccgggcgtatcctggactgcggcggcaaagtggtgatcacggccgatgaaggactgcgcggcggcaagccgattccattgaaggaaaacaccgaggaagccctcaagaagtgtccggatgtccagaaagtcatcgtcgtcaaacacaccggcgggaaggttccggtggtgcctgggcgagacgtcgactggaccgaggcgatcaaggctgcgtcccccgactgtccgccggaagtcatggacgccgaggaccccctcttcattctctacacttccggttccaccggcaagcccaagggtgttctgcacaccacgggcggctacctggtatatacggctctgtcgcaccaatatgtcttcgactatcacgacggggacatctactggtgtacggccgatatcggctgggtcacgggccacagctacatcatttacgggccgctggccaacggcgccacgacggtcatgttcgaaggcatcccgaactatccggactggtcccggttctggaacgtggtcgacaagcacaagatcaacatcttctacaccgctccaacggcgattcgagcgctgatgcgccaaggcgaagcccccgtgagggcgacgtcccgcaagtcgctgaaactgctcgggaccgtcggggagccgatcaaccccgaagcctggctctggtattacaacaacgtgggcgagcagcggtgccccatcgtcgatacatggtggcagacggaaacgggcggcatcctcatcactcccctgcccggcgccaccgcgctcaaacctggctcggccaccaggccctttttcggagtccagcccgccatcatcgatcccgaaggcaagatgctcgatggtccggggtcgggctatctgatcatcaaggaatcgtggccgggaatgctcaggaccgtgtacggcgatcacgaacgcttcaaacagacctacttctccaattaccccggactctacttcaccggggacggggcacgtcgcgacgaggacggctactactggatcacgggacgcgtggacgacgtcatcaacgtgtcggggcaccgcctcggaacggccgaagtcgaaagcgccctcgttgcccatcccgccgtggcggaatcggcggtggtcggcttcccgcacgacatcaagggccaggggatctacgcctacgtgacgctgaaggcgaactgggaacattccgatgagctccgccaggaactcgtcaagtgggttcgcaaggagatcgggcccatcgccacgcccgattacatccagtgggcgccgggccttcccaagacccggtccggcaaaatcatgcgccgcatcctgcgtaagatcgccgccaatgaaatcgacaacctcggcgatacgacgaccctcgccgaaccggcggtggtggaagacctcatcaagaatcgccaggcggtcgcctcgtccggcaaggcgtag

SEQ ID NO: 151567 - protein, 650 aa, Syntrophobacter fumaroxidans MPOB
MAGNIFPVPESWAKSAFCDNETYLKMYEQSVKDPEGFWGEHAKRIDWFQPWTKVKSGSFEGDVRFKWFENGKLNVAYNCLDRNLAKRGDQVAIIWEGDDPKVSKYITYRELHDQVCRFANVLKAQGLKKGDRATIYLPMIPELAVAMLACARIGVVHSIVFAGFSPESLAGRILDCGGKVVITADEGLRGGKPIPLKENTEEALKKCPDVQKVIVVKHTGGKVPVVPGRDVDWTEAIKAASPDCPPEVMDAEDPLFILYTSGSTGKPKGVLHTTGGYLVYTALSHQYVFDYHDGDIYWCTADIGWVTGHSYIIYGPLANGATTVMFEGIPNYPDWSRFWNVVDKHKINIFYTAPTAIRALMRQGEAPVRATSRKSLKLLGTVGEPINPEAWLWYYNNVGEQRCPIVDTWWQTETGGILITPLPGATALKPGSATRPFFGVQPAIIDPEGKMLDGPGSGYLIIKESWPGMLRTVYGDHERFKQTYFSNYPGLYFTGDGARRDEDGYYWITGRVDDVINVSGHRLGTAEVESALVAHPAVAESAVVGFPHDIKGQGIYAYVTLKANWEHSDELRQELVKWVRKEIGPIATPDYIQWAPGLPKTRSGKIMRRILRKIAANEIDNLGDTTTLAEPAVVEDLIKNRQAVASSGKA

SEQ ID NO: 151568 - DNA, 1908 bp, Gramella forsetii KT0803
  CDS (1)..(1908): transl_table=11
atgagtaattatcacataaaaaatctggaggaatatttccaggtatatagaaaatctgttagagagccagaaaatttctggcaggaagtagccgaagaacattttgtttggaggaaaaaatgggataacgtacttagttgggatttttcaaaaccggaagtgaaatggtttgagaatgccaaactaaatattacagaaaattgtatagatcgtcatcttcttgctcagggagataaaacggcaattatctgggagcctaatgatccaaaggaagatgctttacaccttagctttaatgaacttcataaaaaggtaaatcaatttgcgaatgtcctaaaggataatgggatccagaagggagataagatttgtatttatctgcctatgattccggagcttgcgtatgctgttctcgcctgtgcgaggattggtgctattcattcggttgtttttgccggtttttcagcttctgctttggcaacaagaaccgtggatgcagattgtaaattgttgatcacttcagatggatctttccgtggaaataaaacgatcgatcttaaggggattgtagataaagccctggaggattgtcctgatgtaaatactgttctggttgctaagcgaaccggagctgatattaatatgaaagaaggcagggataaatggctggcacctttgatggaagaagcttctgatgaatgtactcctgagattatggatgccgaagatccattattcattctatatacttcgggctccacaggcaagcctaaagggatgttacataccacggcgggatatatggtgtatacagcctatacttttaaaaatattttcaattatcagaatgatgaagtttactggtgtactgccgatattggctggattacaggacattcttatatagtgtacggtccgttgttaaatggagcaactaccgtgatgtttgagggagttccttcataccctgattttgggcgattctgggagattgtggaaaaacacaaagtaaatcagttttacactgcacctactgcaattcgagccctggctaagaaaaatcttgatttcgtagataaatatgatctttcttctttaaaagttcttggaacggttggagaacctattaatgaagaagcatggcactggtatgataataatataggtaaaaataaaagtccgattgtggatacatggtggcaaacggaaaccggaggtatcatgatttctcctatcccttttgcgactcccacaaaaccaactttcgctacattaccttttcccggaattcagcctgttttgatggacgaggaagggaaagaaattaaaggcaaccaggtagatggtaggttatgtataaaattcccatggccttccatggcaagaacgatctatggaaatcacgaccgttatcgcgagacttatttttcagcctttgaaaataaatatttcacgggtgatggtgcgttaagagatgagacgggatattacagaattaccggtagggtagatgatgtgatcattgtttcaggtcataatttaggtacggctccaattgaagacgctattaacgaacatcctgctgtagcagaatctgccgtggttggatttcctcatgatgtgaaaggtaatgctttatacggatttgtaattctgaaagaatctggtgaatccaggaatcaggataaccttagaaaggagatcaatcagcaaatcgcagataagataggacctattgcaaaacctgagaagatccagtttgtggaaggtttaccaaaaaccagaagcggtaaaattatgcgtcgtattcttagaaaaatagcatcgaatgaaacttcagatttaggagatacctctactttattaaatccggaagtagttgaagatattatagaaggtaaactgtaa

SEQ ID NO: 151569 - protein, 635 aa, Gramella forsetii KT0803
MSNYHIKNLEEYFQVYRKSVREPENFWQEVAEEHFVWRKKWDNVLSWDFSKPEVKWFENAKLNITENCIDRHLLAQGDKTAIIWEPNDPKEDALHLSFNELHKKVNQFANVLKDNGIQKGDKICIYLPMIPELAYAVLACARIGAIHSVVFAGFSASALATRTVDADCKLLITSDGSFRGNKTIDLKGIVDKALEDCPDVNTVLVAKRTGADINMKEGRDKWLAPLMEEASDECTPEIMDAEDPLFILYTSGSTGKPKGMLHTTAGYMVYTAYTFKNIFNYQNDEVYWCTADIGWITGHSYIVYGPLLNGATTVMFEGVPSYPDFGRFWEIVEKHKVNQFYTAPTAIRALAKKNLDFVDKYDLSSLKVLGTVGEPINEEAWHWYDNNIGKNKSPIVDTWWQTETGGIMISPIPFATPTKPTFATLPFPGIQPVLMDEEGKEIKGNQVDGRLCIKFPWPSMARTIYGNHDRYRETYFSAFENKYFTGDGALRDETGYYRITGRVDDVIIVSGHNLGTAPIEDAINEHPAVAESAVVGFPHDVKGNALYGFVILKESGESRNQDNLRKEINQQIADKIGPIAKPEKIQFVEGLPKTRSGKIMRRILRKIASNETSDLGDTSTLLNPEVVEDIIEGKL

SEQ ID NO: 151570 - DNA, 1935 bp, Magnetococcus sp. MC-1; identical to SEQ ID NO: 122072
  CDS (1)..(1935): transl_table=11

SEQ ID NO: 151571 - protein, 644 aa, Magnetococcus sp. MC-1; identical to SEQ ID NO: 122073

SEQ ID NO: 151572 - DNA, 1956 bp, Paracoccus denitrificans PD1222
  CDS (1)..(1956): transl_table=11
atgaccattgaaacttctgggaaacatccgattccgccgggttttggggatgccctggtccagcctggcgattacgcccgcatgtatgccgaatcgatctcggaccctgacgggttctggggccgcgagggcaggcggctggactggatccacccctattccagggtgaagaacaccgatttcgccatgggccaggtctcggtgaagtggttcgaggacggcatcctgaacgcctcggtcaactgcatcgaccgccacctgcccgggcgcgcgaaccaggccgcgatcatcttcgagccggacgacccggaccagccggcgcgccacatcacctatgcggaactgtcggaaaaggtgaaccgcttcgccaacgtgctgctgagccagggggtgatgcgcggcgaccgggtggtgatctacctgccgatgatccccgaggcggcctatgccatgctggcctgcgcgcggatcggcgccatccactccatcgtcttcgccggcttctcgcccgacgcgctggccaaccgcatcaacgacagcggcgccaagctggtgatcaccgccgacaccgcgccgcgcggcggccgcaagacggcgctgaagtcgaataccgacgcggcgctgctgcattgctcggaccgggtgcgctgcctggtggtcaggcataccggcgaccagaccagctggatcgacgggcgcgacgtggacgtgctggcgatgatggagcaggtcagcccggattgcccgccgcggccgatgaatgccgaggacccgctgttcatcctctatacctcgggctcgacgggcaagcccaagggcgtggtgcattcgaccgccggctacctgctttatgccgcgatgacgcatcaatacgtcttcgactacaaggacggcgacatcttctggtgcacggccgacgtggggtgggtgacggggcacagctatatcgtctacggcccgctggccaacggcgccacgacgctgatgttcgagggcgtgccgacctggccggatgccggccgcttctgggcggtctgcgaaaagcacggggtcaaccagttctacaccgcgccgaccgccatccgggcgctgatggggcaggggccggaatgggtcgagaagcacgacctgtccagcctgcgggtgctgggcacggtgggcgagccgatcaaccccgaggcctgggtctggtacgaccggcatgtgggcaaggggcgctgcccgatcgtcgacacctggtggcagaccgagaccgggggtcacatgatcacctcgctgcccggcgcgatcgaggccaagccgggctcggcgacgctgcccttcttcggggtcaggccggtggttctggatgcctcgagcggggcggtgcaggagggcgacggggtcgagggggtgctgtgcatcgccgacagctggccggggcagatgcgcacggtctggggcgaccaccagcgcttcatggagacctatttccagcaatatccgggctattacttcaccggcgacggctgccggcgggacgaggacggctattactggatcaccgggcgggtggacgacgtgatcaacgtctcgggccaccggatgggcacggccgaggtggaatcggcgctggtggcgcatgagaaggtggccgaggcggcggtggtgggctatccgcacccgctgaagggccagggcatctatgcctatgtgacgctgatgaacggggtcgagcccagcgacgagctgcgcgccgaccttgagaaatgggtgcgcaccgagatcggcccgatcgccaagcccgacctgatccaatgggcgccgggcctgcccaagacccgttcgggcaagatcatgcgccgcatcctgcgcaagatcgccgaggacgatttcggcgccctcggagacatctccacgctcgcagacccgggcgtcgtggaccaactcatcgaaaacagaatgaaccgtcactga

SEQ ID NO: 151573 - protein, 651 aa, Paracoccus denitrificans PD1222
MTIETSGKHPIPPGFGDALVQPGDYARMYAESISDPDGFWGREGRRLDWIHPYSRVKNTDFAMGQVSVKWFEDGILNASVNCIDRHLPGRANQAAIIFEPDDPDQPARHITYAELSEKVNRFANVLLSQGVMRGDRVVIYLPMIPEAAYAMLACARIGAIHSIVFAGFSPDALANRINDSGAKLVITADTAPRGGRKTALKSNTDAALLHCSDRVRCLVVRHTGDQTSWIDGRDVDVLAMMEQVSPDCPPRPMNAEDPLFILYTSGSTGKPKGVVHSTAGYLLYAAMTHQYVFDYKDGDIFWCTADVGWVTGHSYIVYGPLANGATTLMFEGVPTWPDAGRFWAVCEKHGVNQFYTAPTAIRALMGQGPEWVEKHDLSSLRVLGTVGEPINPEAWVWYDRHVGKGRCPIVDTWWQTETGGHMITSLPGAIEAKPGSATLPFFGVRPVVLDASSGAVQEGDGVEGVLCIADSWPGQMRTVWGDHQRFMETYFQQYPGYYFTGDGCRRDEDGYYWITGRVDDVINVSGHRMGTAEVESALVAHEKVAEAAVVGYPHPLKGQGIYAYVTLMNGVEPSDELRADLEKWVRTEIGPIAKPDLIQWAPGLPKTRSGKIMRRILRKIAEDDFGALGDISTLADPGVVDQLIENRMNRH

SEQ ID NO: 151574 - DNA, 1953 bp, Shewanella amazonensis SB2B
  CDS (1)..(1953): transl_table=11
atgagcacgcagtctctctactcagtgcccgccgatatcgccgccaatgcactggtaaacaacgaacaatatcaaaagatgtaccaggaatccgttgccaatcccgagggtttttggggagagcatgccaagcgcatcgattggattaaacctttcacccaggtcaaagacacttcctacgatgaccagaacctgtatatcaaatggttccatgacggcacactcaatgcgtcggccaactgtcttgatcgccatctggcctccaagggtgacgatgtcgccatcatttgggaaggcgatgatgccagcgagcagcgcaaagtcacctatcgtgaactgcacgccgaggtgtgtcagtttgccaatgccctcaaggctgaaggtgtaaagcgcggtgatgttgtcaccatttatatgcccatggtggtcgaagcgaccgtcgccatgctggcctgtgcccgcataggtgctgtgcattcggttgtgttcggtggtttctcaccagactccatcgcatcccgcgtcattgacggtaaatccaaactgctgattaccgccgacgaaggcgtgcgtggtggccgtaaaattccgcttaaagggaatatcgatgaggcgctgaatcgtcccgatgtgaccacagtagaaaccgttatcgtgctcaaacgcaccggcggcgcggtaaactgggtcgaaggccgcgataaatggtggcatcaggtaactgacggtgccgcaaccgagtgtgccgttgaggaaatgggggccgaagacccgctgtttttgctgtatacctcaggctctaccggtaatccaaaaggcgtgctgcacaccacaggtggttacctcgtttacgcctctatgacccacgaatatgtgtttgattacaaacccggtgaagtgtactggtgtaccgccgacgtgggctggatcaccggccacagctacatggtctacgggccactggccaacggtgccaccatccttatccatgagggtatccccaacttcccaagcccggcacgcctgggtgaaatcgtggaccgtcatcaggtcaatatcctgtacacagcccctacccttatccgtgcgctcatggccgaaggcaagcagcactttgataatttcgatggcaaatcgctgcgtatcatgggctcggtgggtgaacccatcaacccagaagcctggcgctggtaccacgaagtcattggccatgaacattgcccaatcgtggatacctggtggcaaaccgaaaccggcggcatcctgatcacgccgctgccgggtgccaccgacaccaagccgggctctgctacccgccccttctttggtgtgcagccagcgctggtggacaacgaaggtaatattctcgaaggcgccaccgaaggcaacctggtgctgctggactcctggcccggacagatgcgtaccgtatacggcgatcacgagcgctttgtgctgacctatttcaagaccttccgcggcatgtacttcaccggtgacggtgcccgtcgtgatgaggacggttactactggatcaccggtcgtgtggatgacgtgattaacgtgtccggccaccgcctcggcacagctgaagtggaaagtgccctggtagcacatgacctggttgccgaagccgctgtagtgggttacccccatgacatcaagggacagggtatttatgcctatgtcaccctgaccaagggcaccgaagcgacagaagaactgcgtcaggaactgcgtcagtgggtacgtaaagaaatcggcgccctggcaacccccgatttgatccagtgggccagcggcttgcccaagacccgctccggtaaaatcatgcgccgcttcctgcgcaagattgcggcaaacgaaatcaccaacctgggtgatgcttccaccctggccgacccatcggttatcgatacccttatcgaaagccgcttgaatcgcgccgactaa

SEQ ID NO: 151575 - protein, 650 aa, Shewanella amazonensis SB2B
MSTQSLYSVPADIAANALVNNEQYQKMYQESVANPEGFWGEHAKRIDWIKPFTQVKDTSYDDQNLYIKWFHDGTLNASANCLDRHLASKGDDVAIIWEGDDASEQRKVTYRELHAEVCQFANALKAEGVKRGDVVTIYMPMVVEATVAMLACARIGAVHSVVFGGFSPDSIASRVIDGKSKLLITADEGVRGGRKIPLKGNIDEALNRPDVTTVETVIVLKRTGGAVNWVEGRDKWWHQVTDGAATECAVEEMGAEDPLFLLYTSGSTGNPKGVLHTTGGYLVYASMTHEYVFDYKPGEVYWCTADVGWITGHSYMVYGPLANGATILIHEGIPNFPSPARLGEIVDRHQVNILYTAPTLIRALMAEGKQHFDNFDGKSLRIMGSVGEPINPEAWRWYHEVIGHEHCPIVDTWWQTETGGILITPLPGATDTKPGSATRPFFGVQPALVDNEGNILEGATEGNLVLLDSWPGQMRTVYGDHERFVLTYFKTFRGMYFTGDGARRDEDGYYWITGRVDDVINVSGHRLGTAEVESALVAHDLVAEAAVVGYPHDIKGQGIYAYVTLTKGTEATEELRQELRQWVRKEIGALATPDLIQWASGLPKTRSGKIMRRFLRKIAANEITNLGDASTLADPSVIDTLIESRLNRAD

SEQ ID NO: 151576 - DNA, 1950 bp, Psychromonas ingrahamii 37
  CDS (1)..(1950): transl_table=11
atgagtgaagagcacatttaccccgtaacagataacctagcaaaaaatagcttactgactaatgaagagtatttaacacaatatcaagcttcaattagcgatccgagcgcattttggggtgaaaaaggtaaaattttagattggattaaaccttatacaaaagtcaaaaatagctccttcgattcaggtcatgtcagcattaaatggtttgaagacggaaaacttaacgtttcagctaactgtatcgatcgtcaccttgccactaaaggtgaccaggttgccattctttgggaaggtgatacagcggataaagatgaaaaaatcacctataagcagctgcatcaacgtgtttgtcagtttgccaatgtattaaaatcccaaggtgttagaaagggtgatgttgtttgtttatatatgccaatgacgccggaagcggccgttgccatgcttgcctgtacacgtatcggtgcggttcattcaattgtttttggtggtttctcgcccgatgcgattgccggacgtattgttgacagtagtgcaaaaatagttattaccgcagatgaaggtcgtcgtggtggacgtgttgtaccgcttaaagcgaatgttgatgaagcactgacaaaagacggcacagactgcgtaaaaagtgtgattgtctttaaaaatactggtggagaagtcaactgggttgtcggtcgagatcttgactgggaatcagtttgtgctgatgaatcaagtgaatgtgaaccagaagcgatgaatgctgaagatccgcttttcattctctatacttcgggctccacaggtacgcctaaaggtgtactgcatactaccggcggttatctggtttacgcagccatgacgtttaaatatgtatttgattaccaggaaggtgatatttactggtgtactgccgatgtaggctggatcaccgggcacacttattcagtttatggcccgcttgctaatggcgcaacatcattaatatttgagggtgtacccaattaccctacacctgcacgcatgagtgaagttgttgataaacacaaagtttctattctttatactgcaccaacggcaatccgcgcactaatggcaaaaggtgatcaggcgattgaagggacacaccgttcttcattgcgtattttaggctcggttggagaaccaattaatcctgaagcatgggaatggtactacaacaaaataggtgatgaacgctgtcctatcgttgatacctggtggcaaactgaaactggcggcatattaattagtccgcttcctggtgcgaccgatctgaaaccaggttctgcaacccgtccattctttggtgttcaacccgctattgttgatagtgaaggggtcgttttagagggtgaagctgcaggtaacttagtgatgctagatagctggccaggacagatgcggacactttataacaaccatgaccgtttcgaacaaacttatttcagcacctttaaggggatgtactttaccggtgatggcgcgcgtcgtgacagcgatggatattactggataacaggacgtgttgatgacgtactaaatgtttcaggtcaccgtatgggcaccgctgaaatagaaagtgcgttagtttctcaccctaaaatagcggaagccgctgttgttggcgtaccacacgaaattaagggtcagggtatttatgcttatgtcactttaaatgaaggtgagtacccttctcctgaattgtacgctgaagttaaacaatgggtacgtaaggagattggcgcaattgcaacacctgatattttacattgggcagaaggtttacctaaaacacgctcaggtaaaattatgcgtcgtattttacgtaaaatagcaacgggtgaaagtgattctttaggtgatatttcaacactggccgatccaagtgttgttgagcaacttattaaagagaatcgcgaaacgagctag

SEQ ID NO: 151577 - protein, 649 aa, Psychromonas ingrahamii 37
MSEEHIYPVTDNLAKNSLLTNEEYLTQYQASISDPSAFWGEKGKILDWIKPYTKVKNSSFDSGHVSIKWFEDGKLNVSANCIDRHLATKGDQVAILWEGDTADKDEKITYKQLHQRVCQFANVLKSQGVRKGDVVCLYMPMTPEAAVAMLACTRIGAVHSIVFGGFSPDAIAGRIVDSSAKIVITADEGRRGGRVVPLKANVDEALTKDGTDCVKSVIVFKNTGGEVNWVVGRDLDWESVCADESSECEPEAMNAEDPLFILYTSGSTGTPKGVLHTTGGYLVYAAMTFKYVFDYQEGDIYWCTADVGWITGHTYSVYGPLANGATSLIFEGVPNYPTPARMSEVVDKHKVSILYTAPTAIRALMAKGDQAIEGTHRSSLRILGSVGEPINPEAWEWYYNKIGDERCPIVDTWWQTETGGILISPLPGATDLKPGSATRPFFGVQPAIVDSEGVVLEGEAAGNLVMLDSWPGQMRTLYNNHDRFEQTYFSTFKGMYFTGDGARRDSDGYYWITGRVDDVLNVSGHRMGTAEIESALVSHPKIAEAAVVGVPHEIKGQGIYAYVTLNEGEYPSPELYAEVKQWVRKEIGAIATPDILHWAEGLPKTRSGKIMRRILRKIATGESDSLGDISTLADPSVVEQLIKENRETS

SEQ ID NO: 151578 - DNA, 1950 bp, Marinobacter aquaeolei VT8
  CDS (1)..(1950): transl_table=11
atgactgacaagcaggtatatccggtaagtccggaggtcgccgagcgcgcactggtcaacaaatcgcaatatgaggaaatgtatcgccagtccgtagaggacccgaataccttctggggcgagcatggcaagcgtattgactggatcaagccgttcaccaaggtcaagaacagtacctacgattacaataacttgtccatcaaatggttcgaggacggtgtcctgaacgcttcggccaactgcctggaccgtcacctggaacagcggggcgatcagaccgcgatcatctttgagggggacgatccctcggtatcccggaatgtcacctaccgggagctctacgaagagacctgcaagtttgccaacgtgctcaaggatcagggcgtcaagaagggtgatgtggttaccatctacatgcccatgattgttgaaactgccgttgccatgctggcctgcgcacgtattggtgcgatccactctgtggtatttggtggcttctctccggaagctctggccgcacggattgtgaacggcaaatcccgttttgtaattaccgcagatgaaggtctgcgtggtggccgtgccatcccgctgaagaagaacgtggattccgccctcaagcatgaggacgacgccaaggtcgacaaggtgatcgtggtgtcgcgtaccggtaacgatcaggtaccctggaccgaaggccgcgacctgcgttacgaagatctgatgaagaacgcttcggccgagtgccagccagagccaatgaatgcggaagacccgctgttcatgctgtacacctcgggctctaccggtgcgccgaaaggcgttctgcacaccaccggtggctacatggtctacgcctccatgacccaccagtacgtgtttgactatcacgatggtgatgtttactggtgtaccgctgacttcggatgggtaaccggccacagctacattctctatggcccgctggcaaacggtgccatcactctgctgttcgagggtgtgcccaactatccggacagttcccgcatggggcaggtggtcgacaagcacaaggtcaacatcctgtatactgcaccgaccgctatccgcgcactgatggcgcagggtgagtcctgcatggacggcaccacccgcggcagcctgaaactgctgggctctgtgggtgagccaatcaacccggaagcctgggagtggtatcaccgcgttatcggtaacagcaagtgcccgatcgtagatacctggtggcagactgaaaccggcggcatcctgatttctccgctgcctggcgcggtggatctgaagcctggttccgcgacgctgccgttcttcggcgttcagccggcgcttgtggataacgaaggcaacatcctggaaggcaagaccgaaggcaacctggtgatcctcgacagctggccgggccagatgcgcactatctacggtgatcacgagcgtttcgttcagacttacttcagcacctacaagggtatgtacttcaccggtgacggtgcccgtcgggatgaggacggttactactggattaccggccgggtggatgacgttctgaacgtctctggccatcgactggggactgcggaagttgagagtgcgctggttgctcacgacaaggtggcagaagctgccgtggtgggttacccgcatgacatcaaggggcagggcatctacgtgtacgtaacgctggtgcagggcgaggagcccagcgacgagctcaagaaagagctggtgcagtgggtgcgtaaggaaatcggcccgattgcctcgccggatgtgattcagtgggcacctggactgcccaagacccggtctggcaagattatgcgcaggattttgcgtaaaattgccgctaacgagcacgatcagcttggagatacatccactctggctgatccgggcgtagtggatgagctgatcagcagtcgggcgttcaagtaa

SEQ ID NO: 151579 - protein, 649 aa, Marinobacter aquaeolei VT8
MTDKQVYPVSPEVAERALVNKSQYEEMYRQSVEDPNTFWGEHGKRIDWIKPFTKVKNSTYDYNNLSIKWFEDGVLNASANCLDRHLEQRGDQTAIIFEGDDPSVSRNVTYRELYEETCKFANVLKDQGVKKGDVVTIYMPMIVETAVAMLACARIGAIHSVVFGGFSPEALAARIVNGKSRFVITADEGLRGGRAIPLKKNVDSALKHEDDAKVDKVIVVSRTGNDQVPWTEGRDLRYEDLMKNASAECQPEPMNAEDPLFMLYTSGSTGAPKGVLHTTGGYMVYASMTHQYVFDYHDGDVYWCTADFGWVTGHSYILYGPLANGAITLLFEGVPNYPDSSRMGQVVDKHKVNILYTAPTAIRALMAQGESCMDGTTRGSLKLLGSVGEPINPEAWEWYHRVIGNSKCPIVDTWWQTETGGILISPLPGAVDLKPGSATLPFFGVQPALVDNEGNILEGKTEGNLVILDSWPGQMRTIYGDHERFVQTYFSTYKGMYFTGDGARRDEDGYYWITGRVDDVLNVSGHRLGTAEVESALVAHDKVAEAAVVGYPHDIKGQGIYVYVTLVQGEEPSDELKKELVQWVRKEIGPIASPDVIQWAPGLPKTRSGKIMRRILRKIAANEHDQLGDTSTLADPGVVDELISSRAFK

SEQ ID NO: 151580 - DNA, 1953 bp, Shewanella sp. W3-18-1
  CDS (1)..(1953): transl_table=11
atgagctcgcagtctctctacaaagtctccggcaatatcgctgccaatgcacttgtaaataacgaacaatataaaacaatgtaccaagagtcgattgtcaacccagagggtttctggagagagcacggcaaacgcattgactggataaaaccctatacaaagatcaaaaaaacctcttttgacgatcataatttgtcaattaactggttttacgatggcaccctgaatgcttctgccaactgtttagatcgtcatttagccgaacacagtgatcgcgtggcgattatttgggaaggtgataacgccagcgaacaacgcaaaatcacctacggagaattacatgcagatgtgtgtaagtttgccaacgcactgcgcagtcaaggcgtgcgccgtggtgacatagtcaccatttacatgccaatggtgccagaagccgccgttgctatgcttgcttgcgcacgcattggcgcggttcattcagtcgtatttggtggcttctcacctgactctatcgcctcccgtgtgatcgatggcaaatcaaaagtggtgatcacctctgatgaggggatgcgcggtggccgagccattccgctaaagcgtaatatcgatgacgcgctcaatcatcccgatgtcactagcgtagaaaaagtcatcgtccttaaacgtacaggtggcaaaatcgactgggttgaaggccgtgatgtttggtggcacagcttacttgaaaccgcatcggagcactgccagccagaagaaatgggcgccgaagacccactgtttttactctatacctcaggctctaccggtaatcctaaaggtgttttacataccactggtggttacatggtttatgcgtcgatgacccatgaatatgtctttgattataaagccggagaagtgtactggtgtacggctgatgtaggttggatcacgggccactcatatatggtttacggtccactcgccaatggtgccactgtacttatccatgaaggcgtgcccaatcatccaagccccgctcgacttggtgagatgattgaccgtcataaggtcaatatcctttacaccgcaccgacgttgatccgtgcattaatggccgaaggcaaacagcattttgatcaattcgatggaagtacactgcggatcatgggctcagttggcgaacctatcaatccagaagcatggcgttggtatcacgaagtcattggtcacgagcattgtccgattgtcgatacttggtggcaaaccgagactggcggtattttaataacgccactgccgggtgcgacggacacaaaaccgggatcagccacccgtccattctttggcgtacaacccgccctagtagacaatatgggtaacattttagagggtgagaatgaaggtaacttagttttactcgattcttggccaggccaaatgcggactgtgtatggcgatcacgaacgattcgtgctgacctactttaaaaccttccgcggcatgtattttaccggtgatggtgcccgtcgcgatgaagacggttactactggatcacggggcgtgtcgatgacgtcattaacgtctctggacaccgtttaggtaccgctgaagtggaaagtgcattggtatcccatgaactggttgctgaagccgctgttgtgggctatccacacgatattaaaggccaaggtatctatgcctacgtcacgctaacccgtggaacagaagaaagtgaagagctacgccaggaactgcgccaatgggtgcgtaaagagattggtgcattagcaactccagacctcatccaatgggcaagtggattacctaaaacccgttcaggcaaaattatgcgccgcttcctacgtaagattgctgctaacgaagtcaccaacttaggtgatgcatcaaccttagccgatccagcggttatcgaaaccttgattgaaacccgtttaaatcgtacagaataa

SEQ ID NO: 151581 - protein, 650 aa, Shewanella sp. W3-18-1
MSSQSLYKVSGNIAANALVNNEQYKTMYQESIVNPEGFWREHGKRIDWIKPYTKIKKTSFDDHNLSINWFYDGTLNASANCLDRHLAEHSDRVAIIWEGDNASEQRKITYGELHADVCKFANALRSQGVRRGDIVTIYMPMVPEAAVAMLACARIGAVHSVVFGGFSPDSIASRVIDGKSKVVITSDEGMRGGRAIPLKRNIDDALNHPDVTSVEKVIVLKRTGGKIDWVEGRDVWWHSLLETASEHCQPEEMGAEDPLFLLYTSGSTGNPKGVLHTTGGYMVYASMTHEYVFDYKAGEVYWCTADVGWITGHSYMVYGPLANGATVLIHEGVPNHPSPARLGEMIDRHKVNILYTAPTLIRALMAEGKQHFDQFDGSTLRIMGSVGEPINPEAWRWYHEVIGHEHCPIVDTWWQTETGGILITPLPGATDTKPGSATRPFFGVQPALVDNMGNILEGENEGNLVLLDSWPGQMRTVYGDHERFVLTYFKTFRGMYFTGDGARRDEDGYYWITGRVDDVINVSGHRLGTAEVESALVSHELVAEAAVVGYPHDIKGQGIYAYVTLTRGTEESEELRQELRQWVRKEIGALATPDLIQWASGLPKTRSGKIMRRFLRKIAANEVTNLGDASTLADPAVIETLIETRLNRTE

SEQ ID NO: 151582 - DNA, 1938 bp, Magnetospirillum magnetotacticum MS-1; identical to SEQ ID NO: 126725
  CDS (1)..(1938): transl_table=11

SEQ ID NO: 151583 - protein, 645 aa, Magnetospirillum magnetotacticum MS-1; identical to SEQ ID NO: 126726

SEQ ID NO: 151584 - DNA, 1956 bp, Sulfitobacter sp. EE-36; identical to SEQ ID NO: 122084
  CDS (1)..(1956): transl_table=11

SEQ ID NO: 151585 - protein, 651 aa, Sulfitobacter sp. EE-36; identical to SEQ ID NO: 122085

SEQ ID NO: 151586 - DNA, 1953 bp, Oceanicaulis alexandrii HTCC2633
  CDS (1)..(1953): transl_table=11
atgtccgagaccgtcattccggttccgcaaagcttcgcagacgccaggatcaacgccgagcgctacaaggaaatgtatgagcgctccatcaaggatcccgacgggttctgggccgatgaggccaagcggctcgactggttcacagcgcccacgaagatctccgacgtctccttctccaaggatgacctgcacattcgctggttcgaggacggcgtcctcaatgtcagctataactgcattgaccggcacctgcccaagcgcgccaacaaggtggcgctgatctgggagggcgataacccggccttccaccactcgatcacctatgcccagctgcacaaccatgtctgccgcttcgccaacgagctgaagaagatcggcgtgaagaagggcgaccgggtcacgctctacatgccgatgatcccagaagcggcctacgccatgctggcctgcacgcgcatcggcgcggtgcactcggtggtgttcggcggcttcagccccgaggcgctggcgggccgcatcaatgactgccagtccgagttcgtggtcaccgccgatcagggcgtgcgcggcaacaagggcgtgccgctgaaagccaatgtggacaaggcgatcgagcatgctccgggcgtcaaggcggtgctgtgcatccgccatacgggcgcggacgtgccctgggtggaaggccgtgatttctggcaccatgatctggcgctcgaggtggacgccaagtgcgagcccgaacccatgaaggcggaggatccgctcttcatcctctacacctcgggctccaccggcaaacccaagggcgtgctgcacaccacgggcggttatctcgtctgggcgtccatgacccatgaatacaccttcgatcatcgcgaggatgacgtgttctggtgcaccgccgatgtcggctgggtgaccggacacacctatatcgtctatggcccgctggcgaatggcgcgacctctctgatgtatgagggcgtgcccacctggccggggccggaccgctgctggcggatcgtcgccaagcacaaggtcaccaccatctacaccgcccccaccgccatccgcgccctgatgcgcgagggcgacgagccggtcagcaagcatgaccgttcctccctgcgcctgctgggttcggtgggcgagccgatcaatcctgaagcctggcgctggtatcatgaagtggtgggcgacaagcgctgcccgatcgtggacacctggtggcagaccgagaccggcgggcatctcatcacgcctctgccgggcgcccatgacctgaaaccgggctcggcgagcttccccatgttcggcgtgcagcccgccttgatggatgcggaaggcaatcgcctgcccgatgacggcccgcaggagggcaatctggtgctgctgggcagctggccgggccagatgcgcaccgtctatggcgaccatcagcgctttgtggagacctatttctccacctacgacaacatgtacttcaccggcgacggcgcgcgccgcgatgctgacggctactggtggatcacgggccgggtcgatgacgttctgaacgtctccggccaccgcctcggcactgccgaaatcgagagcgctctggtcgcccatgaactggtcgccgaagccgccgtcgtgggctatccccatgacctcaaggggcagggcatctattgctatgtgactttggtggcgggcctgaccccgaccgaagacaccgagaagaccctcaaggcccatgtgcgctccgagatcgggccggtggcgacgcctgacgtcatccagttcgcgccgggccttccgaagacccgttcgggcaagatcatgcgccgcatcctcaggaagatcgccgagggcgagtacgacaagctgggcgatacctcgacgctggctgagccgggcgtggtcgaggatctgatcgagggccacaaggtcgcgaccggccaggattga

SEQ ID NO: 151587 - protein, 650 aa, Oceanicaulis alexandrii HTCC2633
MSETVIPVPQSFADARINAERYKEMYERSIKDPDGFWADEAKRLDWFTAPTKISDVSFSKDDLHIRWFEDGVLNVSYNCIDRHLPKRANKVALIWEGDNPAFHHSITYAQLHNHVCRFANELKKIGVKKGDRVTLYMPMIPEAAYAMLACTRIGAVHSVVFGGFSPEALAGRINDCQSEFVVTADQGVRGNKGVPLKANVDKAIEHAPGVKAVLCIRHTGADVPWVEGRDFWHHDLALEVDAKCEPEPMKAEDPLFILYTSGSTGKPKGVLHTTGGYLVWASMTHEYTFDHREDDVFWCTADVGWVTGHTYIVYGPLANGATSLMYEGVPTWPGPDRCWRIVAKHKVTTIYTAPTAIRALMREGDEPVSKHDRSSLRLLGSVGEPINPEAWRWYHEVVGDKRCPIVDTWWQTETGGHLITPLPGAHDLKPGSASFPMFGVQPALMDAEGNRLPDDGPQEGNLVLLGSWPGQMRTVYGDHQRFVETYFSTYDNMYFTGDGARRDADGYWWITGRVDDVLNVSGHRLGTAEIESALVAHELVAEAAVVGYPHDLKGQGIYCYVTLVAGLTPTEDTEKTLKAHVRSEIGPVATPDVIQFAPGLPKTRSGKIMRRILRKIAEGEYDKLGDTSTLAEPGVVEDLIEGHKVATGQD

SEQ ID NO: 151588 - DNA, 1965 bp, Loktanella vestfoldensis SKA53
  CDS (1)..(1965): transl_table=11
atgacacacgcacccagcgccgacgatcggtttgcgccttctgcggcatttgccgccaaggcccatgtcaccgcagaccaatatcaggcgatgtataacgcgtcgatccaagacccagagcgtttctgggccgagcatggcaagagaatcgactggatcaagcctttcaccaaagtgaaaagtaccagctttgctcccggcaaaatcgacatcaaatggttcgaagatggcacgttgaacgtcagcgccaattgcatcgaccggcatctggaaacccgtggcgaccagaccgcaatcatctgggagcccgatgatccaaaggacgccgcacagcacatcacctataaagagctgcaccgccgcacctgccggatggccaacattctggaaaccatgggcgtgcgccgcggcgaccgcgtggtgatttatctgccgatgatccccgaggctgcctatgccatgctggcctgcgcgcggatcggcgcggtccattcgatcgtttttgccggcttctcgcccgatgctttgggtacgcgcatcaatggctgcgacgccaaggtcgtgatcacggctgatcacgcaccgcgcggcggccggtccacaccgctgaaatcgaacacagatgcggccctgctgcattgcaaggacagtgtgaaatgcctcgtcgtgcgtcgcaccggcgggcagaccagctgggcggacggacgcgatttcgactataacgaaatggcgatggaggccgatgattactgcgcccccgccgagatgggcgccgaagacccgctgttcattctgtacacttcagggtccaccgggcagcccaagggggtcgtgcattcatctggcggctatcttgcctatgccgcgatgacgcatcaatatacgtttgattatcatgacggcgacatcttttggtgtaccgccgatgtgggttgggtgacgggccacagctatatcgtctatggcccgctggccaatggcgcgaccacgatcatgttcgaaggcgtgccaacctatcccgatgcaggccggttctgggaagtctgccagaaacacaaggtcaaccagttttacaccgcccccaccgcgctgcgcgcgctgatggcgcatggtaacggacccgtggaaaaatatgatctgtccagcatcaaggtgctaggtaccgtgggtgaacctatcaaccccgaggcatggaactggtacaacgatgttatcggcaagggcaaatgccccatcgtcgatacctggtggcagaccgaaaccggtggccacctgctgacgccgctacccggtgcaattgcgaccaaacccggatcggccacgctgccgttctttggcgtgctgcctgtcattcttgacccgcagacaggtgtcgaaatcaccacgactgctgccgaaggtgtgctgtgtatcaaggacagctggcccggccagatgcgcaccgtttacggcgatcatgaacggttcgaaaagacatacttttccgactacaaaaattactatttcaccggtgacgggtgccgccgcgatgaagacgggtattactggatcaccggtcgcgttgatgatgtgatcaacgtatccgggcaccgcatgggcaccgccgaagtcgaaagcgcgcttgtcgcgcatgcagatgtcgccgaggctgctgtcgtcggctatccccacgcgatcaagggtcagggcatctatgcctatgtcacgttgatgaacggggtcgaaccgtcagaggatctgcgcaaggacctggtgaaatgggtccgatccgaaattgggccaatcgccagccccgatctgatccaatgggcgcccggcctgccgaaaacgcgatcgggcaagatcatgcgccgcatcctacgtaagatagcggaaaacgatcataccactttgggcgatatctcgacccttgctgatccgtccgtggtcgatcatctgatcgaacaccggatgaacaaggtatga

SEQ ID NO: 151589 - protein, 654 aa, Loktanella vestfoldensis SKA53
MTHAPSADDRFAPSAAFAAKAHVTADQYQAMYNASIQDPERFWAEHGKRIDWIKPFTKVKSTSFAPGKIDIKWFEDGTLNVSANCIDRHLETRGDQTAIIWEPDDPKDAAQHITYKELHRRTCRMANILETMGVRRGDRVVIYLPMIPEAAYAMLACARIGAVHSIVFAGFSPDALGTRINGCDAKVVITADHAPRGGRSTPLKSNTDAALLHCKDSVKCLVVRRTGGQTSWADGRDFDYNEMAMEADDYCAPAEMGAEDPLFILYTSGSTGQPKGVVHSSGGYLAYAAMTHQYTFDYHDGDIFWCTADVGWVTGHSYIVYGPLANGATTIMFEGVPTYPDAGRFWEVCQKHKVNQFYTAPTALRALMAHGNGPVEKYDLSSIKVLGTVGEPINPEAWNWYNDVIGKGKCPIVDTWWQTETGGHLLTPLPGAIATKPGSATLPFFGVLPVILDPQTGVEITTTAAEGVLCIKDSWPGQMRTVYGDHERFEKTYFSDYKNYYFTGDGCRRDEDGYYWITGRVDDVINVSGHRMGTAEVESALVAHADVAEAAVVGYPHAIKGQGIYAYVTLMNGVEPSEDLRKDLVKWVRSEIGPIASPDLIQWAPGLPKTRSGKIMRRILRKIAENDHTTLGDISTLADPSVVDHLIEHRMNKV

SEQ ID NO: 151590 - DNA, 1998 bp, Roseovarius sp. 217
  CDS (1)..(1998): transl_table=11
atgcggcgtgacctgatctggatgtcaggtggccgttgggatggaggatttcaagtcatgaccgagacaaagactggtgcagcagcaacaggacccggatttcacatcgattccgagacctatgagcggatgtatgccgcctcaatcacggacccggaggcattctggggggagcacggcaagcggctggattggatcaagccttacaccaaggtcaagaacacctcgttcgactatgacaatgtctcgatcaaatggtttgaagatggcacgctgaatgtggctgccaactgcatcgaccggcatctggcgacgcgcggcaaccagaccgcgatcatctgggagccggatgatcccaccgacgaaccgcagcacatcacctacacggaattgcacacgcagacctgcaagatggccaatgtgctgaaatccatgggcgtgggcaagggcgaccgggttgtgatctacatgccgatgatccccgaggccgcctatgcgatgctggcctgcgcgcggattggtgccattcattcgatcgtctttgcgggtttcagccccgatgcgctgggtgcgcggatcaatggctgtgatgccaaggtggtgatcaccgccgatcacgcgccgcgcggcggccgcaagaccaagctcaaggacaacgtcaatcaggcgctgttgcacgatacgtcggatgtgaaatgtcttgtggtgcagcgcaccggcgatcaggtggcatggcggcgtgatctggatttctggtggcatgaagaggccgagaaagtcagcgccgattgcccgcccgaagagatgaacgccgaggatacgctgttcatcctctacacgtctggctccaccggcatgcccaagggcgtggtgcataccaccggcggctatctgacctatgcgtcgatgacgcatgaatacatcttcgactatcacgagggtgatatttactggtgcaccgccgatgtgggctgggttaccgggcatagctatatcgtctatggaccgctggccaatggcgccacgacattgatgttcgagggcgtgccgacatggccggatgcggggcgattctggcaggtctgcgagcgccacaaggtcacgcagttctacaccgcccccaccgccattcgtgccttgatgggcaagggcaccgggccggtcgagggcagcgatctgtcgagcctgcgtatccttggctcggtcggcgagccgatcaatcccgaggcctggaactggtacaatgagaatgtcggcaaggggacctgccccatcgtcgatacatggtggcagaccgaaaccggcggaatcctcatcacgccgctgccgggtgtgatcgacacgcccaagcccggttcggccaccaagccgttctttggcgtgcagcccgtcgtgctggatgatcagggcaacgagctggcgggcgaaacctcgggcgttctggcgctcaaggacagctggccggggcagatgcgcaccgtctggggcgatcacagccggtttgtctcgacctatttcgagatgttcaaaggctattatttctcgggtgacggatgccgccgcgacgcggatggcgattattggatcacgggccgcgtcgatgatgtgatcaacgtctctggccaccggatgggcaccgccgaggtggaatcggcgctggtggcgcatgccaccgtcagcgaggccgccgttgtgggctatccgcatgatatcaaggggcagggcatctattgctatgtcacgctgatggatggggtggagccgaccgatgcgctgcgcacggaactgggcaactgggtccgtcaggagatcgggccgattgccaagccggatgtgatccaatgggcgccgggcctgccgaaaacccgctcgggcaagatcatgcgccgtatcttgcgcaagattgccgagaacgattttgacagccttggcgatacctcgacgctggccgatccgtcggtcgtggacgagttgattgccaatcgcaccaaagcctga

SEQ ID NO: 151591 - protein, 665 aa, Roseovarius sp. 217
MRRDLIWMSGGRWDGGFQVMTETKTGAAATGPGFHIDSETYERMYAASITDPEAFWGEHGKRLDWIKPYTKVKNTSFDYDNVSIKWFEDGTLNVAANCIDRHLATRGNQTAIIWEPDDPTDEPQHITYTELHTQTCKMANVLKSMGVGKGDRVVIYMPMIPEAAYAMLACARIGAIHSIVFAGFSPDALGARINGCDAKVVITADHAPRGGRKTKLKDNVNQALLHDTSDVKCLVVQRTGDQVAWRRDLDFWWHEEAEKVSADCPPEEMNAEDTLFILYTSGSTGMPKGVVHTTGGYLTYASMTHEYIFDYHEGDIYWCTADVGWVTGHSYIVYGPLANGATTLMFEGVPTWPDAGRFWQVCERHKVTQFYTAPTAIRALMGKGTGPVEGSDLSSLRILGSVGEPINPEAWNWYNENVGKGTCPIVDTWWQTETGGILITPLPGVIDTPKPGSATKPFFGVQPVVLDDQGNELAGETSGVLALKDSWPGQMRTVWGDHSRFVSTYFEMFKGYYFSGDGCRRDADGDYWITGRVDDVINVSGHRMGTAEVESALVAHATVSEAAVVGYPHDIKGQGIYCYVTLMDGVEPTDALRTELGNWVRQEIGPIAKPDVIQWAPGLPKTRSGKIMRRILRKIAENDFDSLGDTSTLADPSVVDELIANRTKA

SEQ ID NO: 151592 - DNA, 1941 bp, Idiomarina baltica OS145
  CDS (1)..(1941): transl_table=11
atgtcgcaactgtacaaagttccagaaaacataaaaaacaccgcgaaaattacaaacgacgattatttggaaatgtatcaagcgtcgattaatgacccagagggtttctggcgagaacagggtaaacgaatcacgtggtttactccatacaccaaggtcaaaaatacctcttttagtccgcgtaacatcaatattaagtggtatcaagacggtacgcttaacgcctgttataactgtattgaccgccatcttgccgataaggccgataaaacagccatcatttgggagggcgacgacccgagtgtcgataaacacattacgtatcgcgagatgcataaagaagtttcccgcttcgccaatggactgaagaagctgggcgttggcaaaggtgaccgtgtggcgatttacatgccgatggtgcctgaggcggcttatgccatgctagcgtgtgcgcgtatcggtgcggtgcattcggtcattttcggtggcttttctccgaatgctattgctgatcgtatcaacgactgtggtgctaaggtgattatcaccgccgatgagggacgtcgcggtggtagcaccattggtttgaagaaaaacgttgatgcggcgctcgaagacgacgcctgcccgactctggagcatgttgtcgttagccaagtcaccgaaggcgctgtgaattggactgagggtcgcgatgtatggtggcatgagctcattgccgacgtcagcgaagaatgtcagccggaagtcatggatgcggaagacccgctattcatcctttatacatcgggctcgacgggtaagccgaaaggcgtggtgcacaccaccggtggctacatggtgtgggcttccatgacccatgaatacgtctttgattgtcacgacgacgatatttattggtgtgcggctgatgtgggctggattaccggtcactcgtacattgtttatggtccttttgctaacggtgcaacctcgttgatgttcgaaggcgtaccgacatacccgggcgtgggtcgtattggagagatcgtcgataaacatcaagtatcgattctttatacagcgccaacggcgattcgtgcgctgatggcaaaaggcgatgaagctgcgaaaacctcaacacgtgaatcactccgtgtactgggcagtgtgggtgagccgatcaacccagaagcatgggagtggtatcacaaacgcattggtaacggtcagtgtccgattatggatacctggtggcagaccgagaccggtggcatcatgattacgccattgccaggcgcgaccgatttaaagccaggctcagcgacgcgacctttctttggtgtcaaaccggcgctggtcgacggcgaaggtaacaaacaagaaggcgaggctgaaggtggcttgatcattgaggactcatggccgggccaaatgcgtacgctgtggggcgatcacgaacgcttcgagcagacctatttctcgacctacaaaaatgtctactttaccggtgatggtgccaaacgcgatgccgatggctattactggattaccgggcgcgtcgatgatgtcttgaacgtttcaggtcaccgcttaggtactgctgaaattgagagcgcgttggttgcacacagtgcggtcgcggaagcggctgtcgtaggcttcccgcacgatatcaaagggcagggcatttacgtttatattacgccggtcgatggtgttgaggtgaccgatgaactgaccaaagaggtacgcaactgggtacgttcagagttaagcccgattgcgacgccggatatcttgcattggacgaaaggtttacctaaaacacggtcaggaaaaatcatgcgtcgtatcttgcgcaagatcgcagctaatgagtttgataatttaggtgatacctctacgcttgccgatccaagtgtggtagattctttgatagaacatcgtaagaatcaataa

SEQ ID NO: 151593 - protein, 646 aa, Idiomarina baltica OS145
MSQLYKVPENIKNTAKITNDDYLEMYQASINDPEGFWREQGKRITWFTPYTKVKNTSFSPRNINIKWYQDGTLNACYNCIDRHLADKADKTAIIWEGDDPSVDKHITYREMHKEVSRFANGLKKLGVGKGDRVAIYMPMVPEAAYAMLACARIGAVHSVIFGGFSPNAIADRINDCGAKVIITADEGRRGGSTIGLKKNVDAALEDDACPTLEHVVVSQVTEGAVNWTEGRDVWWHELIADVSEECQPEVMDAEDPLFILYTSGSTGKPKGVVHTTGGYMVWASMTHEYVFDCHDDDIYWCAADVGWITGHSYIVYGPFANGATSLMFEGVPTYPGVGRIGEIVDKHQVSILYTAPTAIRALMAKGDEAAKTSTRESLRVLGSVGEPINPEAWEWYHKRIGNGQCPIMDTWWQTETGGIMITPLPGATDLKPGSATRPFFGVKPALVDGEGNKQEGEAEGGLIIEDSWPGQMRTLWGDHERFEQTYFSTYKNVYFTGDGAKRDADGYYWITGRVDDVLNVSGHRLGTAEIESALVAHSAVAEAAVVGFPHDIKGQGIYVYITPVDGVEVTDELTKEVRNWVRSELSPIATPDILHWTKGLPKTRSGKIMRRILRKIAANEFDNLGDTSTLADPSVVDSLIEHRKNQ

SEQ ID NO: 151594 - DNA, 1959 bp, Nitrobacter sp. Nb-311A
  CDS (1)..(1959): transl_table=11
atgtccgacaatatttatgatgtaagcgcggattgggccaagcgggcttgggtcgacgacgccaaatatcgcgagatgtatgcgcgctcgatcaaggatccggacggattctggtccgaggcggcgcagcgcctggactggatcacgccgttcaccaaggtcgagaacgcctcgttcgaactcggcaaggtctcgatcaaatggttcgaggacggcgtgctcaacgccgcctacaactgcatcgaccggcatctggaaacacgcggcgaccagaccgcgatcatctgggaaggcgacgatccctcgcagtccaggcacatcacctatcgcgaactgcacgacgaagtctgcaagatggccaacatcctgcggctgcgcaacgtcaagaagggcgaccgcgtcaccatctacctgccgatgattccggaagctgcctacgcgatccttgcctgcgcgcggatcggcgcgatccactcggtggtgttcggcggcttctccccggactccatcgcaggccgcctgcgcgattgcaaatcgcgcgtcatcatcacctccgacgagggcctgcgcggcggccgcaccatcgcgatgaaggccaatgtcgacgccgcgatcgagaaggtcaacggcgaggtcgactgggtgatcgtcgtcaaacgcacgggcggcaatgtcgacatgaatccgacgcgcgacgtctggtatcacgaggccgcggccgtggtcgaaagtgaatgcccgtgcgaaccgatgaacgcggaagatccgctgttcatcctctacacctcgggatcgaccggacagcccaagggcgtcctgcacaccaccgccggctatctggtcttcgtggcgatgacgcaccaatacgtcttcgactatcacgacggcgacatctactggtgcaccgccgacgtcggctgggtcaccggccacagctacatcctgtacgggccgctggcgaacggcgcgaccacgataatattcgagggcgtgccgaactatcccgacacctcccgtttctggaacgtgatcgacaagcacaaggtcaacatcttctataccgcgccgaccgcgatccgcgctttgatgcaggcgggcgacgagccggtgaagaaaacctcgcgcgcgagccttcgcctgctcggctcggtcggcgagccgatcaaccccgaagcctgggaatggtaccaccgcgtggtcggtgacggccgctgcccggtggtcgacacctggtggcaaacggaaaccggcggcatcatgatctcggcgctgccgggcgcgatcgctcagaagcccggctccgcgaccaagccgttcttcggaatcgtgcccgagatcgtcgatgccgacggcaatgttttggaaggcgaatgcagcggcaacctgtgcatcgcaagatcgtggccggcccaggtgcgcacggtctatggcgatcacgcccgcttcgagcagacctacttctcctcctacaagggaagatacttttccggcgacggctgccgccgcgacgccgacggctattactggatcaccggccgcgtcgatgacgtcatcaacgtctccggtcaccgcatgggcacggcggaagtcgaaagctcgctggtcgcgcatgaaagcgtgtcggaagccgccgtggtcggctatccccacaacatcaagggccagggcatctacgcttacgtcaccctgatgcagggcgtggagccgagcgagacactgcgcaaggaactggtcgcgtgggtccgcaaggacatcggcccgatcgcttcccctgacctgatccagtttgcgcccggcctgccgaaaacccgttccggcaagatcatgcgccgcatcctgcgcaagatcgccgaggatgagccgtccagcctcggcgacaccacgacgcttgctgatcctgccgtcgtcaccgatctcgtcaagaatcgccagaacaaaaaagacggcgcgacagcttag

SEQ ID NO: 151595 - protein, 652 aa, Nitrobacter sp. Nb-311A
MSDNIYDVSADWAKRAWVDDAKYREMYARSIKDPDGFWSEAAQRLDWITPFTKVENASFELGKVSIKWFEDGVLNAAYNCIDRHLETRGDQTAIIWEGDDPSQSRHITYRELHDEVCKMANILRLRNVKKGDRVTIYLPMIPEAAYAILACARIGAIHSVVFGGFSPDSIAGRLRDCKSRVIITSDEGLRGGRTIAMKANVDAAIEKVNGEVDWVIVVKRTGGNVDMNPTRDVWYHEAAAVVESECPCEPMNAEDPLFILYTSGSTGQPKGVLHTTAGYLVFVAMTHQYVFDYHDGDIYWCTADVGWVTGHSYILYGPLANGATTIIFEGVPNYPDTSRFWNVIDKHKVNIFYTAPTAIRALMQAGDEPVKKTSRASLRLLGSVGEPINPEAWEWYHRVVGDGRCPVVDTWWQTETGGIMISALPGAIAQKPGSATKPFFGIVPEIVDADGNVLEGECSGNLCIARSWPAQVRTVYGDHARFEQTYFSSYKGRYFSGDGCRRDADGYYWITGRVDDVINVSGHRMGTAEVESSLVAHESVSEAAVVGYPHNIKGQGIYAYVTLMQGVEPSETLRKELVAWVRKDIGPIASPDLIQFAPGLPKTRSGKIMRRILRKIAEDEPSSLGDTTTLADPAVVTDLVKNRQNKKDGATA

SEQ ID NO: 151596 - DNA, 1911 bp, Dokdonia donghaensis MED134
  CDS (1)..(1911): transl_table=11
atgagtaactatcacattaagggcttagaagagtattttcaagtctaccgaaagtctgtaaatacgcctgaaaaattttgggaagaaatagccgaagagaactttgtttggagaaaaaagtgggatactgtactgcagtgggattttacaaaaccagaggtaaagtggtttaaaggggcgcagctcaacatcacagaaaactgtatagataggcacctgtatactaaggcagatcaaacggctatcatttttgagcctaatgatgtagatgagcaagcacaacacattacttataaacaactgcacgagcgcgtgtgcaaatttgcaaacgtgttaaaagatcagggcattgagaaaggtgatcgtgtatgtatatatctacctatgataccagaactctctatagccgtactcgcctgtgctcgtataggtgcggtacactctgtagtgtttgctggtttttctagtacagcacttagtacacgcataaatgatgcttcctgtaagctagtaatcacgagtgatggctcttatcgaggtaagaaaaccatagatttaaaaggtatcgtagatgaagcacttgcagaaacaccttgtgtagacagtgtgctcgttgtaaaaagaatacatacagaagtcgcaatgaaagaaggccgtgatcactggttacagcccttactagaaaaagcaagtgcaacttgtgatgcggtcctaatgaatgccgaagatcctctctttatactttatacatctggatctacaggtaagcctaaagggatggtgcacaccacagcgggatatatggtatatagcgcatatacgtttaagaacgtttttcaatatagacaaggagatgtatactggtgtacggcagatataggttggattacgggtcatagctatatcatttatgggccactggcaaatggggcaactacagtaatgtttgagggtgtacccacctatccagattggggtagattctggcaaattgtagaaaaacataaagtcacacaattttatacagcacctacggctatacgtgcgctggccaaagagagtcttgataatgttactaagtatgacttatcaagtattaaaattttaggaaccgtaggagaacctattaatgaagaagcgtggcactggtatgatgaaaatataggtaaaaaaggaatcccaatagcagacacctggtggcaaaccgaaactggaggcattatgataagtcctattccatatgctacacctactataccaacctttgcaacattaccattaccagggatacaaccatcacttatggatgaaaatggcgctgaaatcaaaggcaatcaagtagacggccgtcttactattaagtttccttggccagggatggcgcgcactatatggggtaatcaccagcgatataaagaaacttattttaccgcctatgagaacaggtattttacgggtgatggcgccctaagagatgcaacaggttattatagaataactggtcgtgtagatgatgttattattgtctctggacataacctaggaaccgcacctatagaagatgccgtaaatgagcacccagccgttgcagagagtgccatcgtaggttttcctcacgatgtaaagggtaatgccttatacgggtatgtgattcttaaagaaacaggagagagtagagatcaagataacgtgcgtaaggagattaaccagcttataacagaacgtataggccctattgcaaaactggataaaattcaatttacaccaggattgccaaaaacaaggtctggtaaaattatgagaagaatactccgtaagattgctagtggcgagagcgagcagctaggagatataagcaccctgcttaatccagaagttgtagcgactataaaggataatgcattactataa

SEQ ID NO: 151597 - protein, 636 aa, Dokdonia donghaensis MED134
MSNYHIKGLEEYFQVYRKSVNTPEKFWEEIAEENFVWRKKWDTVLQWDFTKPEVKWFKGAQLNITENCIDRHLYTKADQTAIIFEPNDVDEQAQHITYKQLHERVCKFANVLKDQGIEKGDRVCIYLPMIPELSIAVLACARIGAVHSVVFAGFSSTALSTRINDASCKLVITSDGSYRGKKTIDLKGIVDEALAETPCVDSVLVVKRIHTEVAMKEGRDHWLQPLLEKASATCDAVLMNAEDPLFILYTSGSTGKPKGMVHTTAGYMVYSAYTFKNVFQYRQGDVYWCTADIGWITGHSYIIYGPLANGATTVMFEGVPTYPDWGRFWQIVEKHKVTQFYTAPTAIRALAKESLDNVTKYDLSSIKILGTVGEPINEEAWHWYDENIGKKGIPIADTWWQTETGGIMISPIPYATPTIPTFATLPLPGIQPSLMDENGAEIKGNQVDGRLTIKFPWPGMARTIWGNHQRYKETYFTAYENRYFTGDGALRDATGYYRITGRVDDVIIVSGHNLGTAPIEDAVNEHPAVAESAIVGFPHDVKGNALYGYVILKETGESRDQDNVRKEINQLITERIGPIAKLDKIQFTPGLPKTRSGKIMRRILRKIASGESEQLGDISTLLNPEVVATIKDNALL

SEQ ID NO: 151598 - DNA, 1962 bp, Roseobacter sp. MED193
  CDS (1)..(1962): transl_table=11
atgtcaccgcagcccgaaggtcaggcccacgcgccatccgaggaaaccgttgcccgcgcccatgtggacagtgcaaagtatgaggaaatgtatgccgcctcgctgaacgatccagaagccttttgggcggagcacggcaaacggatcgactggatcaaacccttcaccactgtgaaggatgtgaattacaactttggcgaagtctcgatcaactggttttctgacggcaccctgaacgtctcggccaactgcattgaccgccatctggacacccgtggcgaccagaccgcgatcatctttgaacccgatgatccaaatgaggccgcgcagcatatcacctataaggagctgcaccgccgcacctgccgcatggccaatattttggaaaccatgggcgtgcgcaaaggcgaccgggttgtaatctatctcccgatgatccccgaggcggcatatgcaatgctggcctgtgcccgcatcggcgcaattcattctattgtatttgccggtttcagtcccgatgccctggcggcccgcgtcaacggttccgacgccaaggtggtgatcaccgccgatgaagccccccgtggtggccgcaaaactccgctgaaatccaacgcagacgccgccctcttgcattgcaaggacacggtgaaatgcttggtggtcaaacgcactggcggccagaccacctgggtcgctgatcgcgactatgactataacgagatggcgctggaagcgaacgactactgcaaacccgcagagatgaacgccgaagacccgctctttgtgctctacacttccggctcgacaggccagcccaaaggtgtcgttcatacctccgggggctatctcgcctatgcggcgatgacccatgaaatcacttttgattaccatgatggcgatatctactggtgtaccgctgacgtgggctgggtcaccggccacagctatatcgtctacggcccactagccaatggtgccaccaccttgatgttcgagggcgtaccaacctatccagacgccagccggttctggcaggtctgtgaaaagcacaaggtcaaccagttctacactgctcccactgcgctgcgcgctttgatgggtcagggcaacgagtgggtcgagaaatgtgatctctcctcgctgcgcctgctgggcactgtgggggaaccaatcaaccccgaggcctggaactggtacaacgatgttgtcggcggtggccgctgcccgatcgttgacacctggtggcagaccgaaaccggtggccatctgatgacccccctgcctggtgcccatgccaccaagcccggctcggcgatgaagcccttctttggcatccagccagtcgtgctggatccgcagtccggcgaagagatctctggcaatggtgtcgagggtgttctctgcatcaaggacagctggccaggccagatgcgcaccgtctggggcgatcatgagcgcttccagaagacctatttctctgattacaaaggctactactttaccggtgacgggtgccgacgtgacgaggatggagactactggatcaccggtcgcgtcgatgatgtgatcaatgtctctggtcaccggatgggcaccgccgaggtcgaaagcgccctggtcgcccatgccgcagtcgccgaggccgccgtggtaggctacccccatgacatcaagggccagggcatctattgctatgtcaccctgatgaacgaccgcgagccgtcagatgagctgctgaaagagctgcgcacctgggtgcgtaccgagatcggcccgatcgccagccccgacgtgatccaatgggcccccggcctgcctaagacccgctcaggcaagatcatgcgccgcatcctgcgcaagatcgcagagaacgactttggcgcattgggcgacacctcgaccctggcggatccatcggtggtcgatgatctgatcgccaaccgggcaaacaagggataa

SEQ ID NO: 151599 - protein, 653 aa, Roseobacter sp. MED193
MSPQPEGQAHAPSEETVARAHVDSAKYEEMYAASLNDPEAFWAEHGKRIDWIKPFTTVKDVNYNFGEVSINWFSDGTLNVSANCIDRHLDTRGDQTAIIFEPDDPNEAAQHITYKELHRRTCRMANILETMGVRKGDRVVIYLPMIPEAAYAMLACARIGAIHSIVFAGFSPDALAARVNGSDAKVVITADEAPRGGRKTPLKSNADAALLHCKDTVKCLVVKRTGGQTTWVADRDYDYNEMALEANDYCKPAEMNAEDPLFVLYTSGSTGQPKGVVHTSGGYLAYAAMTHEITFDYHDGDIYWCTADVGWVTGHSYIVYGPLANGATTLMFEGVPTYPDASRFWQVCEKHKVNQFYTAPTALRALMGQGNEWVEKCDLSSLRLLGTVGEPINPEAWNWYNDVVGGGRCPIVDTWWQTETGGHLMTPLPGAHATKPGSAMKPFFGIQPVVLDPQSGEEISGNGVEGVLCIKDSWPGQMRTVWGDHERFQKTYFSDYKGYYFTGDGCRRDEDGDYWITGRVDDVINVSGHRMGTAEVESALVAHAAVAEAAVVGYPHDIKGQGIYCYVTLMNDREPSDELLKELRTWVRTEIGPIASPDVIQWAPGLPKTRSGKIMRRILRKIAENDFGALGDTSTLADPSVVDDLIANRANKG

SEQ ID NO: 151600 - DNA, 1911 bp, Leeuwenhoekiella blandensis MED217
  CDS (1)..(1911): transl_table=11
atgagtaattatcacataaaacatttagaagaatattttcaagtctatcgtaaatctgttagaaacccggaaagctactgggaagaaatagccgaagaacattttttatggcataagcgttgggataacgtactgagttatgattttgacaaacccgaatttaagtggtttgaaggtgcccaactgaatattaccgaaaactgcatcgaccgtcatttacgcacccgcggagataaaacagcgattctttttgagcctaacgatcctaaagaaaaagcacaacatatcacgtacaacgaattgcacaagcgtgttgcccaaatggcaaatgtgcttaaagcaaaaggaattaaaaagggagatcgcgtgtgtatttacttacctatgattcctgagcttgcgatttctctattggcttgtgcgcgtattggcgccatacattctgtggtgtttgcaggcttttcttcaaaagctttagccacacgaatcaacgattctagctgtaaaatggtgatcaccagtgacggttcttaccgcggaagcaaaaccatcgatctaaaaggtatcgttgatgaaggtttaaaaagctgcgaaagcatagaaagtgttttggtggttaagcgcatcaattctgatattcatatggaagaaggccgcgatcattggttacagcccttgcttgatgaagctgaagaaacctgcgctcctgagattatgaatgccgaagatccgctgtttattttatacacttcaggttcaacgggaactccaaaaggaatggtgcataccacggcaggttatatggtgtataccgcatttacctttaaaaatgtatttcagtatcgagaggatgatatttattggtgtactgcagacatcgggtggataaccggacatagttatattgtctatggtccgctggcgaatggtgcaacaacggtaatgtttgaaggtgtgcctagttatcctgatcacgcacgtttttgggaaatcgtagaaaagcataaagtgacacaattttataccgcgccaacagccatcagagccttaggtaaagagaatctggattttgtagaaaaacacgatctatcttctttaaaagtacttgggacagtaggtgaacccattaatgaggaagcttggcactggtacgatgaaaatattgggaagcgcaattgccccattgtagacacctggtggcaaaccgaaaccggaggaattatgatctcgcctattccgtattctactccggcgataccaacctttgcaacgcttccgttaccggggattcaaccggccttaatggatgaagaaggaaaagaaattaaaggaaatcaagtagacggcagactgtgtataaaatttccttggccatcgatggcgcgtactatctggggcaatcaccaacgttataaagacacgtatttttcagcttttaaaaatatgtatttcaccggtgacggggctttacgtgatagcgttggctattatcgaataaccggtcgtgtagatgatgtggttatcgtaagtggtcataacttaggaactgcaccaattgaagatgccattaacgagcatccggcagttgcagaaagtgctattgtgggatatcctcacgaagtaaaaggaaatgcgctttacggttatgtaattctaaaagaaaccggggaaacccgtaatcaggacaacctgagaaaagagatcaatcaaatgatttcagatcgtattggccccattgccaaactgaataaaattcagtttactagcggattgcccaaaacccgaagcgggaaaatcatgcgtcgtattttacgtaaaatcgcctccaacgacacctcaaatcttggagataccagtacgctattaaatcctgaaatcgtacaggaaataatggacaatgtgattaagtaa

SEQ ID NO: 151601 - protein, 636 aa, Leeuwenhoekiella blandensis MED217
MSNYHIKHLEEYFQVYRKSVRNPESYWEEIAEEHFLWHKRWDNVLSYDFDKPEFKWFEGAQLNITENCIDRHLRTRGDKTAILFEPNDPKEKAQHITYNELHKRVAQMANVLKAKGIKKGDRVCIYLPMIPELAISLLACARIGAIHSVVFAGFSSKALATRINDSSCKMVITSDGSYRGSKTIDLKGIVDEGLKSCESIESVLVVKRINSDIHMEEGRDHWLQPLLDEAEETCAPEIMNAEDPLFILYTSGSTGTPKGMVHTTAGYMVYTAFTFKNVFQYREDDIYWCTADIGWITGHSYIVYGPLANGATTVMFEGVPSYPDHARFWEIVEKHKVTQFYTAPTAIRALGKENLDFVEKHDLSSLKVLGTVGEPINEEAWHWYDENIGKRNCPIVDTWWQTETGGIMISPIPYSTPAIPTFATLPLPGIQPALMDEEGKEIKGNQVDGRLCIKFPWPSMARTIWGNHQRYKDTYFSAFKNMYFTGDGALRDSVGYYRITGRVDDVVIVSGHNLGTAPIEDAINEHPAVAESAIVGYPHEVKGNALYGYVILKETGETRNQDNLRKEINQMISDRIGPIAKLNKIQFTSGLPKTRSGKIMRRILRKIASNDTSNLGDTSTLLNPEIVQEIMDNVIK

SEQ ID NO: 151602 - DNA, 1956 bp, Congregibacter litoralis KT71
  CDS (1)..(1956): transl_table=11
atgattaacgaggggcccatcatgtctcaccatttccctacgcatcccatccccgcgggttttgaagacgcgcacattcaacccgcagactacaaggccatgtatgagcgctccctgagcgatcgcgacggcttcttcgcggacatggccacagagttcctgacctgggataagccctgggactccgtatgctccttcgactttgtgaaaggcgacgccagttggttcgctggcggcaaactcaacgtcagcgtcaactgcatcgaccgtcatctcccggcgcgggcggatcagacagcgataatctgggagggtgacaaccccgaggacagtcgggcaatcacctatgcagaactcaaggacgagacctgccgtttagcgaacgccctccgtgcccgtggtgtgggcaagggcgatcgcgtctgcctgtatatgcccatggtgcccgaagccgctatcgccatgctggcctgcacccgaatcggcgcggtacacaccatcgtgttcggcggtttctcccccgaggccctgaaagaccgtattcagtccgccgagtgctctgcggtcatcaccagcgacgaaggactccgcggtggaaagaccgtgcccctcaaggtcaatgtcgacaagagcctcgtcgactgcaccagcgtgagcacctgcattgtggtgcgacgcacaggagcagaggtgcctatggatgagggtcgcgatgtgtactacgacgacatcaccgcagagcaaagcacggactgcgaacccgagtccatggatgccgaagatccactattcatactctacacctcgggctccacgggcaaacccaagggcgtacttcacaccacggcgggctatctcctccaggcgagcatgagttttaaatacgtgttcgattatcgcgaaggcgaggtttactggtgcacggcagacgtgggctgggttacggggcactcctacatcgtctatggccccctggccaatggcgcaacgacgctgatgtttgagggcgtaccgacttaccctgatgcgggtcgttgctgggatgtcgtggacaagcatcaggtctctattttttatacggcgcccacggcgatccgggcgctccagggtaaaggcgacgcttatgtgacgcgttcatcgcgaagcagtctgcgcatcctcggtaccgtgggagaacccatcaatcccgaagcctgggaatggtactttcatgttgtgggagacgaacgctgccctattgtcgacacctggtggcagacggaaaccggggcccatatgatcacccccctgcccggtgcgacccccatgaaagggggcgctgcatcggtgccgttctttggtgttgagcccgtattactggcggaggacggcagtgaaatagaaggcgtcggatccggctatctggccatcaaatcctcctggcccagccagatacgttcagtctacggcgaccaccagcgcatggtagacacctatttttccaactatcccggctactacttcaccggtgacggtgccacccgagatgaagatggctactactggattaccggacgcgtagatgacgtacttaatgtttcaggacatcgcatgggtacggcggaggtagaaagtgccgtggtactacatgacagtatcgccgaggccgcggtcgtgggctttccccatgacatcaagggacagggaatttactgctacgtgacacctatggaaggtgttgagaccaccgatgcgctcaaagcggaactgattcagctgtgtgtggaagaaataggccccattgccaagccagacgtcattcagtgggcgccggggctccccaaaacccgttcgggcaaaatcatgcggcgtatcctgcgcaagattgccgagaatgaattggacagccttggggacacgtccacgctcgctgatcccggcgttgtggatgagctgataaaaaaccgcgcgggctag

SEQ ID NO: 151603 - protein, 651 aa, Congregibacter litoralis KT71
MINEGPIMSHHFPTHPIPAGFEDAHIQPADYKAMYERSLSDRDGFFADMATEFLTWDKPWDSVCSFDFVKGDASWFAGGKLNVSVNCIDRHLPARADQTAIIWEGDNPEDSRAITYAELKDETCRLANALRARGVGKGDRVCLYMPMVPEAAIAMLACTRIGAVHTIVFGGFSPEALKDRIQSAECSAVITSDEGLRGGKTVPLKVNVDKSLVDCTSVSTCIVVRRTGAEVPMDEGRDVYYDDITAEQSTDCEPESMDAEDPLFILYTSGSTGKPKGVLHTTAGYLLQASMSFKYVFDYREGEVYWCTADVGWVTGHSYIVYGPLANGATTLMFEGVPTYPDAGRCWDVVDKHQVSIFYTAPTAIRALQGKGDAYVTRSSRSSLRILGTVGEPINPEAWEWYFHVVGDERCPIVDTWWQTETGAHMITPLPGATPMKGGAASVPFFGVEPVLLAEDGSEIEGVGSGYLAIKSSWPSQIRSVYGDHQRMVDTYFSNYPGYYFTGDGATRDEDGYYWITGRVDDVLNVSGHRMGTAEVESAVVLHDSIAEAAVVGFPHDIKGQGIYCYVTPMEGVETTDALKAELIQLCVEEIGPIAKPDVIQWAPGLPKTRSGKIMRRILRKIAENELDSLGDTSTLADPGVVDELIKNRAG

SEQ ID NO: 151604 - DNA, 1944 bp, Reinekea blandensis MED297
  CDS (1)..(1944): transl_table=11
atgagttcagaaaagtatccggttccggaagcagccgcagcgcgcacaaaagtcaataatcaacaatatcttgagctgtataaacagtcggttgaagacaacgaagggttctggagagagcagggccagcgcctggactggtttaaaccctataccgaagtgaaagacgtcagttacgacaaaaccaaccatcgcattcgttggtatgccgatggtgagttgaacgtcgcttataactgcatcgaccggcatctggagagccggggcgatcagacggcgatcattttcgaaggtgatgaaccgacagacgacgcgcacatcacctatcgtgaactgcatgccaatgtcagtcgcatggctaacgtgctcaaatcgttgggtgccaagaaaggcgatcgcattaccatttatatgccaatgataccggaagcagcctacgcgatgctcgcctgtgcccgcattggcgcgatccactcggttgttttcggtggcttttcaccggaagcactagccggtcggattgaggactgtacttcgaacctgatcattaccgcagacgagggtgtaaggggctctaagagcattccattgaaagccaatgtggataaagccctggaacatgagggtactaaatgcgtgaaccacgtcctggttgttcagcgcaccggcggtaaggtcgattggaaagatgggcgcgatgtttggtatcacgaccgtttcgatacagttgattccgaatgcccatgcgagcctatggaagcagaagatccgctgtttatcctctatacctcgggttcaacaggcaaaccgaagggcgttctgcatacaaccggtggttacctggtttatgcctcgatgactcatgagtacgttttcgattaccaagacggcgatgtgtattggtgcaccgccgatgttggctgggtaaccgggcacagttacatcgtctatgggccattggccaatggtgctgtgacgttaatgtttgaaggcgttccgacttacccatcaccgcgacgattcgccgaagtggtggaaaagcataaggtgaatatcctgtacaccgcaccgacggcgattcgcgcattgatggcgaccggagataaggcggttgaaggcacggacctgtcgtcactgcgcttattaggctcagtcggtgaaccgatcaatccggaagcctgggagtggtatcacaatgccttcggcgcgggcgagtgcccgattgtggacacctggtggcagacggaaaccggtggcattctgattaccccgctgcccggtgcgaccgaaatgaaacccggttctgccacgcggcctttcttcgggattcagccagcactggtcgacaataacggtcgggaactggacggggccgttgaaggcaatctggtcttgctggacagctggccgggtcagatgcgttctgttttcggtgatcatgagcggtttatccaaacctatttcagtacctatcctggcacctactttaccggcgacggggctcgtcgtgatgaagatggctactactggattaccggtcgggtcgatgatgtgctgaatgtgtcagggcatcgtctgggaacggctgaaatagagagcgcgctggtggcgcacccatcggtttcagaagcggccgtggtgggttacccgcatgacatcaaaggtcaggggatttatgtctacgtcagcccgatggccggcatttacccttccgatgagctgactcaggagctgaaacagtggttgcgtcaggaaatcgggccgatcgctaccccggaccttattcagtgggccgacggactgccgaaaacccggtcaggaaaaatcatgcgtcgtattctgcgtaagatcgcagccaatgagtacgatgctctgggggatacgtctacactggccgacccgggtgtggttgatgtcctgattgatgaacggatgaatcgctga

SEQ ID NO: 151605 - protein, 647 aa, Reinekea blandensis MED297
MSSEKYPVPEAAAARTKVNNQQYLELYKQSVEDNEGFWREQGQRLDWFKPYTEVKDVSYDKTNHRIRWYADGELNVAYNCIDRHLESRGDQTAIIFEGDEPTDDAHITYRELHANVSRMANVLKSLGAKKGDRITIYMPMIPEAAYAMLACARIGAIHSVVFGGFSPEALAGRIEDCTSNLIITADEGVRGSKSIPLKANVDKALEHEGTKCVNHVLVVQRTGGKVDWKDGRDVWYHDRFDTVDSECPCEPMEAEDPLFILYTSGSTGKPKGVLHTTGGYLVYASMTHEYVFDYQDGDVYWCTADVGWVTGHSYIVYGPLANGAVTLMFEGVPTYPSPRRFAEVVEKHKVNILYTAPTAIRALMATGDKAVEGTDLSSLRLLGSVGEPINPEAWEWYHNAFGAGECPIVDTWWQTETGGILITPLPGATEMKPGSATRPFFGIQPALVDNNGRELDGAVEGNLVLLDSWPGQMRSVFGDHERFIQTYFSTYPGTYFTGDGARRDEDGYYWITGRVDDVLNVSGHRLGTAEIESALVAHPSVSEAAVVGYPHDIKGQGIYVYVSPMAGIYPSDELTQELKQWLRQEIGPIATPDLIQWADGLPKTRSGKIMRRILRKIAANEYDALGDTSTLADPGVVDVLIDERMNR

SEQ ID NO: 151606 - DNA, 1908 bp, Polaribacter irgensii 23-P
  CDS (1)..(1908): transl_table=11
atgagtaattaccacatcaaacatttagaggaatattatcaagtatatcggaagtctataagagaacctgagaatttttgggaagaaattgcggaagagcactttgtgtggcgcaagaaatggaattctgttttggagtgggattttaaaataccggaagtaaaatggttttcaggtgcaaaattaaatattacagaaaactgcatcgataggcatttggcaacaagaggagataaaaccgctattttatttgagcctaatgatccgaaggaagcagcagagcacattagctatacagagctttctaaacgtgtcaatcagtttgcaaatgttttaaaagataaaggcattcaaaaaggagaccgggtttgtatttatgttcccatgattccagaattagccattgcaactttggcatgtgcaagaattggagccattcactctgttgtgtttgcaggtttttcagctgtggcgctggccacaagaataaatgattcagattgcaagatggtgattaccagtgatggttcgtatcggggtgcaaaaatcatcgatttaaaaggtattgtagacgaggctttagagcattgtcctggcgtatccactgttttggtagcaaagagaattcattcagaaatttatatgaaagaaggtcgtgatcagtggttgcaacctttgttagacactgcctcgaatgtatgtgaagcagaaataatggacgcagaagatccgttatttattttatacacttcaggttcaacagggacgccaaaaggaatggtacacaccactgcagggtacatggtgtacactgcctatactttcaaaaatgcttttcaatacaaagaaaatgatgtgtattggtgcacggctgatatcggctggattacagggcacagttatattgtttacggaccattagcaaatggtgccacgacccttctgtttgaaggcgttccaagttatcctgattttggacgtttctgggaaattgtagaaaagcacaaggtgagtcaattttatacagcacccaccgcaattagagctttggcaaagcacggcactgaagttgtagatgcttacgacctttcttccttaaaggttttaggctccgtaggggagccaataaatgaagaagcttggcattggtataacgacaatattggaaagaagaaaagtccgattatagatacctggtggcaaacagaaacaggagggatgatgattactccaattccatatgttacgcctacaaaaccaacctatgcaaccttgccttttattggcattcaacccgcgattgtggatgaaaaaggaaacgagttatcgggaaatcaagtagagggacgactgtgtattaaatttccatggccaagtattgcaagaactatttggggaaaccaccaaaggtataaagaaacctatttttcagcatataaaaacatgtactttacaggagatggtgcattgagagatgaggtagggtattaccgaataacgggtagggtagacgatgtaattattgtttctgggcacaatttaggtacggcgccaatagaagatgctattaacgaacatcccgcggttgcagaatctgcaatcgtaggttttccgcacgatattaaaggaagtgcattgtatgggtatattacactaaaagatatcggagaaagcaggagccaagataatttgcgaaaggagatcaaccaattgattacagatcgtattggtccgatagccaagttggataaaattcagttttcagagggattgccaaaaacgcgttccggaaaaattatgcgccgtattttgcgtaaaattgcctgcaatgaaatggataatttaggcgatgtttctaccttgttaaatcctgaggttgtgcagagtatcattgacaatcgtttgtag

SEQ ID NO: 151607 - protein, 635 aa, Polaribacter irgensii 23-P
MSNYHIKHLEEYYQVYRKSIREPENFWEEIAEEHFVWRKKWNSVLEWDFKIPEVKWFSGAKLNITENCIDRHLATRGDKTAILFEPNDPKEAAEHISYTELSKRVNQFANVLKDKGIQKGDRVCIYVPMIPELAIATLACARIGAIHSVVFAGFSAVALATRINDSDCKMVITSDGSYRGAKIIDLKGIVDEALEHCPGVSTVLVAKRIHSEIYMKEGRDQWLQPLLDTASNVCEAEIMDAEDPLFILYTSGSTGTPKGMVHTTAGYMVYTAYTFKNAFQYKENDVYWCTADIGWITGHSYIVYGPLANGATTLLFEGVPSYPDFGRFWEIVEKHKVSQFYTAPTAIRALAKHGTEVVDAYDLSSLKVLGSVGEPINEEAWHWYNDNIGKKKSPIIDTWWQTETGGMMITPIPYVTPTKPTYATLPFIGIQPAIVDEKGNELSGNQVEGRLCIKFPWPSIARTIWGNHQRYKETYFSAYKNMYFTGDGALRDEVGYYRITGRVDDVIIVSGHNLGTAPIEDAINEHPAVAESAIVGFPHDIKGSALYGYITLKDIGESRSQDNLRKEINQLITDRIGPIAKLDKIQFSEGLPKTRSGKIMRRILRKIACNEMDNLGDVSTLLNPEVVQSIIDNRL

SEQ ID NO: 151608 - DNA, 1938 bp, Nitrococcus mobilis Nb-231
  CDS (1)..(1938): transl_table=11
atgtccgaatcaaaagtgtatccggttccagccgccgtgaccgaacacgccttgctcgaccgccggcagtacgaacaaatgtatcagcgctcgatcagcgatccggacagcttctggggcgagcaggccgaggcgtttcttacttggttcaaacgatgggatcgcgtccattacgcggatttgcacaaaggcgacatccgttggttcgagggggccaagctaaacgtcagttacaattgtttggatcgacatctcgcgacccgaggtgatcaaatcgctctcatctgggaaggagatgagcctgatcaggacaagcgtatcacttaccgtgaactccatgagcaggtctgccgtttcgccaacgcgctgaaggcccgtggtgtacgcaaaggcgatcgggtctgtatttacctaccgatgattcccgaggcggccgcaacaatgcttgcctgcagccgcatcggggcggttcattcggtgatattcggcggtttctcatcgaacgcattgcgcgatcggattcttgattcggattgccacgttctgatcaccgccgacgagggcgtgcgcggcgggcgcccagtaccgctgaaagagaatgccgagcgggctttagcggaatgtcccaaagtcgacacggtattcgtcgtccgtcgcacggggagcgacatcacctggaccgacggccgtgacatctggtaccacgatgccattcgcacggccacggtggactgcccggccgagccgatggacgctgaagactcattttacatcctctacacatccggctcgaccggcaagcccaaaggggtactccacaccaccgctggctacctgcttcaagcggccatgacccataaatacatcttcgactaccacgacaatgaggtctattggtgtacggctgatgtcggctgggttacagggcactcctacatcgtctacgggccgctggcaaacggcgcgacgacgctgctcttcgaaggggtgcccacctacccggacgcatcccgcttctggcagatcatcgacaaacaccaagtgagcattttctataccgcacccacggcaattcgtgccttgatgggccagggtgacgaacccgtcaagaaaacgagccggcgcagccttcggctactcggcacggtaggtgaaccgatcaatccggaagcctgggagtggtattatcatatcgtcggcgagggccgctgcccgatcgtggatacttggtggcaaaccgagacgggcacgatcatgatttcacccctgcccggcgcgacggatctcaaacccgggtccgcgaccctgcccttcttcggcatcgaaccacagctggtggacaatgaaggtaacattgtgagtgggcctggcgagggcaatctttgcatcgcgcgcgcctggcccagcatgatgcgcaccgtctacggcgatcatgagcgttttcttaacacttatctcacccattaccccggcatgtatttcacgggagatggtgcccgtcgtgatcaagatggttattactggattacaggtcggatcgacgacgtactcaatatatccggccaccgtatgggtaccgcggagatcgagagcgccctagtactccactcagccgttgccgaagcggcggtggtcggttacccgcatgccatcaaaggccaaggcatctacgcttacgtgacgcttataataggcaatgccccgtccgatactctgcgccaagagttgatcgatctggtgcgcgaagaaatcggtgcgattgccaaacccgatatcattcagtgggcaccgtccttgcccaagacacgttccggcaagatcatgcgccgcatcctgcgcaaggttgctgccaacgagctcgacaatctgggggataccagcaccctggccgatccatcagtagtggcgcgtttggtcgagagccgagcccaccagtga

SEQ ID NO: 151609 - protein, 645 aa, Nitrococcus mobilis Nb-231
MSESKVYPVPAAVTEHALLDRRQYEQMYQRSISDPDSFWGEQAEAFLTWFKRWDRVHYADLHKGDIRWFEGAKLNVSYNCLDRHLATRGDQIALIWEGDEPDQDKRITYRELHEQVCRFANALKARGVRKGDRVCIYLPMIPEAAATMLACSRIGAVHSVIFGGFSSNALRDRILDSDCHVLITADEGVRGGRPVPLKENAERALAECPKVDTVFVVRRTGSDITWTDGRDIWYHDAIRTATVDCPAEPMDAEDSFYILYTSGSTGKPKGVLHTTAGYLLQAAMTHKYIFDYHDNEVYWCTADVGWVTGHSYIVYGPLANGATTLLFEGVPTYPDASRFWQIIDKHQVSIFYTAPTAIRALMGQGDEPVKKTSRRSLRLLGTVGEPINPEAWEWYYHIVGEGRCPIVDTWWQTETGTIMISPLPGATDLKPGSATLPFFGIEPQLVDNEGNIVSGPGEGNLCIARAWPSMMRTVYGDHERFLNTYLTHYPGMYFTGDGARRDQDGYYWITGRIDDVLNISGHRMGTAEIESALVLHSAVAEAAVVGYPHAIKGQGIYAYVTLIIGNAPSDTLRQELIDLVREEIGAIAKPDIIQWAPSLPKTRSGKIMRRILRKVAANELDNLGDTSTLADPSVVARLVESRAHQ

SEQ ID NO: 151610 - DNA, 1959 bp, Oceanicola granulosus HTCC2516
  CDS (1)..(1959): transl_table=11
atgagcaccgaggtcaaacagtatcccgtcaccgaggacgcggccgcccgcgcgcatgtcgatgccgagcgctacgcgcgcatgtacgcggcctccatcgacgatccggaggcgttctggcgcgagcagggccagcgggtcgactggatcaagccctacagccgggtgaaggacaccacgttcgggccgggcgaggtgtcgatcaagtggttcgaggacggcaccctcaacgtctccgccaactgcatcgaccgccatctcgccacgcggggcgagcagaccgcgatcatctgggagcccgacgagccgggagaggacgcgctccacatcacctaccgcgagctccacgccgccacctgccggatggccaacatcctcgccgacatgggcgtggccaagggcgaccgggtggtgatctacatgccgatgatccccgaggcggcttacgcgatgctggcctgcgcgcggatcggggcgatccactcggtggtgttcgccggcttcagccccgacgcgctcggcgcgcgggtctctggctgcgacgccaaggtggtgatcaccgccgacagcgccccccggggcggccgcaagacgccgctcaaggtcaacaccgacaaggcgttcaagcactgcaaggacagcgtcaagagcctggtcgtgcgccgcacgggcgacgacatcccctgggacgacgcccgcgacgtggattacaacgaggcggtgaagacggcgtcggacagcttcgagccggtcgaggtcggcgccgaggacccgctgttcatcctctacacctccggctccaccggccagcccaagggcgtggtccacacctcgggcggctacctcgtctacgccgcgatgacccaccgcttcaccttcgactaccacgacggcgacgtctactggtgctcggcggacgtcggctgggtcaccgggcacagctacatcgtctacgggccgctcgccaacggcgcgaccacgctgatgttcgagggcgtaccgacctaccccgacgccggccggttctgggaggtctgcgccaagcattccgtgacccagttctacaccgcccccaccgcgatccgcgcgctgatggggcagggcgaccagtgggtggaaaagcacgacctctccagcctgcgcctgctcggcacggtcggcgagccgatcaatcccgaggcctggaactggtaccaccgcgtggtcggcggcggccgctgcccgatcgtcgacacctggtggcagaccgagaccggcggccacctgatcaccccgctgccgggcgccaccacgctcaagccgggctcggcgaccaagccgttcttcggggtgcagccggtggtgctcgagccgcagaccggcgaggagatcaccaccgccgaggccgagggcgtgctctgcatcaaggacagctggcccggccagatgcgcacggtctggggcgatcacgagcgcttcgtgaagacctacttctccgactacgccggctactacttctccggcgacggctgccgtcgcgacgccgacggcgactactggatcaccggccgcgtcgacgacgtgctcaacgtctccggccaccgcatgggcaccgccgaggtcgaatccgcgctggtggcgcacgagaaggtcgccgaggcggccgtcgtgggctacccgcacgacatcaaggggcaggggatctactgctatgtgacgctgatgaacggcgtcgagccgagcgaggagctgcgccaggagctgcgccagttcgtgcgcaccgagatcggcccgatcgcctcgcccgacctgatccagtgggcgccgggcctgcccaagacccgctcgggcaagatcatgcgccgcatcctgcgcaagatcgccgaggacgatttcggcgcgctgggcgacacctcgacgctggccgacccctcggtggtggacgacctgatcgagaaccggatgaaccggaaggactga

SEQ ID NO: 151611 - protein, 652 aa, Oceanicola granulosus HTCC2516
MSTEVKQYPVTEDAAARAHVDAERYARMYAASIDDPEAFWREQGQRVDWIKPYSRVKDTTFGPGEVSIKWFEDGTLNVSANCIDRHLATRGEQTAIIWEPDEPGEDALHITYRELHAATCRMANILADMGVAKGDRVVIYMPMIPEAAYAMLACARIGAIHSVVFAGFSPDALGARVSGCDAKVVITADSAPRGGRKTPLKVNTDKAFKHCKDSVKSLVVRRTGDDIPWDDARDVDYNEAVKTASDSFEPVEVGAEDPLFILYTSGSTGQPKGVVHTSGGYLVYAAMTHRFTFDYHDGDVYWCSADVGWVTGHSYIVYGPLANGATTLMFEGVPTYPDAGRFWEVCAKHSVTQFYTAPTAIRALMGQGDQWVEKHDLSSLRLLGTVGEPINPEAWNWYHRVVGGGRCPIVDTWWQTETGGHLITPLPGATTLKPGSATKPFFGVQPVVLEPQTGEEITTAEAEGVLCIKDSWPGQMRTVWGDHERFVKTYFSDYAGYYFSGDGCRRDADGDYWITGRVDDVLNVSGHRMGTAEVESALVAHEKVAEAAVVGYPHDIKGQGIYCYVTLMNGVEPSEELRQELRQFVRTEIGPIASPDLIQWAPGLPKTRSGKIMRRILRKIAEDDFGALGDTSTLADPSVVDDLIENRMNRKD

SEQ ID NO: 151612 - DNA, 1950 bp, Photobacterium sp. SKA34; identical to SEQ ID NO: 126757
  CDS (1)..(1950): transl_table=11

SEQ ID NO: 151613 - protein, 649 aa, Photobacterium sp. SKA34; identical to SEQ ID NO: 126758

SEQ ID NO: 151614 - DNA, 1911 bp, Flavobacteria bacterium BBFL7; identical to SEQ ID NO: 126765
  CDS (1)..(1911): transl_table=11

SEQ ID NO: 151615 - protein, 636 aa, Flavobacteria bacterium BBFL7; identical to SEQ ID NO: 126766

SEQ ID NO: 151616 - DNA, 1950 bp, Aurantimonas manganoxydans SI85-9A1
  CDS (1)..(1950): transl_table=11
atgagcacgatccacgtcaaggatgagtggaaggcgcgggcgaagctgacggaggatcagtaccaggactggtaccgccgcagtgtcgaggacccggacggcttctggggcgagcacggcaagcgcctcgactggatcaagccttatgagcgggtgaagaacacctccttcgcgcccggcaatatcgacctccgctggttcgaggacggcacgctcaacgtcgccgccaactgcatcgaccggcatctggaaacccgcggcgaccagacggccatcctctgggagggggacgacccggccgattccaaggcgatcacctaccggcagctccacgaggaggtgtcgcgcatggccaatgtcctgaaggatcgcggcgtccagaagggcgaccgggtgaccatctacatgccgatggtgcccgaggcggcctacgccatgttggcctgcgcccgcatcggcgcgatccactccgtggtgttcggtgggttctcgccggacgcgttgggcggccggatcgaaggcgcgcagtcggacgtgctgatcacctcggacgagggtctgcgcggcggccgcaaggtgccgctgaagaagaatgccgaccgggcctgcgagatcgccgagaaggccggccagacggtcaagaccatgctggtgatccagcgcaccggcggcgaggtcgcctggcaggacggtcgcgacgtgtggtggcatgaggcgcgcgaggcggtgtccgccgattgcccgccagccgagatgcaggccgaggatccgctgttcatcctctacacgtcgggttcgaccggcaagccgaagggcgtgctgcacacgtcgggcggctatctcgtctacgcctcgatgacccacgaatacgtcttcgactaccatgacggcgacgtctactggtgcacggccgatgtcggctgggtgaccggccacagctacatcgtctacgggccgctcgccaacggcgcgacgacgctgatgttcgagggcgtgcccaactacccggatgcctcgcgcttctggcaggtgatcgacaagcacaaggtcaatatcttctacaccgcgccgacggcaatccgctcgctgatgggggccggcgacgcgatggtcacaaagacctcgcgcgccagcctgaaggtgctgggcacggtcggcgaaccgatcaatccggaggtctggagctggtattaccgggtcgtcggcgacgagcgctcgccggtggtcgacacctggtggcagaccgagacgggcggcatcctgatcaccccgctacccggcgccacggacctgaagcccggctcggcgacgcggccgttcttcggcgtccagccccagctcgtcgacaatgtcggcacggtgctggacggcgccaatgacggcaatctgtgcatcaccgattcctggccgggccagatgcgcacggtctatggtgaccacgagcggttcgagcagacctatttctcgacctatccgaacaagtacttcaccggcgacggggcacggcgcgacgccgacggctattggtggatcaccggccgcgtcgacgacgtgatcaacgtctccggccaccgcatgggcacggccgaggtggaatcggcgctggtctcccatgccaaggtctcggaagcggcggtcgtcggctatccgcacgacatcaaggggcagggcatctactgctatgtcacgctgatggagggcgaggagccgtccgaggcgctgcagaaggagctcgttgcccatgtgcgcaacgagatcggaccgatcgcctcgccggacaagattcagttcgcgccgggcctgccgaagacccgctccggcaagatcatgcgccgcatcctgcgcaagatcgccgaggacgatttcggcgcccttggcgacacctcgaccctcgccgatccgggcgtcgtcgacgacctcgtcgagcaccgccagaaccgcaagggctga

SEQ ID NO: 151617 - protein, 649 aa, Aurantimonas manganoxydans SI85-9A1
MSTIHVKDEWKARAKLTEDQYQDWYRRSVEDPDGFWGEHGKRLDWIKPYERVKNTSFAPGNIDLRWFEDGTLNVAANCIDRHLETRGDQTAILWEGDDPADSKAITYRQLHEEVSRMANVLKDRGVQKGDRVTIYMPMVPEAAYAMLACARIGAIHSVVFGGFSPDALGGRIEGAQSDVLITSDEGLRGGRKVPLKKNADRACEIAEKAGQTVKTMLVIQRTGGEVAWQDGRDVWWHEAREAVSADCPPAEMQAEDPLFILYTSGSTGKPKGVLHTSGGYLVYASMTHEYVFDYHDGDVYWCTADVGWVTGHSYIVYGPLANGATTLMFEGVPNYPDASRFWQVIDKHKVNIFYTAPTAIRSLMGAGDAMVTKTSRASLKVLGTVGEPINPEVWSWYYRVVGDERSPVVDTWWQTETGGILITPLPGATDLKPGSATRPFFGVQPQLVDNVGTVLDGANDGNLCITDSWPGQMRTVYGDHERFEQTYFSTYPNKYFTGDGARRDADGYWWITGRVDDVINVSGHRMGTAEVESALVSHAKVSEAAVVGYPHDIKGQGIYCYVTLMEGEEPSEALQKELVAHVRNEIGPIASPDKIQFAPGLPKTRSGKIMRRILRKIAEDDFGALGDTSTLADPGVVDDLVEHRQNRKG

SEQ ID NO: 151618 - DNA, 1950 bp, Photobacterium angustum S14
  CDS (1)..(1950): transl_table=11
atgagtgaggttcacgtttatccggtcaatgagaccatcgcaaaaaaagctcatatcaatgaagagcaataccgtgagatgtatcagcaatcagtgattaaccctgaaggtttttggcgtgaacatggccaaatcgttgattggatgacaccatttactaaagttaaaaacacctcatttgataccggccacgtcagcattaaatggtttgaagacggtgagcttaatgtctctgctaactgtattgatcgccacctcgcgaccaaaggcgatcaagcggctattatttgggaaggtgatgatcctaatgatgatgccaccttaacctacaatgaattacatcaagaagtctgtcagtttgctaacgccctaaagagccaaggtgtacgtaaaggtgatgtggtttgtctttacatgccaatggttgcggaagcggcaattgcaatgcttgcttgtacccgtattggtgcggtgcacactattgtctttggtggtttctctccagaagcattggctggacgcattatcgattcaaatgcaaaagtggttgttactgctgatgaaggcgtacgtggtggtcgtgctgttccccttaagaaaaatgtcgacgatgcgctagtaaaccctgaagttacgacagttgaaaaagtggttgtctttaaacgtactggcggtgaagttgcttggaatgatgagcgcgatgtatggtggcatgaagcaacagctgtggcttcggctcactgtgctccagaaccaatgaacgctgaagaccctctttttattctttatacgtctggctcaacaggtaagcctaaaggtgtacttcacaccacaggtggctatctggtatacgccacgatgacgtttaaatatgtatttgattaccaagaaggtgatgtgtactggtgtaccgcagatgtcggttggatcacaggtcacagctacttggtatacggaccacttgctaatggtgcaaccacggtattatttgaaggtgtaccaacctacccatcaaccagtcgcatgagtgaagtggtggataagcaccaagtcagcattttatacacagcacctaccgctattcgtgctctgatggcgaaaggtgatgaagcaattcaaggtactaaccgttcatcattgcgtatcatgggctctgtcggcgaacccattaaccctgaagcatgggaatggtatcaccgcacaattggcgacaaacgttgccctatcgtggatacatggtggcaaacagaaacaggcgggatcttaattacgccactaccgggtgcaaccgcactaaaaccaggctctgcaacacgcccattctttggtgtacaaccagcactcgttgataacgtcggtaatatccttgaaggcgccactgacggtaacttagtcatgaccgattcatggcctggtcaaatgcgtacgctttggggcgatcacgaacgttttgaacaaacctatttctctacctttaaaggcatgtacttcactggggacggcgcacgtcgtgatgaagacggttattactggatcacaggtcgtgtcgatgacgtgttaaatatttcaggtcaccgaatggggacggctgaaattgaatctgcactcgtggctttcgataagattgcagaagcggcgattgtgggtgtaccacatgagataaaaggccaagcaatttacgcctatatcaccctaaacgatggtgaacttccaagtgcagagctgcataaagaagtgaaaaactgggtacgtaaggaaatcggtcctatcgccacaccagacttcttacattggacggacgcattaccaaaaacacgttcaggtaagatcatgcgccgaattcttcgtaagatagcaactggagatacctcaaccttaggtgatacttcaacccttgctgatccaacagttgttgatcgacttattgaagaaaaacaaaaagtgatgtaa

SEQ ID NO: 151619 - protein, 649 aa, Photobacterium angustum S14
MSEVHVYPVNETIAKKAHINEEQYREMYQQSVINPEGFWREHGQIVDWMTPFTKVKNTSFDTGHVSIKWFEDGELNVSANCIDRHLATKGDQAAIIWEGDDPNDDATLTYNELHQEVCQFANALKSQGVRKGDVVCLYMPMVAEAAIAMLACTRIGAVHTIVFGGFSPEALAGRIIDSNAKVVVTADEGVRGGRAVPLKKNVDDALVNPEVTTVEKVVVFKRTGGEVAWNDERDVWWHEATAVASAHCAPEPMNAEDPLFILYTSGSTGKPKGVLHTTGGYLVYATMTFKYVFDYQEGDVYWCTADVGWITGHSYLVYGPLANGATTVLFEGVPTYPSTSRMSEVVDKHQVSILYTAPTAIRALMAKGDEAIQGTNRSSLRIMGSVGEPINPEAWEWYHRTIGDKRCPIVDTWWQTETGGILITPLPGATALKPGSATRPFFGVQPALVDNVGNILEGATDGNLVMTDSWPGQMRTLWGDHERFEQTYFSTFKGMYFTGDGARRDEDGYYWITGRVDDVLNISGHRMGTAEIESALVAFDKIAEAAIVGVPHEIKGQAIYAYITLNDGELPSAELHKEVKNWVRKEIGPIATPDFLHWTDALPKTRSGKIMRRILRKIATGDTSTLGDTSTLADPTVVDRLIEEKQKVM

SEQ ID NO: 151620 - DNA, 2046 bp, Candidatus Pelagibacter ubique HTCC1002
  CDS (1)..(2046): transl_table=11
atgcctaaaaaaaaatcattatcaaaagtgaaaaaaaaaacttcaaaaaaaactaaggctaaaaaaaaagtaaagccttttaagaaaaaggttttaaaaaaaatcgaagaaaaagaattaatcataaaaactaaacctgagtgggtaaaaagtgctctagtaaataaagcgaaatatcaaaaaaaatactcagactcgattaaaaaaaatgatgacttttggaagaatgaggggaaaagaattacttggattaaaccgtacaaaaagattaaaaatataaaatacagtaaaaaagaggttaaaattaaatggtatgaggatggcacattgaatgcttctgccaattgtatagaccgtcaccttaaagataaaaaagataaaaccgctattatttgggtgggtgatgatccaaaagatactaaaaaaatttcgtataaacaattacataatgaagtttctaaagctgcaaatggtttaagaaaactaggaattaaaaaaggtgatcgagttacaatttatttaactatgattccagaacttgcagtaacaatgcttgcttgtgctagaattggtgcggttcactctattatttttggtggtttttcggcagactctatttctggcagagttaatgactgtgagtcagaatacataataactgctgatgaaggagttagaggtggaaaaactattccactaaaacaaattacagatgaggctttaagaagttgtcctaatgtcaaaaaatgtattgttgtaaaaagaactggaaataaagttaattgggttaaaggaagagatgtttggtttgacgatttaattaaagatatgtcaactaaatgtgagcctgaggaaatgaatgcagaagatcctttgtttattctttacacatctggctctactggaaaaccaaaaggagttttacatacaacaggtggatatatggtttatgcatccatgacccatcaatatatttttaattataaaccaaaagatgtttattggtgtactgctgatattggttgggtaacgggtcacagttatattgtttatggaccacttgctaatggtgcaacaacaataatgtttgaaggaattccaacctatccagacagctcaaggtggtggcaaattattgataaacacaaagttaatattttttatacagcgcccactgctattagagctttaatgagagagggtgataagcctgttaagaaaacctcaagaaaatctttaaaattattagggactgttggtgaacccattaatcctgaggcttggatgtggtattataaaacagttggaaattctaaatgtccaattgttgatacatggtggcaaactgagacaggtggaattttaattagccctcaaacaggagctatgaatttaaaacctggttctgcaagtaaacccttttatggaattaagccctctatagttgataaagatggtaaagaaatcaaaggagctggtgaaggaagattgtgcatttctcaatcttggcctggtcaaatgagaactgtttatggtgatcatcaaagatttattgatacttatttttctcagtttgatggaaaatatttcacaggtgatggtgctaaaagagataaggatggctattactggataactggccgtgtagatgatgtaattattgtctctggtcataaccttggaactgccgagatagaaagtgcttttgttgctcatccaaaagttgctgaagctgctgtggttggatatccacataatattaaaggtaacggcctatattgttatgtaactctaaatgttggagagaaatcagatttagatcttgaaagagatttaaagctttgggtaagaaaacaaatcggtgcactagcgacacctgacattattcatttctcacctggacttccaaaaacaaggtctggaaaaattatgagaagaattttaagaaaaattgcagctaatgaacatgaccaattaggggatacaacaactttagctgatccaagcgttgtgcaaagtttggtggataatagaaagaatatttaa

SEQ ID NO: 151621 - protein, 681 aa, Candidatus Pelagibacter ubique HTCC1002
MPKKKSLSKVKKKTSKKTKAKKKVKPFKKKVLKKIEEKELIIKTKPEWVKSALVNKAKYQKKYSDSIKKNDDFWKNEGKRITWIKPYKKIKNIKYSKKEVKIKWYEDGTLNASANCIDRHLKDKKDKTAIIWVGDDPKDTKKISYKQLHNEVSKAANGLRKLGIKKGDRVTIYLTMIPELAVTMLACARIGAVHSIIFGGFSADSISGRVNDCESEYIITADEGVRGGKTIPLKQITDEALRSCPNVKKCIVVKRTGNKVNWVKGRDVWFDDLIKDMSTKCEPEEMNAEDPLFILYTSGSTGKPKGVLHTTGGYMVYASMTHQYIFNYKPKDVYWCTADIGWVTGHSYIVYGPLANGATTIMFEGIPTYPDSSRWWQIIDKHKVNIFYTAPTAIRALMREGDKPVKKTSRKSLKLLGTVGEPINPEAWMWYYKTVGNSKCPIVDTWWQTETGGILISPQTGAMNLKPGSASKPFYGIKPSIVDKDGKEIKGAGEGRLCISQSWPGQMRTVYGDHQRFIDTYFSQFDGKYFTGDGAKRDKDGYYWITGRVDDVIIVSGHNLGTAEIESAFVAHPKVAEAAVVGYPHNIKGNGLYCYVTLNVGEKSDLDLERDLKLWVRKQIGALATPDIIHFSPGLPKTRSGKIMRRILRKIAANEHDQLGDTTTLADPSVVQSLVDNRKNI

SEQ ID NO: 151622 - DNA, 1947 bp, Bermanella marisrubri; identical to SEQ ID NO: 126771
  CDS (1)..(1947): transl_table=11

SEQ ID NO: 151623 - protein, 648 aa, Bermanella marisrubri; identical to SEQ ID NO: 126772

SEQ ID NO: 151624 - DNA, 1938 bp, Pseudomonas aeruginosa PACS2
  CDS (1)..(1938): transl_table=11
atgttcgagatcagcgtccacccggtgccggacgccgtccgccagcgtgcctacctgaacgacgacgactaccagcgcctgtaccgccaatccgtcgagaaccccgacgagttctggggcgagcaggccaaggccttcctcgattggttcaagccctggcacagcgtccaccacggcgacctgaggaaaggccaggccacctggttcaagggcggccagttgaacgtcgcctacaactgcatcgaccgccacctggaacgccgcggcgaacagatcgcgatcgtctgggaaggcgacaaccccagcgaatccgcgcacatcacctaccgcaagctgcaccacaacgtctgccgcctggctaacgtgctgaagagccgcggcgtggaaaagggcgaccgggtctgcatctacatgccgatgattcccgaggccgcctacgccatgctcgcctgcgcccgcatcggggcggtgcactcggtggtgttcggcggcttctcgccggactcgctgcgcgaccgcatcctcgatgccgactgccgcaccgtgatcaccgccgacgagggcgtgcgcggcggcaagtacatcccgctgaagcagaatgtggaaaaggcgctgaaggactgcccggacgtctccaccgtggtggtggtcgagcgcacccagggcgacataccctgggtcgaaggccgcgacatctggtaccacgaggcgctccacgcggcctcagccgactgcccggcggaagcgatggacgccgaggacccgctgttcatcctctatacctccggcagcaccggcaagccgaagggcgtattgcacaccaccgggggctacctgctcggcgcggcgatgacccacaagtacgtgttcgactaccacgatggcgacgtctactggtgcaccgccgacgtcggctgggtcaccggacacagctatatcgtctacggcccgctggccaacggcgccaccaccctgatgttcgagggcgtgcccaactacccggacgcctcgcgcttctggcaggtgatcgacaagcaccaggtgaatatcttctacaccgcgccgaccgcgatccgcgcgctgatgcgcgaaggcgacgccccggtccgccagacctcgcgcagcagcctgcgcctgctcggctcggtgggcgagccgatcaacccggaggcttgggagtggtactaccaggtggtcggcgagaagcgctgccccatcgtcgatacctggtggcagaccgagaccggcagcatcctgatcaccccgttgcccggcgccactgcgctgaagccaggctcggcgacccgcccgttcttcggcgtgcaacccgtgctgctcgacgagaaaggcaaggaaatcgacggcgcgggcagcggcgtactggcgatcaaggccagttggccgagtcagatccgcagcgtctacggcgaccaccagcggatgatcgacacctacttcaagccctaccccgggtattacttcagcggcgacggcgcgcgccgcgacgaggacggctactactggatcaccggccgggtcgacgacgtgatcaatgtctccggacaccggatcggcaccgccgaggtcgagagcgcgctggtcctgcacgatgcggtggccgaggcggcagtggtcggctgcccgcatgacgtgaagggccaggccatctacgcgttcgtcaccctgatggccggcagtcagcccagcgaggcgctacaacaggaattgctggccctggtcggcaaggagatcggcagcttcgccaagccggatcacctgcaatgggcgcccagcctgccgaagacccgctccggcaagatcatgcggcgtatcctgcgcaagatcgcctgcaacgagctggacagtctcggcgatacctcgaccctggccgatccgggagtggtgcaggggttgatcgacaaccgcctcaaccgctga

SEQ ID NO: 151625 - protein, 645 aa, Pseudomonas aeruginosa PACS2
MFEISVHPVPDAVRQRAYLNDDDYQRLYRQSVENPDEFWGEQAKAFLDWFKPWHSVHHGDLRKGQATWFKGGQLNVAYNCIDRHLERRGEQIAIVWEGDNPSESAHITYRKLHHNVCRLANVLKSRGVEKGDRVCIYMPMIPEAAYAMLACARIGAVHSVVFGGFSPDSLRDRILDADCRTVITADEGVRGGKYIPLKQNVEKALKDCPDVSTVVVVERTQGDIPWVEGRDIWYHEALHAASADCPAEAMDAEDPLFILYTSGSTGKPKGVLHTTGGYLLGAAMTHKYVFDYHDGDVYWCTADVGWVTGHSYIVYGPLANGATTLMFEGVPNYPDASRFWQVIDKHQVNIFYTAPTAIRALMREGDAPVRQTSRSSLRLLGSVGEPINPEAWEWYYQVVGEKRCPIVDTWWQTETGSILITPLPGATALKPGSATRPFFGVQPVLLDEKGKEIDGAGSGVLAIKASWPSQIRSVYGDHQRMIDTYFKPYPGYYFSGDGARRDEDGYYWITGRVDDVINVSGHRIGTAEVESALVLHDAVAEAAVVGCPHDVKGQAIYAFVTLMAGSQPSEALQQELLALVGKEIGSFAKPDHLQWAPSLPKTRSGKIMRRILRKIACNELDSLGDTSTLADPGVVQGLIDNRLNR

SEQ ID NO: 151626 - DNA, 1965 bp, Fulvimarina pelagi HTCC2506
  CDS (1)..(1965): transl_table=11
atgaaccgaatgacgatgatcgaagtcaaggacgagtggaaatcgcgcgccaagatcgacaaggcgacctatgacgaatggtacaagcagtcgatcgacgatccggaagggttctggaagcagcacgccaagcgcatcgactggatcaaggaaccgaccaaggtcaagtcgatcaactacacgtatcccgacgtttcgattaaatggttcgaggacggcgaactcaacgtctgctacaactgtgtcgaccggcatctgaaggacaaaggcgataagaccgctatcctctgggaagctgacgagccgggcaacgcacagcacatcaccttccagcagctacacgagcacgtctgcaagttcgccaacgtcctgaaagagctcggtgttcagaagggcgaccgcgtcgtcatctatctgccgatgatcccgcaggcggcctacgccatgcttgcctgcgcccgaataggggctatccattctgtggtcttcgctggcttctcgcccggcgccttgcgcgatcgcgtcaacgactcggaggccaaggtcgtcattacggcgaatcatgcgccgcgcggcggcaaagccacgccgctgaagaagaacacagacaaggccttcgaaggcatcgaaggcgacgtcaaatgcctcgtcgtcaagcgcaccggcgacgacacacctatgaccgacggccgcgacttctggctccacgagatggaaggcaaggtcggcaatgactgcgattgcgaaccgatgaacgcggaagatccgctcttcatcctttacacctccggatcgaccggcaagccgaagggcgtcgtgcatacttcgggcggctacatcgtctacacctcgatgacgcacgagtacgttttcgactaccatccgggcgacatctattggtgcactgcggacgtcggctggatcaccgggcacagctacatcgtctacggcccgctcgccaacggtgctacgacgctcgtattcgaatcgacgccgacctatccggatgcctcgcggtgctggaaggtttgtgaggagcacaaggtcaaccagttctacaccgcgccgacagcgatccgcgccctcatgggtaagggccgaaagcatgtcgagggacatgacctctccgcgctgaagatcctcggcacggtcggcgagccgatcaatccggaagcctggaattggtattacgaagaggtcggccattccaacgtgccgatcgtcgacacctattggcagaccgagacgggcggcatcctgatcacgccactgccgggtgcaacgccgctgaagccgggtgccgcctccaagcctttcttcggggtcaagcctgtgatcctcgaaccccagtcgggcgaggttctggaaggcaatggcgtcgaaggcgtgatcgcgatcaccgattcctggcccagccagatgcgcacagtctacaaggaccacgagcgtttcgtgaacacctacttccagcaatacaaaggatattattttacggaagacggcgcgaagcgcgacgaggacggctatatctggatcaccggccgcgtcgacgacgtgatcaacgtctccggccaccgcatgggtacggccgaagtcgagagcgcgcttgtcgcccataaggcggtttccgaggcggcggtcgtcggcttcccacacgatgtcaaaggccagggcatctactgctatgtcaccctcatggagggcaccgagccaagcgatgacctgcgcgatgagctgattaagcatgtccgttcggagatcggcccgatcgccaagccggatgctctgcagttcgcgcctgacatgccgaagacccgctcgggcaagatcatgcgccgcatcctgcgcaagattgcagaggacaagctcgacgaactgggcgatacctcgacgctcgccgatccgtcggtcgtcgatcacttgatcgaaaaccgccagaacaagggcggcaaggcttcgagctga

SEQ ID NO: 151627 - protein, 654 aa, Fulvimarina pelagi HTCC2506
MNRMTMIEVKDEWKSRAKIDKATYDEWYKQSIDDPEGFWKQHAKRIDWIKEPTKVKSINYTYPDVSIKWFEDGELNVCYNCVDRHLKDKGDKTAILWEADEPGNAQHITFQQLHEHVCKFANVLKELGVQKGDRVVIYLPMIPQAAYAMLACARIGAIHSVVFAGFSPGALRDRVNDSEAKVVITANHAPRGGKATPLKKNTDKAFEGIEGDVKCLVVKRTGDDTPMTDGRDFWLHEMEGKVGNDCDCEPMNAEDPLFILYTSGSTGKPKGVVHTSGGYIVYTSMTHEYVFDYHPGDIYWCTADVGWITGHSYIVYGPLANGATTLVFESTPTYPDASRCWKVCEEHKVNQFYTAPTAIRALMGKGRKHVEGHDLSALKILGTVGEPINPEAWNWYYEEVGHSNVPIVDTYWQTETGGILITPLPGATPLKPGAASKPFFGVKPVILEPQSGEVLEGNGVEGVIAITDSWPSQMRTVYKDHERFVNTYFQQYKGYYFTEDGAKRDEDGYIWITGRVDDVINVSGHRMGTAEVESALVAHKAVSEAAVVGFPHDVKGQGIYCYVTLMEGTEPSDDLRDELIKHVRSEIGPIAKPDALQFAPDMPKTRSGKIMRRILRKIAEDKLDELGDTSTLADPSVVDHLIENRQNKGGKASS

SEQ ID NO: 151628 - DNA, 1938 bp, Rhodobacterales bacterium HTCC2255
  CDS (1)..(1938): transl_table=11
atgactgaaaaagtattccaaccaactccagattttgcaaaaaatgctcatgcgaataaagagaaatatgaattaatgtatactgaatcagtctctaatccagatgctttttggggagagcatggcaaacgcattgattggattactccatttacgaaagttaaaaatacttcctttgaatatccaaacatatcaataaaatggtatgaagatggtgaattaaatgtatgtgaaaattgcgttgacagacatcttgagtcacgtggagatcagactgcaataatatgggagtccgatgatccaaatattgataagcatattacatataaccagcttcatgatcatgtctctagattagctaatgtgtataaatcattaggtgttggaaaaggtgatagagttattttgtatatgccaatgattccagaagctgcatatgcaatgttagcgtgtgctagaattggcgcaatccattccatagtctttggtggattttcaccagatgcgttagcttctagaatatctgattgtaaagcatcactagttgtaacggctgatgaaggcccaagaggtgggaaaaatattccactgaaaaaaaatgtagatgccgcattagaaatatgtggagatgttaaaactttagttgttagaagaactggaaacagcactccatatagagaaaaccgtgattttgattatgaagaactagtttctgttgcatcgagtgattgtccagttgaaaagatgaatgctgaagatcctctttttattctatatacttctggctctacaggtaaaccaaaaggtgtagtacattcctctgctggatatttagtatatgcgtcgatgacacatcaatatacttttgattaccaagaaggtgacacatactggtgtacagcagatgtaggctggataacggggcactcttatattgtatatgggccattggccaatggtgcgacaactttgatgtttgaaggcaccccgacatacccagatgcatcacgtttttgggctgtttgtgagaaacataaagttaaccaattttatactgcgcctactgcaattcgagctttaatgggtttaggggatgatttagttttaaagcataatttatctgatttacgtgtacttggtactgtaggcgaaccaataaaccctgaagcttggaattggtataatgaagttgttggtaagggtgttgttcctattgttgatacatggtggcaaacagaaaccggtggccatatgctgacaccacttccaggtgttactgcgactaaaccaggctctgctacaacaccattttttggagtacagccggtaattttagattcacaaacaggtcaagaaattgaaggagcatgtgaaggtgttctggcgattaaagaaagttggccatcccaaatgaggacggtctatggagatcatgatcgttttgtcaaaacttattttgaagcttataaaggttattacttcaccgaagatggatgcaagcgtgataaagatggttactattggataactgggcgagtggatgatgtcttgaatgtatctggtcaccgaatgggaactgcagaaattgaaagtgctttggttgcacacaaagatgtagctgaagctgcagttgttggatatccacatgaagttaaaggccaaggaatttattgttatgtcacactcaatgcgagtgcagaatacactgaagaactgcgtacggctttaagaggatgggtgcgtcagcagatagggccaattgctagtcctgattatatccagtgggcacctggtttacctaaaacaaggtcaggtaaaataatgagaagaatattgagaaaagttgctgagaatgattataattcattgggtgacatatctactttagctgagccagaagtcgtagaaaaacttattgaaaatcgtatgaatcgttaa

SEQ ID NO: 151629 - protein, 645 aa, Rhodobacterales bacterium HTCC2255
MTEKVFQPTPDFAKNAHANKEKYELMYTESVSNPDAFWGEHGKRIDWITPFTKVKNTSFEYPNISIKWYEDGELNVCENCVDRHLESRGDQTAIIWESDDPNIDKHITYNQLHDHVSRLANVYKSLGVGKGDRVILYMPMIPEAAYAMLACARIGAIHSIVFGGFSPDALASRISDCKASLVVTADEGPRGGKNIPLKKNVDAALEICGDVKTLVVRRTGNSTPYRENRDFDYEELVSVASSDCPVEKMNAEDPLFILYTSGSTGKPKGVVHSSAGYLVYASMTHQYTFDYQEGDTYWCTADVGWITGHSYIVYGPLANGATTLMFEGTPTYPDASRFWAVCEKHKVNQFYTAPTAIRALMGLGDDLVLKHNLSDLRVLGTVGEPINPEAWNWYNEVVGKGVVPIVDTWWQTETGGHMLTPLPGVTATKPGSATTPFFGVQPVILDSQTGQEIEGACEGVLAIKESWPSQMRTVYGDHDRFVKTYFEAYKGYYFTEDGCKRDKDGYYWITGRVDDVLNVSGHRMGTAEIESALVAHKDVAEAAVVGYPHEVKGQGIYCYVTLNASAEYTEELRTALRGWVRQQIGPIASPDYIQWAPGLPKTRSGKIMRRILRKVAENDYNSLGDISTLAEPEVVEKLIENRMNR

SEQ ID NO: 151630 - DNA, 1938 bp, Labrenzia aggregata IAM 12614
  CDS (1)..(1938): transl_table=11
atgactgagtccgtatttcccgttcccgcggaagttgccgcgcgggcgcatgtcgacaatgccaaatatctggaaatgtataagcgctctgtggaggacccccagggcttctggggcgagcacggcaaacgggtcgactggatcaagccattcaccaaggtgaagaacacctcctacgactatcacaatgtatcgatcaaatggttcgaggacggaacgctcaacgtctcggccaactgtgtcgaccgccatctcgaaaaacgtggcgatcagcctgcgatcatctgggaaggcgacgatccgaacgagcacaaggtcatcacgtacaaggaactgcaccacgaggtgaacaagttcgccaacgtgctgcacggccagggcgtcaaaaagggtgaccgcgtcaccatttatctgcctatgatcccggaagctgcctacgcgatgctggcctgcgcccgcattggcgcggtgcattccatcgtcttcggcggcttctcaccggacagcctggctcagcggatcgaggattgcgcttctgaatgcgtgatcactgccgatgaaggcctgcgcggcggccgcaaggtgccgctgaaggccaatgtcgacaaggcggccgagaaagcaccggtgaaaagcgtcatcgtggtcaagcgcacgggcggtgacgttcccatgcaggccggccgcgacgtctggtatcacgacgaagcagaccgggtgtccgatcactgcgcaccggtggaaatgaatgcggaagatccgctgttcatcctttacacctccgggtcgaccggcaagccgaaaggggtgatgcacaccaccggcggctatctggtctatgcctccatgacccacgaatatgtcttcgactaccatgaaggcgatgtctattggtgcacggcggatgtgggctgggtcaccggccacagctacatcgtctatggcccgctcgccaatggcgccaccactttgatgttcgaaggtgtgccgacctacccgggaccaggtcgcttctgggaagtgtgcgacaagcacaacgtcaacatcttctacaccgcgccgaccgcgatccgtgccctgatgggcgccggcgacgagcatgtcaccaagacctcgcgcaagtcgctgcgtcttctgggctccgtcggcgagccgatcaatccggaagcctggacctggtactacaacgtggtcggcgacaagcgctgcccgatcgtcgacacctggtggcagacggaaaccggcggcattctgatcacgccgcttccgggcgcaaccgacctgaaaccgggctcggccacccggcctttcttcggcattcaaccggcaatcgtcgacgcggaaggcaagttcctggaaggggcgacggaaggcaatctggtcatcaaggatagctggcctggccagatgcgcacggtctatggcgaccacgagcgcttcgtccagacctatttcgccacctacaagggcctttatttcaccggtgacggctgccgccgcgacgaagacggctactactggatcaccgggcgcgtcgatgacgtgatcaacgtctccggccaccgcatgggcacggcggaagtcgagagcgcgctggtggcgcacccgaaggtttccgaagcggctgtggttggctatccgcacgacatcaaggggcagggcatctatgcctatgtcacgctgatggaaggcgaggagccgaccgacgagttgaagaaggaactggtcaagcacgtgcgctcggaaatcgggcccatcgcctcgccggacctgatccagttcgcgcccggcctgcccaagacccgttcgggcaagatcatgcgccgtatcctgcgcaagattgccgaagacagcttcgacagcctcggcgatacgtcgacgctggccgatccgaccgttgtcgacgacctgatcgacaaccgccagaaccgcagctga

SEQ ID NO: 151631 - protein, 645 aa, Labrenzia aggregata IAM 12614
MTESVFPVPAEVAARAHVDNAKYLEMYKRSVEDPQGFWGEHGKRVDWIKPFTKVKNTSYDYHNVSIKWFEDGTLNVSANCVDRHLEKRGDQPAIIWEGDDPNEHKVITYKELHHEVNKFANVLHGQGVKKGDRVTIYLPMIPEAAYAMLACARIGAVHSIVFGGFSPDSLAQRIEDCASECVITADEGLRGGRKVPLKANVDKAAEKAPVKSVIVVKRTGGDVPMQAGRDVWYHDEADRVSDHCAPVEMNAEDPLFILYTSGSTGKPKGVMHTTGGYLVYASMTHEYVFDYHEGDVYWCTADVGWVTGHSYIVYGPLANGATTLMFEGVPTYPGPGRFWEVCDKHNVNIFYTAPTAIRALMGAGDEHVTKTSRKSLRLLGSVGEPINPEAWTWYYNVVGDKRCPIVDTWWQTETGGILITPLPGATDLKPGSATRPFFGIQPAIVDAEGKFLEGATEGNLVIKDSWPGQMRTVYGDHERFVQTYFATYKGLYFTGDGCRRDEDGYYWITGRVDDVINVSGHRMGTAEVESALVAHPKVSEAAVVGYPHDIKGQGIYAYVTLMEGEEPTDELKKELVKHVRSEIGPIASPDLIQFAPGLPKTRSGKIMRRILRKIAEDSFDSLGDTSTLADPTVVDDLIDNRQNRS

SEQ ID NO: 151632 - DNA, 1941 bp, Alteromonadales bacterium TW-7; identical to SEQ ID NO: 126777
  CDS (1)..(1941): transl_table=11

SEQ ID NO: 151633 - protein, 646 aa, Alteromonadales bacterium TW-7; identical to SEQ ID NO: 126778

SEQ ID NO: 151634 - DNA, 1917 bp, Microscilla marina ATCC 23134
  CDS (1)..(1917): transl_table=11
atgacaaataaaatcaacacattgggtggttatatccacgaatatcaaaaaagcgtatctaaccccgaagctttttgggcttcggttgccgagaactttcattggcgcaaaaaatgggataaagtgcttgactggaattttgaagagcctacaatagaatggtttgttaacgggaaattaaacattaccgaaaacatttttgagcgccaactctttacccacggcgacaaagcggctattatctgggaacccaacaaccccgacgaagcaagcattacccttacctaccgggaactgtttgagaaagtatgccaattttcgaatggacttttgaagcaaggagtaaaaaaaggcgaccgtgtggtgatatacatgcctatggtgcccgaagctgccattgctatgcttgcctgtgcccgtattggagccattcattcggtcgtatttgctgggttttcgtccaacgcccttgccgaccgcatcaacgatgcccaagccaccactgtgcttactgctgatggaggctaccggggcacaaaggtgttggaaataaagaaaatagtagatgaagccctagaaaacaccccaagcatagagcgcagcgttgtgctcaagcgcacgggcagtgaggtaaccatgaagccaaacagagacatctggtggagcgatgtgatagcaggggaaaccttggaaaacaaagccgaagaaatggacagcgaagacatgctcttcattttgtatacatcgggctctacgggcaaacccaaaggagtagtgcataccacgggcggctacatggtatatacagcttattcgtttaagaatgtttttcaatacaacgcaggcgatgtttactggtgtacggcggacattggctggatcacggggcactcttacattgtgtatggtcctttgttggcaggagccaccagtgtcatgtttgagggagtacctacctttcctgacgcggggcgtttttgggaaatagtagacaaacaccaggtgaaccagttttatactgcccctactgccattcgtgctttgcaggccaaagggctagagtatgtagagaaacacgacctgagttcgctcaaagtattgggtagtgtgggagaacccatcaacgaagaagcgtggcactggtaccacgaccacattggtaaagatcgttgcccaatcgtagacacttggtggcaaaccgaaaccggaggtattttaatctctcccttgcccggcattactcctaccaaacctacctatgccaccctgcccttgcccggaattcagcctatattggtagacaatgagggcaatgaattaaaaggcaacagtgtagaaggcaacttatgcgtgaagtttccctggccatcgatgttgcgtactacttatggcgatcacgaacgttgccgtcaaacctatttttctacttataaaggtttgtattttaccggagacggatgcaagcgcgacgaagatggttattaccgtattttgggacgggtagacgatgtaatcaatgtatcggggcaccgtttgggtactgccgaaatagagaatgccatcaacgaacacccattggtaaacgaatcggcggtggtaggctacccccacgaaatcaaagggcagggcatttatgcgtacattgtatgtgaggccgatgctgccaaccacgacgaagaacagatcaagcggagcattatcagcacgatcaacaagattattggacccattgccaaacctgataagattttggtagtacctggtttgcccaaaacccgttcgggtaagattatgcgtagaatcttgcgcaaaattgccgaaaacaacgcttctaacctgggcgatattagtacgttgctcaaccccgaagtggtggcgtctattatggacaaagctggagttgcggtagagagttaa

SEQ ID NO: 151635 - protein, 638 aa, Microscilla marina ATCC 23134
MTNKINTLGGYIHEYQKSVSNPEAFWASVAENFHWRKKWDKVLDWNFEEPTIEWFVNGKLNITENIFERQLFTHGDKAAIIWEPNNPDEASITLTYRELFEKVCQFSNGLLKQGVKKGDRVVIYMPMVPEAAIAMLACARIGAIHSVVFAGFSSNALADRINDAQATTVLTADGGYRGTKVLEIKKIVDEALENTPSIERSVVLKRTGSEVTMKPNRDIWWSDVIAGETLENKAEEMDSEDMLFILYTSGSTGKPKGVVHTTGGYMVYTAYSFKNVFQYNAGDVYWCTADIGWITGHSYIVYGPLLAGATSVMFEGVPTFPDAGRFWEIVDKHQVNQFYTAPTAIRALQAKGLEYVEKHDLSSLKVLGSVGEPINEEAWHWYHDHIGKDRCPIVDTWWQTETGGILISPLPGITPTKPTYATLPLPGIQPILVDNEGNELKGNSVEGNLCVKFPWPSMLRTTYGDHERCRQTYFSTYKGLYFTGDGCKRDEDGYYRILGRVDDVINVSGHRLGTAEIENAINEHPLVNESAVVGYPHEIKGQGIYAYIVCEADAANHDEEQIKRSIISTINKIIGPIAKPDKILVVPGLPKTRSGKIMRRILRKIAENNASNLGDISTLLNPEVVASIMDKAGVAVES

SEQ ID NO: 151636 - DNA, 1953 bp, Shewanella putrefaciens 200
  CDS (1)..(1953): transl_table=11
atgagctcgcagtctctctacaaagtctccggcaatatcgctgccaatgcacttgtaaataacgaacaatataaaacaatgtaccaagagtcgattgtcaacccagagggtttctggagagagcacggcaaacgcattgactggataaaaccctatacaaagatcaaaaaaacctcttttgacgatcataatttgtcaattaactggttttacgatggcaccctgaatgcttctgccaactgtttagatcgtcatttagccgaacacagtgatcgcgtggcgattatttgggaaggtgataacgccagcgaacaacgcaaaatcacctacggagaattacatgcagatgtgtgtaagtttgccaacgcactgcgcagtcaaggcgtgcgccgtggtgacatagtcaccatttacatgccaatggtgccagaagccgccgttgctatgcttgcttgcgcacgcattggcggggttcattcagtcgtatttggtggcttctcacctgactctatcgcctcccgtgtgatcgatggcaaatcaaaagtggtgatcacctctgatgaggggatgcgcggtggccgagccattccgctaaagcgtaatatcgatgacgcgctcaatcatcccgatgtcactagcgtagaaaaagtcatcgtccttaaacgtacaggtggcaaaatcgactgggttgaaggccgtgatgtttggtggcacagcttacttgaaaccgcatcggagcactgccagccagaagaaatgggcgccgaagacccactgtttttactctatacctcaggctctaccggtaatcctaaaggtgttttacataccactggtggttacatggtttatgcgtcgatgacccatgaatatgtctttgattataaagccggagaagtgtactggtgtacggctgatgtaggttggatcacgggccactcatatatggtttacggtccactcgccaatggtgccactgtacttatccatgaaggcgtgcccaatcatccaagccccgctcgacttggtgagatgattgaccgtcataaggtcaatatcctttacaccgcaccgacgttgatccgtgcattaatggccgaaggcaaacagcattttgatcaattcgatggaagtacactgcggatcatgggctcagttggcgaacctatcaatccagaagcatggcgttggtatcacgaagtcattggtcacgagcattgtccgattgtcgatacttggtggcaaaccgagactggcggtattttaataacgccactgccgggtgcgacggacacaaaaccgggatcagccacccgtccattctttggcgtacaacccgccctagtcgataacatggggaatattttagagggtgagaatgaaggtaacttagtcttactcgattcttggccaggccaaatgcggactgtgtatggcgatcacgaacgattcgtgctgacctactttaaaaccttccgcggcatgtattttaccggtgatggtgcccgtcgcgatgaagacggttactactggatcacagggcgtgtcgatgacgtcattaacgtctctggacaccgtttaggtaccgctgaagtggaaagtgcattggtatcccatgaactggttgctgaagccgctgttgtgggctatccacacgatattaaaggccaaggtatctatgcctacgtcacgctaacccgtggaacagaagaaagtgaagagctacgccaggaactgcgccaatgggtgcgtaaagagattggtgcattagcaactccagacctcatccaatgggcaagtggattacctaaaacccgttcaggcaaaattatgcgccgcttcctacgtaagattgctgctaacgaagtcaccaatctaggtgatgcatcaaccttagccgatccagcggttatcgaaaccttgattgaaacccgtttaaatcgtacagaataa

SEQ ID NO: 151637 - protein, 650 aa, Shewanella putrefaciens 200
MSSQSLYKVSGNIAANALVNNEQYKTMYQESIVNPEGFWREHGKRIDWIKPYTKIKKTSFDDHNLSINWFYDGTLNASANCLDRHLAEHSDRVAIIWEGDNASEQRKITYGELHADVCKFANALRSQGVRRGDIVTIYMPMVPEAAVAMLACARIGGVHSVVFGGFSPDSIASRVIDGKSKVVITSDEGMRGGRAIPLKRNIDDALNHPDVTSVEKVIVLKRTGGKIDWVEGRDVWWHSLLETASEHCQPEEMGAEDPLFLLYTSGSTGNPKGVLHTTGGYMVYASMTHEYVFDYKAGEVYWCTADVGWITGHSYMVYGPLANGATVLIHEGVPNHPSPARLGEMIDRHKVNILYTAPTLIRALMAEGKQHFDQFDGSTLRIMGSVGEPINPEAWRWYHEVIGHEHCPIVDTWWQTETGGILITPLPGATDTKPGSATRPFFGVQPALVDNMGNILEGENEGNLVLLDSWPGQMRTVYGDHERFVLTYFKTFRGMYFTGDGARRDEDGYYWITGRVDDVINVSGHRLGTAEVESALVSHELVAEAAVVGYPHDIKGQGIYAYVTLTRGTEESEELRQELRQWVRKEIGALATPDLIQWASGLPKTRSGKIMRRFLRKIAANEVTNLGDASTLADPAVIETLIETRLNRTE

SEQ ID NO: 151638 - DNA, 1893 bp, Algoriphagus sp. PR1
  CDS (1)..(1893): transl_table=11
atgagtgatagaatacatacccttagcgggtacctacacgagtaccaaaaaagtgtcgcgcagccagaagaattttgggcaagaattgctgattcattccattggcgaaaacggtgggacaaaacgttaaagtggaattttgaaggaccagatgtcaaatggttcttaaatggaaaattgaatatcaccgaaaatatttttgagagatatctttttactattggagaccggcctgccattatctgggagcctaatgatccaaatgaagctggtaggacattgacctatcgtgaattatttgaggaagtctctcgattttccaacgccctaaaaagcaaaggaatcggcaaaggtgacaaggtcattatttacatgcctatggtgccggaggcagctgtagctatgttggcatgtgcgagaattggcgccatccattcagtagtctttgcaggattttcaagtaatgccttggcagatcgaatcaatgattgcgaagcaaaggcagttttaacttccgatggaaacttcagaggcagcaaaaaaatagcagtcaaagccgtagttgatgaagctttgacaaaaagctctgtggaaactgtcatcgtttaccaaaggactcatcaagatgtcaccatgcaggatggaagagattattggtggcacgatgtcgtggcagatgaatcaaaggactgcccagcagaagaaatggatagcgaagacatgctatttattctatatacctcaggctctacaggaaaaccaaaaggagtagtacacaccacaggaggatatatggtttattccaaatactccttcgaaaatgtatttcaatactctcctggagatgtgtattggtgtacagcggatgtgggctggatcacgggtcactcctacatcgtttatggtccattattggcaggagctacaacaataatgtttgagggtgttcccactttcccggattgcgggaggttttgggctatcgtagaaaaatataaagtgaaccaattttatactgctccgactgcaattagagcattgcaagcatatggaacagtagaaattgaaaagtatgatttaagctccttgaaggtactcggttccgttggtgagccaatcaatgaagaagcttggcattggtatcatactcacataggtaaaaataaatgcccaatagtggatacttggtggcaaacagaaacagggggaatcatggtctctcctattgctggaatcacaccaacgaagcctgcctatgcaacacttcccttgcctggcgttcaactttgcattgtagacccagaaggaaatgaactaaccggaaactctgtagaaggaaacctatgtatcaagtttccttggccatctatgatcagaaccacttatggggatcatgatagatgtaagcagacctatttctccacttacaaaggaatgtactttacaggagatggagtcaagagagatcatgatggatattatagaatcctcggaagagtagatgatgtaatcaatgtctctgggcatagaatgggaactgcggaagtagaaaatgcaatcaacgaacatccaaaagtcattgaatctgccgtggtcggctaccctcatgatgtcaaaggacaaggaatttatgcctatgtcatctgtgatttaaccaatagaactgaggataatctggtaaatgaaatcaaggaaatggtttctaaaattattggccctattgctaagcctgataaaatccagctcgttcctggtttaccaaaaacaagatcgggtaaaatcatgcgtagaatattaagaaaagtagctgaaaacaacctagataatatgggtgataccagtaccctactggacccagatgtagtggagaaaattattgatggcagaaaataa

SEQ ID NO: 151639 - protein, 630 aa, Algoriphagus sp. PR1
MSDRIHTLSGYLHEYQKSVAQPEEFWARIADSFHWRKRWDKTLKWNFEGPDVKWFLNGKLNITENIFERYLFTIGDRPAIIWEPNDPNEAGRTLTYRELFEEVSRFSNALKSKGIGKGDKVIIYMPMVPEAAVAMLACARIGAIHSVVFAGFSSNALADRINDCEAKAVLTSDGNFRGSKKIAVKAVVDEALTKSSVETVIVYQRTHQDVTMQDGRDYWWHDVVADESKDCPAEEMDSEDMLFILYTSGSTGKPKGVVHTTGGYMVYSKYSFENVFQYSPGDVYWCTADVGWITGHSYIVYGPLLAGATTIMFEGVPTFPDCGRFWAIVEKYKVNQFYTAPTAIRALQAYGTVEIEKYDLSSLKVLGSVGEPINEEAWHWYHTHIGKNKCPIVDTWWQTETGGIMVSPIAGITPTKPAYATLPLPGVQLCIVDPEGNELTGNSVEGNLCIKFPWPSMIRTTYGDHDRCKQTYFSTYKGMYFTGDGVKRDHDGYYRILGRVDDVINVSGHRMGTAEVENAINEHPKVIESAVVGYPHDVKGQGIYAYVICDLTNRTEDNLVNEIKEMVSKIIGPIAKPDKIQLVPGLPKTRSGKIMRRILRKVAENNLDNMGDTSTLLDPDVVEKIIDGRK

SEQ ID NO: 151640 - DNA, 1947 bp, Marinobacter sp. ELB17; identical to SEQ ID NO: 126795
  CDS (1)..(1947): transl_table=11

SEQ ID NO: 151641 - protein, 648 aa, Marinobacter sp. ELB17; identical to SEQ ID NO: 126796

SEQ ID NO: 151642 - DNA, 1947 bp, Rhodobacterales bacterium HTCC2150
  CDS (1)..(1947): transl_table=11
atgactgataaaacctacgctccaagtgctgaattcgcagccaacgcgcacatcgatgcggccaaatacaaagaaatgtatgacgcctctatcgccaacccagaggcattctggggcgagcaaggaaaacgactggattggatgacaccttatacaaaggttaaaaacaccacgtttgaatacccagacgtttcggtaaaatggtatgaagatggcgaattaaacgtatgtgcaaactgcgttgaccggcacttggcaacacgtgccgatcaaacagcgatcatctgggaaggcgacaacccagaagaagatcaaaacatcacgtattcagaactttatgatcacgtcacaaaactggcgaatgtttataaatcacttggcgtcaaaaagggcgaccgcgttgttctttatatgccaatgatccctgaggcgacttatgcgatgctggcctgtacgcgtattggtgccgtacattccatcgtatttggtggcttttcccctgatgctttggcggcacgtgtatctgccagtggcgctgtattggttgtgacggctgacgaaagcaaacgtggcggcaaatctgtgcctcttaaggcaaatgttgatgcagcgatggaaatttgtggtgatgtaaacgtccttgttgtgccacgtactggtgctgacattccgatgaaagatggccgtgatcatgcttatgcgcctttgatggctgccgcatcaactgattgtccacctgagccgatgaacgccgaagatccactgttcattctctacacttctggttcaaccggcatgcctaagggtgttgttcacacaactggcggctatcttgtatatgcttcgatgacccatgagatggtatttgattaccacgaaggcgacatcttctggtgtacagctgacgttggctgggtcacaggccacagctatatcgtttatggcccgctggccaatggcgccaccacgctaatgtttgaaggtgtgccaacatacccagatgccggtcgtttctgggcggtttgtgccaagcacaaagtgaaccagttctatacagctccaacagccatccgtgccttgatgggccaaggcaccagcttcgttgaagcacatgaccttagcgatctaaaggttttgggcacagttggtgaaccgatcaatccagaagcatggaattggtacaacgaggttgttggtggcggcaaattgccaatcgttgacacttggtggcaaacagaaacgggcggtcacctgatgacgcctctgcctggtgcgatctcgacaaagccaggttcatgcaccctgcccttctttggggtgaaaccaattattcttgacccaacaaccggcgatgaaatcaccaccgtcgaggccgagggcgttctttgcatggctgacagttggcctggtcaaatgcgcactgtttggggtgaccacgagcgttacgtttcagcatactttgccgattacaaaggctactactttactggtgacggctgtcgtcgtgatgcggatggatattactggatcactggtcgcgttgatgacgtgatcaacgtatctggccaccgtatgggcaccgccgaagttgaaagcgcacttgttgcacaccccaaagtgtctgaggccgcggttgtaggatatccacacgacatcaaaggccaaggcatctattgctatgtaacattgatgggtggcgaagagcctaccgaagaattgcgcaaggaattacgcacttgggtccgcacagaaatcggcccgattgcatcgcctgaccttattcaatgggcaccaggtttgccaaaaactcgttcaggtaaaatcatgcgccgcatcttgcgtaaaattgccgaagacgattttagcgcccttggcgatacatcaacattggctgaaccagccgttgttgacgagctgatcgaaaaccggatgaaccgcgccgagtaa

SEQ ID NO: 151643 - protein, 648 aa, Rhodobacterales bacterium HTCC2150
MTDKTYAPSAEFAANAHIDAAKYKEMYDASIANPEAFWGEQGKRLDWMTPYTKVKNTTFEYPDVSVKWYEDGELNVCANCVDRHLATRADQTAIIWEGDNPEEDQNITYSELYDHVTKLANVYKSLGVKKGDRVVLYMPMIPEATYAMLACTRIGAVHSIVFGGFSPDALAARVSASGAVLVVTADESKRGGKSVPLKANVDAAMEICGDVNVLVVPRTGADIPMKDGRDHAYAPLMAAASTDCPPEPMNAEDPLFILYTSGSTGMPKGVVHTTGGYLVYASMTHEMVFDYHEGDIFWCTADVGWVTGHSYIVYGPLANGATTLMFEGVPTYPDAGRFWAVCAKHKVNQFYTAPTAIRALMGQGTSFVEAHDLSDLKVLGTVGEPINPEAWNWYNEVVGGGKLPIVDTWWQTETGGHLMTPLPGAISTKPGSCTLPFFGVKPIILDPTTGDEITTVEAEGVLCMADSWPGQMRTVWGDHERYVSAYFADYKGYYFTGDGCRRDADGYYWITGRVDDVINVSGHRMGTAEVESALVAHPKVSEAAVVGYPHDIKGQGIYCYVTLMGGEEPTEELRKELRTWVRTEIGPIASPDLIQWAPGLPKTRSGKIMRRILRKIAEDDFSALGDTSTLAEPAVVDELIENRMNRAE

SEQ ID NO: 151644 - DNA, 1953 bp, Roseobacter sp. CCS2
  CDS (1)..(1953): transl_table=11
atgaataccgataccatcacaccgcagcagacgtccgaccgtgtcccacatgtgaacgcgcagcagtatcaaacgctttatcaggcatcggtcagcgatcccgatacgttttgggcagagcaaggcaagcgccttgattggatcaagccgttcaccaaagtgcagaacgttgatttcactctcggcaacgtgtcgatcaaatggttcgaagatggtgttctgaatgtctcggccaactgtatcgaccgtcacttggaaacgcgcggtgaccagacggcgatcatctgggaacctgatgatccgaacgatcaagcgctccacataacttacaaagacctgcaccgcagcgtgtgcaaaatggcgaatattctcgaaacgctcggcgtgcgcaaaggtgaccgggtcgtgatttacctgcccatgatccccgaagccgcctatgcgatgctggcctgtgcacgcattggcgcgatccattccatcgtctttgccggcttttcgcccgacgcgctgggcgcacggatcaacgggtgtgacgccaaggtcgtgatcaccgcagacgaggccccacgcggcggccgcaagaccgcgctcaaatcaaacaccgacgccgctttgctgcactgcgatgatcgcgtcaaatgtctggtggtcaagcgcactggcggccaaaccacatggaccgaccgcgactatgattataacgaaatggcgcttgaggccgatgatcgcagcgcgcccgccgaaatgaacgccgaagacccgctgttcatcctctatacctccgggtctaccggtcagcccaaaggcgtggtgcatacatccggcggttacctgacctatgcggcgatgacgcatgaaatggtgttcgactaccacgaaggcgatgtgttctggtgcacggcggatgtcggctgggtcaccggccacagctatatcgtctatggtccgctggccaatggcgcgaccacaatcatgtttgaaggtgttccgacctaccccgatgcgggtcggttctgggccgtgtgtgaaaagtactctgttaaccagttctacacggccccaacagcgatccgcgcgcttatggcggcgggcaacgcaccagttgaaaaatacgatctgtccgatttgcgggttctggggaccgtgggtgaaccgatcaaccccgaagcctggaattggtacaatgatgtcgttggcaaaggaaactgccccatcgtcgatacatggtggcagaccgaaaccggtggtcacctgttgacgccactaccgggtgcgacggaattgaaaccggggtctgcccagcagcctttcttcgggattgtccccaaagtgcttgacccgcaatcaggcgaagaaatcacgacgacagaggccgaaggcgtgctggtgctggccagcagctggcccggccagatgcgtaccgtctggggcgatcatgagcggttcgagaagacctatttcagcgactacaaaggctattacttcaccggtgacggctgcaaacgcgatgcggacggcgactattggatcacagggcgcgttgacgacgtgatcaacgtctctggccaccggatgggcacggcagaggttgaaagcgcactcgtcgcgcatgcgaaagtggccgaggccgcggtcgtcggctatccccacaacatcaagggccaaggcatctacgcctacgtgaccttgatgaacgggcaagaaccatccgaaaacctgcgcaaagaacttgaggtttgggtccgcaccgaaatcggcccaattgccaaaccggacctgatccaatggtcccccggcctgccgaaaacacggtccggtaaaatcatgcgccgcatcctgcgcaagatcgccgaggatgacttcggcgcattgggtgatacctcgacactggcggaccccgctgtggtcgatgatctgattgaaaaccgcatgaaccggaaggacgcgtaa

SEQ ID NO: 151645 - protein, 650 aa, Roseobacter sp. CCS2
MNTDTITPQQTSDRVPHVNAQQYQTLYQASVSDPDTFWAEQGKRLDWIKPFTKVQNVDFTLGNVSIKWFEDGVLNVSANCIDRHLETRGDQTAIIWEPDDPNDQALHITYKDLHRSVCKMANILETLGVRKGDRVVIYLPMIPEAAYAMLACARIGAIHSIVFAGFSPDALGARINGCDAKVVITADEAPRGGRKTALKSNTDAALLHCDDRVKCLVVKRTGGQTTWTDRDYDYNEMALEADDRSAPAEMNAEDPLFILYTSGSTGQPKGVVHTSGGYLTYAAMTHEMVFDYHEGDVFWCTADVGWVTGHSYIVYGPLANGATTIMFEGVPTYPDAGRFWAVCEKYSVNQFYTAPTAIRALMAAGNAPVEKYDLSDLRVLGTVGEPINPEAWNWYNDVVGKGNCPIVDTWWQTETGGHLLTPLPGATELKPGSAQQPFFGIVPKVLDPQSGEEITTTEAEGVLVLASSWPGQMRTVWGDHERFEKTYFSDYKGYYFTGDGCKRDADGDYWITGRVDDVINVSGHRMGTAEVESALVAHAKVAEAAVVGYPHNIKGQGIYAYVTLMNGQEPSENLRKELEVWVRTEIGPIAKPDLIQWSPGLPKTRSGKIMRRILRKIAEDDFGALGDTSTLADPAVVDDLIENRMNRKDA

SEQ ID NO: 151646 - DNA, 1917 bp, Roseobacter sp. CCS2
  CDS (1)..(1917): transl_table=11
atggctgccaatgcccatgccgatcaaaccacctacgaaaagatgtacgctgcatccattgaagacccagagacgttctggggcgaacatggcaagcggcttgactggatcaaaccttatacacgtgtcaagaataccagctttgcccccggcaatgtcgatatcaagtggtacgaagatggtacgctgaatgtcagcgccaactgtatcgaccgtcatttggcgacacggggcgatcagaccgccattatttgggagcctgacagccccgatgatgatgccgtacatatcacctacaaaatgctgcacaaaaagacatcgctgatggcgaatgttctaaaggacatgggtgttggtaaaggcgaccgcgtcgttctttatctgcccatgatccccgaggccgcttatgcgatgcttgcctgcgcgcggatcggcgcgatccattcgattgtcttcgcaggattctctgccgaagcgctgggcgcacggatcaacgcctgtgatgcaaaggttgtgattaccgctgatggtgcaccgcgggggggccgggtgacaaacctcaaagacagtgtgaatcaggcgctcttgaatgattttgacgaggtgaaatgccttcttgtcaaacgtactggccaacaggtcgcgtggcgcgacgggctggattactggctgcacgagatggaagaaaaagtcagcgccgactgtccgccgactgaagtgaacgccgaagatccgctgttcattctttatacgtctggttccaccggccagcctaagggcgttgtgcattccagcggtggctaccttgtctatgcggcgatgacgcagcagtacacgtttgactatcacgacggtgatatcttttggtgcaccgctgacgtgggctgggtcacagggcatagctatattgtttatgggccattggcgaacggcgcgaccacgatcatgtttgagggtgtccctacatatcccgatgccggtcggttctgggcggtctgccaaaaacacaaggtcaatcagttttatacagcgccaacggcgattcgcgcgctgatggcgcaaggcaatgaatacgttgaaaagtatgatctgtctgatatcaaggtacttggcaccgttggcgaaccgatcaaccccgaagcttggaactggtacaacgacattgtcggtaaaggcaaagcgcccatcgtcgatacgtggtggcagaccgaaaccggggggcatttgctgacaccgctgcccggtgcaacagcgaccaaacccggctctgccactttgcccttctttggcattcagcctgtcattctggaaccaacgtcgggcgaggaaattcacgataccgccgcagagggcgtgctgtgcatcaaagacagttggcctgcccagatgcgcaccgtctggggcgatcatgagcggttcgagaagacgtattttgcggattacaagaattactatttcaccggtgatggctgtaagcgcgatgaagacgggtactattggatcaccggccgcgtggatgatgtgatcaacgtctcaggccaccggatgggcacggccgaagttgaaagcgccttggtcgcacatgcaaaagtcgctgaagctgccgttgtgggttatccgcatgacatcaaggggcagggtatctatgcctatgtcaccttgatgaacggccaagagccatcggacgcgttgcgcaaagagctagaggtctgggtccgctccgagattggcccgattgccaagcctgatttgctgcaatgggcaccggggctgccgaaaacacggtcgggcaagattatgcggcgcatcctgcgcaagattgctgaggatgatttcggtgcgctgggcgatacatctacgctggctgatccgtccgttgtcgatgatctgatcgagaaccggatgaaccggggctga

SEQ ID NO: 151647 - protein, 638 aa, Roseobacter sp. CCS2
MAANAHADQTTYEKMYAASIEDPETFWGEHGKRLDWIKPYTRVKNTSFAPGNVDIKWYEDGTLNVSANCIDRHLATRGDQTAIIWEPDSPDDDAVHITYKMLHKKTSLMANVLKDMGVGKGDRVVLYLPMIPEAAYAMLACARIGAIHSIVFAGFSAEALGARINACDAKVVITADGAPRGGRVTNLKDSVNQALLNDFDEVKCLLVKRTGQQVAWRDGLDYWLHEMEEKVSADCPPTEVNAEDPLFILYTSGSTGQPKGVVHSSGGYLVYAAMTQQYTFDYHDGDIFWCTADVGWVTGHSYIVYGPLANGATTIMFEGVPTYPDAGRFWAVCQKHKVNQFYTAPTAIRALMAQGNEYVEKYDLSDIKVLGTVGEPINPEAWNWYNDIVGKGKAPIVDTWWQTETGGHLLTPLPGATATKPGSATLPFFGIQPVILEPTSGEEIHDTAAEGVLCIKDSWPAQMRTVWGDHERFEKTYFADYKNYYFTGDGCKRDEDGYYWITGRVDDVINVSGHRMGTAEVESALVAHAKVAEAAVVGYPHDIKGQGIYAYVTLMNGQEPSDALRKELEVWVRSEIGPIAKPDLLQWAPGLPKTRSGKIMRRILRKIAEDDFGALGDTSTLADPSVVDDLIENRMNRG

SEQ ID NO: 151648 - DNA, 1962 bp, Roseobacter sp. SK209-2-6
  CDS (1)..(1962): transl_table=11
atgacaccgcagcccgaaggccggacatatccgccatcagacgaaaccgttgcccgcgctcacgttgacagtgccaagtatcaacagatgtattccgcttcgctggaagacccggaagggttctggcgcgagcagggtcagcgcattgactggatcaagcccttcacccaggtgaaggatgtgaactacaattttggtgaagtctccatcaattggtatgcggatggcacgctgaatgtctctgccaattgcattgatcgccatttggaaacccgtggcgaccagaccgccatcatctgggagccggatgatccgaacgaggccgcgcagcatatctcttataaggagctgcaccgccgcacctgccgcatggccaatatcctggaagagatgggcgtgcgcaaaggcgatcgggtggtgatctatctgccgatgatccccgaagcggcctatgccatgctggcctgtgcccgcatcggcgccatccactccatcgtttttgcaggcttttcccctgatgcgctggcggcccggatcaacggctgcgacgccaaagtggtaatcaccgcggatgaggccccgcgcggtggccgcaagacaccgctgaaatccaatgcggatgccgccctgctgcacaccaaggacacggtgaaatgcctggtggtcaaacgcactggcggtcagaccacctgggttgacgggcgcgactacgattataacgagatggctctggaggcgaatgactactgcgccccggcagagatgaacgccgaagatccgctgttcatcctctatacctctggctcaactggtcagcccaagggtgttgtgcattcctctggcggctatctgacctatgcggcgatgacccatgagatcacctttgattaccatgatggtgatatctactggtgtactgcggatgtgggctgggtcaccggccacagctatatcgtctatgggccgctcgccaatggcgccaccacgctgatgttcgaaggtgttccgacctatcccgatgcctcgcgcttctggcaggtctgcgaaaagcacaaggtgaaccagttctacacggcccccaccgcgctgcgcgccttgatgggtcagggcaacgaatgggtcgagaaatgcgatctctccgatctgcgcacccttggcaccgttggtgaaccgatcaaccccgaagcctggaactggtacaacgaggttgttggcggcggcaaatgccccatcgtcgacacctggtggcagaccgagaccggcggccatctgatgacgccgctgcccggcgcccatgcaatgaagcccggctctgcgatgaagcctttctttggcattcagccggtggttctggatccaaccagcggtgttgagatcgaaggcaatgatgtcgagggtgttctctgcatcaaggacagctggcccggtcagatgcgcaccgtctggggcgatcatgagcgtttccagaagacctattttgccgattacaaaggctattacttcaccggtgacggctgtaagcgcgacgccgacggggactactggatcaccggccgcgtcgatgacgtgatcaatgtctctggtcaccgcatgggcaccgcagaagtcgaaagcgccctggtggcgcacgctgctgtggccgaggccgccgttgtgggctacccgcatgagatcaagggccagggcatctattgctatgtcaccctgatgaatgaccgggaaccctcggatgagctgttgaaagagctgcgcacctgggtccggaccgagatcggcccgattgcttctcctgatgtgatccaatgggcgcctggcctgcccaagacccgttccggcaaaatcatgcgccgtatcctgcgcaagattgctgaaaatgactttggcagtttgggtgacacctcaaccttggcggatccttcggtggtcgaagacctgatcgaaaaccgcgccaacaagggataa

SEQ ID NO: 151649 - protein, 653 aa, Roseobacter sp. SK209-2-6
MTPQPEGRTYPPSDETVARAHVDSAKYQQMYSASLEDPEGFWREQGQRIDWIKPFTQVKDVNYNFGEVSINWYADGTLNVSANCIDRHLETRGDQTAIIWEPDDPNEAAQHISYKELHRRTCRMANILEEMGVRKGDRVVIYLPMIPEAAYAMLACARIGAIHSIVFAGFSPDALAARINGCDAKVVITADEAPRGGRKTPLKSNADAALLHTKDTVKCLVVKRTGGQTTWVDGRDYDYNEMALEANDYCAPAEMNAEDPLFILYTSGSTGQPKGVVHSSGGYLTYAAMTHEITFDYHDGDIYWCTADVGWVTGHSYIVYGPLANGATTLMFEGVPTYPDASRFWQVCEKHKVNQFYTAPTALRALMGQGNEWVEKCDLSDLRTLGTVGEPINPEAWNWYNEVVGGGKCPIVDTWWQTETGGHLMTPLPGAHAMKPGSAMKPFFGIQPVVLDPTSGVEIEGNDVEGVLCIKDSWPGQMRTVWGDHERFQKTYFADYKGYYFTGDGCKRDADGDYWITGRVDDVINVSGHRMGTAEVESALVAHAAVAEAAVVGYPHEIKGQGIYCYVTLMNDREPSDELLKELRTWVRTEIGPIASPDVIQWAPGLPKTRSGKIMRRILRKIAENDFGSLGDTSTLADPSVVEDLIENRANKG

SEQ ID NO: 151650 - DNA, 1950 bp, Erythrobacter sp. SD-21
  CDS (1)..(1950): transl_table=11
atgagcacgatctcgcacgaccaggactgggtccgccgccctgccgctgctggcgagggcacgctctgcgatagcgggcaatacgaagcgctatacgcgcgcagcctcgcggaacccgatagtttctgggccgagcaggccgaccggctcgactgggtgcgcacgcctcaacggatcgccggctggagccacgacccggtcgacatcaagtggttcgaggacggcgttctcaacatctgccacaacgccgtcgaccgccatgtcgagggcggcaacggtgcgcgcatagccattattttcgagcccgacgatcccgacggcgaaacccgccatatctcctacgccgatctgcagcgcgaagtggtgcgcatggcaaacacgctcaagacgatgggcgtggccaagggcgaccgggtcacgatctatatgccgatggtgcccgaaggcgccttcgccatgctcgcctgcgcgcgcatcggcgcggtgcattcggtgatcttcggcggcttttcgcccgaagcgatcgcgggccgggtcgaggattgccaaagcgactggatcgtgaccgccgacgagggcgtgcgcggcggcaagccgataccgctgaaagccaatgtcgatgccgcgctggaaaaggtgccggtcaagggcgtgctggttatccgccacacgggcggcgacgtggcgatgaaggacgggcgcgaccactggtatcacgagctttcgcgcgatgtcgccgctgattgcccctgcgagccgatgaaggcggaagaccccctgttcatcctttacacttcggggtcgaccggaaaacccaagggcgtattgcacaccaccggcggctatgcggtctggaccgagacgaccttccgctatgtcttcgattaccggccgggcgaggtctactggtgcaccgccgacatcggctgggtcactgggcacagctacatcgtctacggcccgcttcagaacggcgcgacggcggtgatgttcgaaggcgtgcccaactatcctgatcacgaccggttctgggcagtctgcgcgaagcacaaggtcaaaatcttctacaccgcaccgaccgcgatccgcgcgctgatgcgcgagggcgaaggacatgtggcgaagcacgatctttccgccctgcgcctgctcggctcggtgggcgagccgatcaatcccgaggcctggcgctggtatcacgagcatgtcggcggcggcaccacgcccatcgtcgacacctggtggcagaccgagacgggcggggtcatgatcaccacgctgcccggcgcacacgacatgaaaccgggcagcgcgggcaagcctttcttcggcatctgcccgcagctggtcgatgccgacggcggcgtgctggaaggcgcggcggaaggcaatctgtgcatcacccgcagctggcccgggcaggcgcgcaccgtctatggcgaccacgagcgcttcgtgcagacctatttcagcacctatccgggcaagtatttcaccggcgacgggtgccggcgcgacgccgatggctattactggatcaccggccgcgtggacgatgtgatcaacgtctcgggccaccgcatgggcaccgccgaagtcgagagcgcgctggtgctgcatcccaaggtatcggaggcggcggtcgtcggcttcccgcacgatatcaaggggcagggcatctattgttacgtcacgctgatcgcgggtgaggagccgtccgaagcgctggaggcggaacttcgccagcaggtgcggcgcgagatcggaccgatcgcgacccccgaccatctgcacttcacgcccgcgcttcccaagacgcgcagcggcaagatcatgcgccgcatcctgcgtaaaatcgcggagaacgagttcggcgcgctgggcgatacctcgacgctggccgatcccggcgtggtggagtctctgatcgaggggcggcggaaccgctga

SEQ ID NO: 151651 - protein, 649 aa, Erythrobacter sp. SD-21
MSTISHDQDWVRRPAAAGEGTLCDSGQYEALYARSLAEPDSFWAEQADRLDWVRTPQRIAGWSHDPVDIKWFEDGVLNICHNAVDRHVEGGNGARIAIIFEPDDPDGETRHISYADLQREVVRMANTLKTMGVAKGDRVTIYMPMVPEGAFAMLACARIGAVHSVIFGGFSPEAIAGRVEDCQSDWIVTADEGVRGGKPIPLKANVDAALEKVPVKGVLVIRHTGGDVAMKDGRDHWYHELSRDVAADCPCEPMKAEDPLFILYTSGSTGKPKGVLHTTGGYAVWTETTFRYVFDYRPGEVYWCTADIGWVTGHSYIVYGPLQNGATAVMFEGVPNYPDHDRFWAVCAKHKVKIFYTAPTAIRALMREGEGHVAKHDLSALRLLGSVGEPINPEAWRWYHEHVGGGTTPIVDTWWQTETGGVMITTLPGAHDMKPGSAGKPFFGICPQLVDADGGVLEGAAEGNLCITRSWPGQARTVYGDHERFVQTYFSTYPGKYFTGDGCRRDADGYYWITGRVDDVINVSGHRMGTAEVESALVLHPKVSEAAVVGFPHDIKGQGIYCYVTLIAGEEPSEALEAELRQQVRREIGPIATPDHLHFTPALPKTRSGKIMRRILRKIAENEFGALGDTSTLADPGVVESLIEGRRNR

SEQ ID NO: 151652 - DNA, 1941 bp, Roseovarius sp. TM1035
  CDS (1)..(1941): transl_table=11
atgagcgacgcaaacgcaaccgcaggtgcaaaaaaagccggatttcacattgatcaggccaagtatgagcggatgtatgccgattcgatcagtaaccccgaagcgttttggggggagcatggcaagcggctggactggatcaagccctataccaaggtcaagaacacctcgtttgcgtatgacaatgtgtcgatcaaatggtttgaagatggcacgctgaacgtgtcggccaattgcatcgaccggcatttggcaacacgcggcgatcagacggcgatcatctgggaagcggatgatcccaacgagacgccgcagcacatcagctataaggaactgcacgcgcagacctgcaagatggccaatgtgctcaaggcgatgggcgtgggcaaaggtgaccgcgtcgtaatctatatgccgatgatccccgaggccgcctatgcgatgctggcctgtgcgcggatcggggcaattcattcgatcgttttcgcgggcttcagcccggacgcgctgggcgcgcggatcaatggctgcgatgccaaggtggtgatcaccgccgaccatgcgccgcgtggtggccgcaagaccaagctcaaggataacgtcaatcaggcgctgttgcatgacacctcggatgtgaagtgtcttgtggtgcagcgcaccggtgatcaggttgcatggcggcgtgatctggatttctggtggcatgaagaggccgagaaggtcagcgccgattgcccgccagaggaaatgaacgcagaagaccccctgttcattctttacacctcggggtcgaccggcatgcccaagggcgtggtgcatacgacgggcggctatctgacctatgcgtcgatgacgcatgagtatattttcgactatcacgagggtgatatttactggtgcacggccgatgtgggctgggtcacagggcatagctatatcgtttatggcccgctggccaatggggccaccacgctgatgttcgagggcgtgccgacctatccggatgccgggcgtttctggcaggtgtgcgagcgccacaaggtgacacagttctacactgcccccaccgccattcgcgcgctgatgggcaagggcaccgggccggttgaaggatcggacctgtcgagcctgcgcattctggggtcggtcggcgagccgatcaaccctgaggcgtggaactggtacaatgagaatgtgggcaagggcaaatgccccatcgtggatacgtggtggcagaccgagaccggcggcattctgatcacaccgctgcccggtgtgatcgacacgcccaagcccggttcggccaccaagccgttctttggcgtgaagcccgttgtgctggacgatcagggcaacgagttggacggcgagacctcgggtgttctggcgctcaaggatagctggccggggcagatgcgcaccgtctggggcgatcatagccggtttgtctcgacctatttcgagatgttcaaaggctattatttctcgggcgatgggtgccgccgcgacgcggatggcgattactggattacgggccgggtggatgacgtgatcaacgtctctggccaccggatgggcaccgccgaggtggaatcggcgttggtcgcccatgccacggtgagcgaggccgccgttgtgggctatccgcatgacatcaaggggcagggcatctattgctatgtcacgctgatggatggggttgaggcgaccgaggcgctgcgcacggaactgggcaactgggtgcgtcaggaaatcgggccgattgccaagccggatgttatccaatgggcaccgggcctgccgaaaacccgttcgggcaagatcatgcgccgcatcctgcgcaagatcgccgagaacgactttgacagccttggggacacctcgacgctggccgatccgtcggttgtggacgagctgattgccaatcgcaccaaagcctga

SEQ ID NO: 151653 - protein, 646 aa, Roseovarius sp. TM1035
MSDANATAGAKKAGFHIDQAKYERMYADSISNPEAFWGEHGKRLDWIKPYTKVKNTSFAYDNVSIKWFEDGTLNVSANCIDRHLATRGDQTAIIWEADDPNETPQHISYKELHAQTCKMANVLKAMGVGKGDRVVIYMPMIPEAAYAMLACARIGAIHSIVFAGFSPDALGARINGCDAKVVITADHAPRGGRKTKLKDNVNQALLHDTSDVKCLVVQRTGDQVAWRRDLDFWWHEEAEKVSADCPPEEMNAEDPLFILYTSGSTGMPKGVVHTTGGYLTYASMTHEYIFDYHEGDIYWCTADVGWVTGHSYIVYGPLANGATTLMFEGVPTYPDAGRFWQVCERHKVTQFYTAPTAIRALMGKGTGPVEGSDLSSLRILGSVGEPINPEAWNWYNENVGKGKCPIVDTWWQTETGGILITPLPGVIDTPKPGSATKPFFGVKPVVLDDQGNELDGETSGVLALKDSWPGQMRTVWGDHSRFVSTYFEMFKGYYFSGDGCRRDADGDYWITGRVDDVINVSGHRMGTAEVESALVAHATVSEAAVVGYPHDIKGQGIYCYVTLMDGVEATEALRTELGNWVRQEIGPIAKPDVIQWAPGLPKTRSGKIMRRILRKIAENDFDSLGDTSTLADPSVVDELIANRTKA

SEQ ID NO: 151654 - DNA, 1947 bp, Marinobacter algicola DG893
  CDS (1)..(1947): transl_table=11
atgactgataaacaggtttatccggtaagtccggacgtggccaaaagggccctgctaaaccgggatcagtacgagaaaatgtaccaacagtcggtggaagacccggaaactttctgggccgaacacggcaagcgactggactggatcaagcccttctcgaaggtaaaaaacaccacctacgactacgacaacctatccatcaagtggtttgaagacggccaactgaacgctgccgccaactgcctggaccgtcacctggaaaagcgcggtgatcagacggccatcattttcgagggcgacgacccagccgattcccgcaacgtgacctaccgcgaactgtatgaagaaacctgtaagttcgcgaacgttctgaaagatcagggcgtcaagaagggcgacgttgtcactatttacatgcccatgattgttgaaacaggggttgccatgctggcctgtgcccgcatcggtgctatccattccgttgtcttcggcgggttttcgccggaagcactgggcgcccggatagcgaatggcaaatcccgttttgtagtcacggccgacgaaggcgtccgtggtggacgcaagatcccgctcaagaagaacgtcgacgctgccctgagtaaagaagacggcgctgacgtcgacaaggttatcgtggtcaagcgcaccggaggcgatgtgccatggaaagacggccgtgatcagagctatgaagagctgatgaaggtcgcttcctccgattgcccggcggagcccatgaacgccgaagacccgctgttcatgctgtacacctctggttcaaccggggctccgaaaggcgtattacacaccaccggtggctacatggtgtacacctccatgacccacgaatacgtgtttgattaccaggacggcgatgtctactggtgtacggcggactttggctgggtcacaggccacagctacatcctgtatggcccgctggctaacggtgcggtcaccgtcctgttcgagggtgtgcccaattacccggatacctcccgcatgggccaggtggtggacaagcacaaggtcaacatcctgtacactgcacccaccgccattcgtgccctgatggccgagggcgagtcctgcatgaacggcaccacccgcgacagcctgcgcctgctgggctcggtgggtgagccgatcaacccggaagcctgggagtggtaccatcgcgtcatcggtaacagcaagtgcccgattgtggacacctggtggcagacagaaaccggcggcattctgatttcgccgctgccgggcgccatcgatctgaagccgggttccgcgactgtgccgttcttcggtgtcaagccggcactggtggacaacgacggcaatattctggaaggcaagaccgagggcaacctggttatcctggacagttggccgggccagatgcgcaccatttacggtgaccatgagcgcttcaagcaaacctacttcagtacctacaagggtatgtactttaccggtgacggtgctcgtcgcgatgaagatggctattactggattactggtcgagtggacgatgtgctgaacgtgtccggccaccgcctgggaacagctgaggtggaaagtgctctggtagcccacgacaaggttgctgaggccgctgtcgttggttacccccacgaaatcaaggggcagggcatttatgtctatgtaaccctggttcatggcgaggaacccagcgacgagttgaagaaagagctggtccagtgggtgcgcaaggaaatcggtccgattgcgtctccagacgtaattcagtgggcgcctggactgcccaagactcgttctggcaagattatgcgtcggattttgcgtaaaatcgcatccaatgagcacgatcagttgggagatacctctaccctggcggacccgggtgtggtggatgacctgatcagcggtcgtgcgaacaagtaa

SEQ ID NO: 151655 - protein, 648 aa, Marinobacter algicola DG893
MTDKQVYPVSPDVAKRALLNRDQYEKMYQQSVEDPETFWAEHGKRLDWIKPFSKVKNTTYDYDNLSIKWFEDGQLNAAANCLDRHLEKRGDQTAIIFEGDDPADSRNVTYRELYEETCKFANVLKDQGVKKGDVVTIYMPMIVETGVAMLACARIGAIHSVVFGGFSPEALGARIANGKSRFVVTADEGVRGGRKIPLKKNVDAALSKEDGADVDKVIVVKRTGGDVPWKDGRDQSYEELMKVASSDCPAEPMNAEDPLFMLYTSGSTGAPKGVLHTTGGYMVYTSMTHEYVFDYQDGDVYWCTADFGWVTGHSYILYGPLANGAVTVLFEGVPNYPDTSRMGQVVDKHKVNILYTAPTAIRALMAEGESCMNGTTRDSLRLLGSVGEPINPEAWEWYHRVIGNSKCPIVDTWWQTETGGILISPLPGAIDLKPGSATVPFFGVKPALVDNDGNILEGKTEGNLVILDSWPGQMRTIYGDHERFKQTYFSTYKGMYFTGDGARRDEDGYYWITGRVDDVLNVSGHRLGTAEVESALVAHDKVAEAAVVGYPHEIKGQGIYVYVTLVHGEEPSDELKKELVQWVRKEIGPIASPDVIQWAPGLPKTRSGKIMRRILRKIASNEHDQLGDTSTLADPGVVDDLISGRANK

SEQ ID NO: 151656 - DNA, 1950 bp, Roseobacter sp. AzwK-3b
  CDS (1)..(1950): transl_table=11
atgtccgataatacctatccgccctcagccgattttgctgccaaggcacatatcgacgccgcgaaataccaagatctctacgccgcttccatcgcagatcccgacgccttctgggccgaacacggcaagcgcatcgactggatcaagcccttctccaaggttaatgacgtcaatttcgacttcgggaacgtctcgatcaaatggttcgaggacggcaccctgaatgtttcggccaactgcatcgaccggcacctcgccacgcgtggcgaccagaccgctatcatctgggagcccgacgagcccggcgatgacgccctgcatatcacctatcgcgaactgcacgagcatgtctgcaagatggcgaacgtgctcaagaaccttggcatctccaagggcgaccgcgttgtgatctacatgccgatgatccccgaagcggcctatgccatgctggcctgtgcccggatcggcgccatccattctatcgtcttcgcgggcttctctccggatgcgcttggcgcgcgggtcaatggctgcgatgccaaactggtcatcacctccgacaccgccccgcgcgggggccgcaaaaccaagctcaaggacaacgtcaatcaggccctgctgcatgacgtggacgacgtgaaatgcctcgtggtgcgccgcaccggcgaccagatcgcgtggcgctccagcggagactactggctccacgaagagctcgagaaggtcgatgccgactgcccgcccgaggaaatgaacgccgaagacccgctcttcatcctctacacttccggctcgaccggccagcccaagggcgtggtgcacacgcagggcggctatctggtctgggcctcgatgacccatgaatacgtgttcgactatcacgagggcgatatcttctggtgcaccgccgatgtcggctgggtcaccggccacagctatatcgtctatggtccgctggccaacggcgcgacaacgctgatgttcgaaggcgtgcccacctatcccgatgcgggcaggttctgggccgtgtgcgaaaagcacaaagtgaaccagttctacaccgcccccaccgcaatccgggcgctgatgggtcagggcaatgactacgtgacgaaatacgacctgtcggacctcaagcttctgggcacggtgggcgagccgatcaaccccgaagcctggaactggtacaacgaggtgatcggcaagggccgatgccccatcgtcgacacctggtggcagaccgaaaccggcggccacctcatcacccccctgcccggcgccatcgcaaccaaacccggttccgccaccgtgccgttcttcggcgtgcggcccatggttctggaaaccgaatccggcaaggagatcgacagcaccgaggccgaaggcgtgctggccatcaaggacagctggccgggccagatgcgcaccgtctggggcgatcatgaccggttcgaggccacctatttccagcaatacaagggctattacttcaccggtgacggctgccgccgcgacgccgacggctattactggatcaccgggcgcgtcgacgacgtcatcaacgtctcggggcaccgtatgggcaccgccgaggtcgaatccgcccttgtggcccatgccaaggtggccgaagccgccgtggttggctacccgcatgacatcaagggacagggcatctacgcctatgtcaccctgatggccggcgaagaaccgaccgaagagctgcgcaaggagctggaaacctgggtgcgtacggaaatcggaccgatcgccaagcctgacctcatccagtgggcgcccggcctgcccaagacccggtccggcaagatcatgcgccgcatcctgcgcaagatcgccgagaacgagttcgacaatctcggggacacctccacgctggccgatccgggcgtggtggacgacctgatcgaaaaccgcatgaaccgccactga

SEQ ID NO: 151657 - protein, 649 aa, Roseobacter sp. AzwK-3b
MSDNTYPPSADFAAKAHIDAAKYQDLYAASIADPDAFWAEHGKRIDWIKPFSKVNDVNFDFGNVSIKWFEDGTLNVSANCIDRHLATRGDQTAIIWEPDEPGDDALHITYRELHEHVCKMANVLKNLGISKGDRVVIYMPMIPEAAYAMLACARIGAIHSIVFAGFSPDALGARVNGCDAKLVITSDTAPRGGRKTKLKDNVNQALLHDVDDVKCLVVRRTGDQIAWRSSGDYWLHEELEKVDADCPPEEMNAEDPLFILYTSGSTGQPKGVVHTQGGYLVWASMTHEYVFDYHEGDIFWCTADVGWVTGHSYIVYGPLANGATTLMFEGVPTYPDAGRFWAVCEKHKVNQFYTAPTAIRALMGQGNDYVTKYDLSDLKLLGTVGEPINPEAWNWYNEVIGKGRCPIVDTWWQTETGGHLITPLPGAIATKPGSATVPFFGVRPMVLETESGKEIDSTEAEGVLAIKDSWPGQMRTVWGDHDRFEATYFQQYKGYYFTGDGCRRDADGYYWITGRVDDVINVSGHRMGTAEVESALVAHAKVAEAAVVGYPHDIKGQGIYAYVTLMAGEEPTEELRKELETWVRTEIGPIAKPDLIQWAPGLPKTRSGKIMRRILRKIAENEFDNLGDTSTLADPGVVDDLIENRMNRH

SEQ ID NO: 151658 - DNA, 1977 bp, Plesiocystis pacifica SIR-1
  CDS (1)..(1977): transl_table=11
atgaccaccgccgtagacgagcgacccgacatcatcgacgttgacgaccgcgtgcgcgaggggagcacctcgcagatccaggacatgcccgcctaccgcgagcactggtcccggggcgaggccgaccccagcggctactggctggcccagaccaagcagcgggtccactggcgcaaggcgccgacgcagggcctcgagggcgactgctggagcgtgtgcgacggccccatcacctggttcgccgacggcgagctcaacgtcaccgagtcctgcctcgatcgtcagctcgccaagcgcggggacaaggtcgcgatcgtgtgggagggcgacgagcccggcgacgtccgcgagctgacctataaagagctgcacgccgaggtctgccgctgcgccaacgccctgcgcgagctcggcctcaaaaagggcgagcgggccatcatctacatgggcatggtgcccgaggcggccgtggccatgctggcctgcgcgcgcctgggcgcggtccactccgtggtgttcgggggcttctcggccgaggccctgcgcgaccgcgtgcgggactgcggcgcgagcgtggtcatcacccaggacgtcggcaagcgcggcagcaagaacatcccgctcaaggcgaccaccgaccaggccctcgagggcgaggctggcgtggaagccgtgctcgtctaccagcgcgacgcgtccgtcgaggtcgccatgaaggcgggccgggaccactggtggcacgagaccgtcagcccggcctcggccgagtgcgaggccgtggtctgcaaggccgaggacccgctcttcgtgctctacacctcggggtccacggggcgccccaagggcctggtccatacttgcggcggctacctgacgtggacggcctatacccacgccgtcaccttcgacctgcgcgaggacgacgtctacgcctgcgtcgccgacatcgggtggatcaccgggcacagctacatcgtctacggcccgctgtgcaacggcgcgaccagcttgatgttcgagtccgtgccgacctaccccgacgtcgaccgctactgggacatggtcgcgcgccacaagatcacgattttttacacggcgcccacggccatccgcgtgctcgcggcccaggggcccgggcccgtgcgcaagcacgacctgagctcgctgcgggtgctcgggaccgtcggcgagcccatcgatcccgtggcttggcgctggtactacgaggtcgtcggccaagagcgctgcgccgtcgtcgatacctggtggcagaccgagaccggcggccactgcatcacgcccatcgccccggcgaccccagaaaagcccggctcggcgaccctgcccatgcctggaatcatgccggtgctcgtcaacgagcacggccggcccatggtcggccccggcgaggggcggctgtgcatcgcccacccctggccgggcatggcgcggaccgtgtggggggaccacgcccgctacgtgatgacctacttcacgaccttcccgggcttttacttcaccggggacggctgccgccgcgacgccgacggctactactggatcaccggccgcgtcgacgacgtgctcaacgtctcgggccaccgcatgggcacggccgagttcgaggccgcgctcatcgccatcgacgagctcgccgaggcggcggtcgtgggctacccccacgcggtcaagggccagggcgtgcacgcctacgtggtcgcgcagcctggggtcgaggccgacgacgcgctcacggccaaggcccacgaggccgtgcgcgggtcgatcggggcgcacgcgcggatcgatcgcttgcagtacgtccccggcctgcccaagacccgctcgggcaagtgcatgcgccggatcctgcgcaagatcgccgagggcgagcccgacaagctcggcgacgtctcgaccctcgcggaccccagcgtggtcgatgcgatcatcgagggcgcgaagagcttcgggtag

SEQ ID NO: 151659 - protein, 658 aa, Plesiocystis pacifica SIR-1
MTTAVDERPDIIDVDDRVREGSTSQIQDMPAYREHWSRGEADPSGYWLAQTKQRVHWRKAPTQGLEGDCWSVCDGPITWFADGELNVTESCLDRQLAKRGDKVAIVWEGDEPGDVRELTYKELHAEVCRCANALRELGLKKGERAIIYMGMVPEAAVAMLACARLGAVHSVVFGGFSAEALRDRVRDCGASVVITQDVGKRGSKNIPLKATTDQALEGEAGVEAVLVYQRDASVEVAMKAGRDHWWHETVSPASAECEAVVCKAEDPLFVLYTSGSTGRPKGLVHTCGGYLTWTAYTHAVTFDLREDDVYACVADIGWITGHSYIVYGPLCNGATSLMFESVPTYPDVDRYWDMVARHKITIFYTAPTAIRVLAAQGPGPVRKHDLSSLRVLGTVGEPIDPVAWRWYYEVVGQERCAVVDTWWQTETGGHCITPIAPATPEKPGSATLPMPGIMPVLVNEHGRPMVGPGEGRLCIAHPWPGMARTVWGDHARYVMTYFTTFPGFYFTGDGCRRDADGYYWITGRVDDVLNVSGHRMGTAEFEAALIAIDELAEAAVVGYPHAVKGQGVHAYVVAQPGVEADDALTAKAHEAVRGSIGAHARIDRLQYVPGLPKTRSGKCMRRILRKIAEGEPDKLGDVSTLADPSVVDAIIEGAKSFG

SEQ ID NO: 151660 - DNA, 1962 bp, Phaeobacter gallaeciensis 2.10
  CDS (1)..(1962): transl_table=11
atgacccaggagagcgacagcaaagcctatgcgccgtcggaggagacggttgcgcgtgcccatgttaacgccgcacaatatgatgagatgtacgccgcttctatgcaggatccagagggtttctggcgtcagcaggcggagcggatcgactggatcaaacccttcacccaagtgaaggacgtggacttcacgctcggtaatgtctcgatcaactggtacgcagacggcacgctgaatgtcgctgccaactgcatcgaccgccaccttgacacccgcggcgatcagacggcgatcatctgggagcccgacagccccgatgaggctgcacaacacatttcttacaagcagctccacacccgcgtctgccgtatggccaacgtgctggagacgatgggcgtgcgcaaaggggatcgcgtggtgatctacctgccgatgatccccgaagccgcctatgccatgctggcctgcgcccgtatcggcgcaattcactccattgtcttcgccggtttctcgccagatgccctggcggcgcgggtcaatggctgcgatgccaaggtcctcatcaccgcggatgaggccccccgtggtggccgcaagacccctctgaaatccaacgccgacgccgcgctcttgcacaccaaggacactgtgaaatgcttggtggtcaaacgcaccggcgggcagaccacgtggatcgacgggcgcgactatgactacaacgaaatggcgttggaggcggacgactactccaaacccgcagaaatgaacgccgaggacccgctattcatcctctacacctccggctccaccggccagcccaagggggttgtacacaccaccggcggctacctgacctatgccgcgatgacgcatgagatcacctttgattatcatgacggcgacatctactggtgtacggcggatgtgggctgggtaaccggccacagctatatcgtctatgggccgctggccaatggtgccaccacgctgatgttcgaaggcgtgccaacctacccggatgccagccggttctggcaggtctgcgacaagcataaggtgacgcagttctacaccgcccccactgcactgcgcgccctgatgggtcagggcaacgaatgggtcgaaaaatgcgatctgtcctccctgcgcacccttggcaccgtgggcgagccgatcaatcccgaagcctggaactggtacaatgatatcgtcggcaaaggaaaatgtcctattgtcgacacgtggtggcagaccgaaaccggtggtcacctgatgacccccctgcccggtgcccatgcaaccaaacccggtgcggcgatgaagcccttctttggcgtggctcccgtggttctggacccgcaatccggcgcggaaatcaccggtaacggcgtcgaaggtgtgctctgcatcaaggacagctggcccggccagatgcgcaccgtctggggcgaccatgagcggttcgagaagacgtatttctcggactacaaaggctactacttcaccggtgatggctgccgtcgcgacgaggacggcgactattggatcacgggccgcgtcgatgacgtgatcaatgtctccggtcaccgcatgggcacagccgaggtcgaaagcgcccttgtggctcacgccgccgtcgcggaggccgctgtggtcggctacccgcatgagatcaagggccagggcatttattgctatgtcaccctgatgaacgaccgcgaaccgtcggatgagctggtgaaggagctgcgcacctgggtccggaccgagatcggcccgattgcctctcctgatgtgatccaatgggcgccgggcctgccgaaaacccgctccggcaagattatgcgccgcattctgcgcaagattgcggagaatgattttggcagccttggcgacacctcaaccctcgccgatccgtcggtggtggatgatctgatcgcaaaccgagcagataaaggatga

SEQ ID NO: 151661 - protein, 653 aa, Phaeobacter gallaeciensis 2.10
MTQESDSKAYAPSEETVARAHVNAAQYDEMYAASMQDPEGFWRQQAERIDWIKPFTQVKDVDFTLGNVSINWYADGTLNVAANCIDRHLDTRGDQTAIIWEPDSPDEAAQHISYKQLHTRVCRMANVLETMGVRKGDRVVIYLPMIPEAAYAMLACARIGAIHSIVFAGFSPDALAARVNGCDAKVLITADEAPRGGRKTPLKSNADAALLHTKDTVKCLVVKRTGGQTTWIDGRDYDYNEMALEADDYSKPAEMNAEDPLFILYTSGSTGQPKGVVHTTGGYLTYAAMTHEITFDYHDGDIYWCTADVGWVTGHSYIVYGPLANGATTLMFEGVPTYPDASRFWQVCDKHKVTQFYTAPTALRALMGQGNEWVEKCDLSSLRTLGTVGEPINPEAWNWYNDIVGKGKCPIVDTWWQTETGGHLMTPLPGAHATKPGAAMKPFFGVAPVVLDPQSGAEITGNGVEGVLCIKDSWPGQMRTVWGDHERFEKTYFSDYKGYYFTGDGCRRDEDGDYWITGRVDDVINVSGHRMGTAEVESALVAHAAVAEAAVVGYPHEIKGQGIYCYVTLMNDREPSDELVKELRTWVRTEIGPIASPDVIQWAPGLPKTRSGKIMRRILRKIAENDFGSLGDTSTLADPSVVDDLIANRADKG

SEQ ID NO: 151662 - DNA, 1956 bp, Oceanibulbus indolifex HEL-45
  CDS (1)..(1956): transl_table=11
atgtccgacgccaccgcaaagacctatccgccatccgccgacatggtcgcccgcgcccatgtgaatgcccagacctatgataagatgtaccaagcctcggtcaccgacaccgacgggttctggcgcgaacaggcgcagcggatcgactggatcaaacccttcacccaagtgcgcgatgtgaatttcgatctcggttcggtcagcatcaactggttcgcggatggggagttgaacgtcagcgccaattgcattgaccgccaccttgagacccgcggcgatcagactgcgatcatctgggagccggacagccccgaggacgcggccaaacacatcagctaccgcgagttgcacagcgccacctgccgtatggccaatgtgctgcgcgatttgggtgtgaccaagggcgaccgggtcatcatctatatgccgatgatccccgaagccgcctatgccatgctggcctgtgcgcggattggcgcgatccattccatcgtcttcgccgggttctcgcccgacgccctcgctgcccgcgtcaacggctgcgaagccaaggtcgtcatcaccgccgacgaagccccccgcggtggcaaggccaccccgctcaaggccaatgccgacaaggcgctggcgcagtgcgacgccagcgtgcagtgccttgtcgtgcggcgcaccaatggggacgtggcttggaacgaggcccgggaccgcgattataacgcgctggctcaggatgcttcggacaaatgcgagccggttgcgatgggcgctgaagacccgctgttcatcctctacacctctggctccaccgggcagcccaagggcgtggtgcataccaccggcggctatatcacatatgccgcgctgacccatgaggtgacctttgattaccactacggcgatgtctattggtgcaccgccgatgtgggctgggtgaccgggcacagctatattgtctatggcccgctcgccaatggggccaccacgctgatgttcgaaggcgtgcctacctaccccgacgccagccgcttctggcaggtttgcgaaaagcataaggtcacgcagttctacactgcccccaccgcgatccgcgcgctgatggggcaaggcaaagaatacgtcaccaaaagcgatctgtcgtcgctgcgcatccttggcaccgtgggggagccgatcaaccccgaggcgtggaattggtaccacgaggtggttggccatggccggtgccccatcgtcgatacatggtggcagaccgaaaccggcggccacctgatgacccccctgcccggcgcccatgacatgaaaccgggtgcggcaatgaaaccgttctttggcatcaaaccggtaatactcgacccaacctcgggtcaagagatcgacggcaaccccgccgaaggcgtgctgtgcatcgccgacagctggcccggccagatgcgcacaatctggggcgatcatgagcggttcgagaagacctattttgcggattaccccggctactatttcaccggcgatggctgcaagcgcgatgccgacggcgactattggatcacgggccgcgtggatgacgtgattaacgtctcaggccaccgcatgggcacggcagaggtcgaaagcgcgctggtggcacatagcaaagtcgccgaagccgccgtcgtcggctacccccatgacatcaagggtcagggcatctattgctacgttactttgatgagcggtgaggaaccttccgaagacctgcgcaccgagctgcgcaattgggtccgtcaggaaatcggccccatcgcctcgcccgacctgatccaatgggcaccgggcctgccgaaaacacggtcgggaaaaatcatgcgccgcatcctgcgcaagatcgccgaagacgatttcggtgccttgggagacacatcaacgctggccgatcccagtgtggtagatgacctgatcgacaatcgcatgaaccgctaa

SEQ ID NO: 151663 - protein, 651 aa, Oceanibulbus indolifex HEL-45
MSDATAKTYPPSADMVARAHVNAQTYDKMYQASVTDTDGFWREQAQRIDWIKPFTQVRDVNFDLGSVSINWFADGELNVSANCIDRHLETRGDQTAIIWEPDSPEDAAKHISYRELHSATCRMANVLRDLGVTKGDRVIIYMPMIPEAAYAMLACARIGAIHSIVFAGFSPDALAARVNGCEAKVVITADEAPRGGKATPLKANADKALAQCDASVQCLVVRRTNGDVAWNEARDRDYNALAQDASDKCEPVAMGAEDPLFILYTSGSTGQPKGVVHTTGGYITYAALTHEVTFDYHYGDVYWCTADVGWVTGHSYIVYGPLANGATTLMFEGVPTYPDASRFWQVCEKHKVTQFYTAPTAIRALMGQGKEYVTKSDLSSLRILGTVGEPINPEAWNWYHEVVGHGRCPIVDTWWQTETGGHLMTPLPGAHDMKPGAAMKPFFGIKPVILDPTSGQEIDGNPAEGVLCIADSWPGQMRTIWGDHERFEKTYFADYPGYYFTGDGCKRDADGDYWITGRVDDVINVSGHRMGTAEVESALVAHSKVAEAAVVGYPHDIKGQGIYCYVTLMSGEEPSEDLRTELRNWVRQEIGPIASPDLIQWAPGLPKTRSGKIMRRILRKIAEDDFGALGDTSTLADPSVVDDLIDNRMNR

SEQ ID NO: 151664 - DNA, 1908 bp, Kordia algicida OT-1
  CDS (1)..(1908): transl_table=11
atgagtaattaccatataaaacacttagaagaatattaccaagtataccgaaaatctgtccgaaatcctgaagtattctgggaagaaattgccgaagaacatttcctttggcgaaaaaagtgggacaatgtactgagttgggattttaccaagccagaagtcaaatggtttgaaggcgcacaacttaacatcactgaaaattgtattgatcgtcatttatatacacgaggcgacaaaactgccattatttttgaaccgaacaatccggaagaagaagcacaacatatttcctatcgtgatttacatgacaaagtatgtcgctttgccaatgtattgaaagaacaaggcattcaaaaaggcgatcgtgtatgtatttatttacccatgattcccgaattagcgatttccgtattggcgtgcgcgcgaattggagcaattcattcggtagtctttgcaggattttcttccacagcattatcaactcgaattaacgatgcaacttgtaaaatggtaattacgagtgatggatcgtatcgtggtgcaaaaaccatcgatttaaaaggaattgtagacgaagctttgaaagattgtgattgtgtagaaaatgtattagttgccaaaagaatcaactctgacattcacatggaagaaggacgcgatcattggttgcaacctttgcttgatgaagcctatcacgactgtgttcctgaaattatgaatgccgaagacccattattcattctctacacttcgggttctacaggaaaaccaaaaggaatggtacattctaccgcaggttatatggtgtatagtgcgtacacatttaaaaatgtcttccaataccgtgaaaaagatgtgtattggtgtacggcagatattggttggattaccggacacagttacatcgtatacggaccattatgtaatggcgcaactacggtaatgtttgaaggtgtgccaagttatccagattttggacgtttctgggaaattgtagaaaagcacaaagtgaatcaattttacaccgcaccaactgccattcgtgccttagcaaaagaaggtgtagaacatttagaaaagcacgatttatcatcgttaaaagtattaggaaccgttggcgaaccaatcaacgaagaagcttggcattggtatgatgataacgttgggaagcgaaaagcgccaattgtagatacgtggtggcaaaccgaaacaggcggcattatgattacgccaattgcttttgcaacaccaacaaaaccgacgtatgcaaccttaccatttataggaattcaacctgcgttgatggacgaaaatggtaaggaaataaaaggaaatcaagtagatggacgattatgtatcaagtttccttggccaagtatggcacgaactatttggggaaatcaccagcgatacaaagacacgtatttttcagcatacgaaaacaaatattttacaggcgatggagcgttgcgcgatgaagttggttattaccgaattacgggtagagtagatgatgtgattatcgtttcaggtcataatttaggaactgcgccaattgaagatgcgatcaacgaacatcctgcggtggcggaatcggcaattgtaggtttcccacatgatgtaaaaggaaatgcattgtacggttacgtaacgttaaaagaaacaggcgaaagtagaaatcatgataatcttcgcaaagagatcaatcagattattacggaacaaattggaccgattgcaaagttagacaaagtacaatttacacaaggtttgccaaaaacgcgttcaggaaaaatcatgcgacgtattttacgaaaaatcgctggaaaagatgcggataacttaggtgatattagtacgctattgaatccggaagttgttcaggatattatggataatgcgttgtag

SEQ ID NO: 151665 - protein, 635 aa, Kordia algicida OT-1
MSNYHIKHLEEYYQVYRKSVRNPEVFWEEIAEEHFLWRKKWDNVLSWDFTKPEVKWFEGAQLNITENCIDRHLYTRGDKTAIIFEPNNPEEEAQHISYRDLHDKVCRFANVLKEQGIQKGDRVCIYLPMIPELAISVLACARIGAIHSVVFAGFSSTALSTRINDATCKMVITSDGSYRGAKTIDLKGIVDEALKDCDCVENVLVAKRINSDIHMEEGRDHWLQPLLDEAYHDCVPEIMNAEDPLFILYTSGSTGKPKGMVHSTAGYMVYSAYTFKNVFQYREKDVYWCTADIGWITGHSYIVYGPLCNGATTVMFEGVPSYPDFGRFWEIVEKHKVNQFYTAPTAIRALAKEGVEHLEKHDLSSLKVLGTVGEPINEEAWHWYDDNVGKRKAPIVDTWWQTETGGIMITPIAFATPTKPTYATLPFIGIQPALMDENGKEIKGNQVDGRLCIKFPWPSMARTIWGNHQRYKDTYFSAYENKYFTGDGALRDEVGYYRITGRVDDVIIVSGHNLGTAPIEDAINEHPAVAESAIVGFPHDVKGNALYGYVTLKETGESRNHDNLRKEINQIITEQIGPIAKLDKVQFTQGLPKTRSGKIMRRILRKIAGKDADNLGDISTLLNPEVVQDIMDNAL

SEQ ID NO: 151666 - DNA, 1953 bp, Hoeflea phototrophica DFL-43
  CDS (1)..(1953): transl_table=11
atgtcgcagaaatcctacaaggtcctcaaggacgccaagacaagggctttgatcgatgatgagacctacgagaaatggtacaagcagagcgtcaaggatcccgaaaaattctgggccaagcacggcaagcgaatcgactggttcaagccctataccaaggtgaaaaacaccaatttcaacgggaaagtctcgatcaagtggtttgaggacggggttaccaacgtctcctacaactgtatcgaccggcatctcaaaaagcgcggtgatcaggttgccatcatctgggagggggacaatccctatgatgacaagaagatcacctaccgcgaactctacgaccaggtctgccgcctcgccaatgtgatgaagtccaatggcgtcaagaagggtgatcgggtcaccatctacatgccgatgattccggaagccgcctatgcaatgctcgcctgcacgaggatcggtgcaatccactcgatcgtttttggcggattttcccccgatgcgcttgccggccgaatcagcgactgcgaatcaacattcgtgatcacggccgatgaaggtttgcgcggcggcaagaagatcccgctcaagcacaacacggatcttgcgattgaaattgccgcgcgtgatggggtggtggtcaagaatgtgctcgtcgtgcaacgcacagctggcaaggttgaatggttcgaaaatcgtgatatctggtatcacgaggcggttgccgcggcgaaaccggattgcccgccggccaagatgaaggctgaggatccgctgtttatcctctacacctcgggttcgaccggcaagcctaagggcgtgctgcacaccaccggcggctatctggtctatgcctcgatgacccatgagtatgtcttcgactatcatgagggggacatctactggtgcacggcggatgtgggctgggtgaccggccactcctacatcgtctacgggccgctcgccaatggtgcgaccacgctgatgtttgaaggcgtgccgaattatccgtcgccaagccggttctgggatgtggtcgacaagcaccaggtcaatatcttctacaccgcgcccaccgccatccgggcgctgatgggtgcgggtgatgctcacgtcaagaaatcctcgcgcaaatcactgcggacactgggttcggtgggtgagccgatcaacccggaagcctgggaatggtattacaatgtggtgggcgagaagaagtgcccgattgtcgatacctggtggcagacggagaccggagggatcctgatcacacccttgcctggagcgaccaaactcaagccgggctcggcaacgcggccgttttttggcgtgcagccgcaattggtggacaatgacggggatgtgctcgaaggcaccaccgagggcaatctgtgcattaccgattcctggccgggccagatgcggacggtctatggcgatcatgaacgtttcatccagacctatttctccacatacaaaggcaagtatttcaccggtgacggctgccgcagggatgaggacgggtactactggatcaccggccgggtcgacgatgtgatcaatgtgtccggtcaccgcatgggcacggcggaagtggaaagcgcactggtttcccatgattccgtgtcggaggcggcggtcgtcggttatccgcatgatgtcaaggggcagggcatctactgctacatcaccttgatggagggtcaggaaggcagtgacgagttgcgcaaggcgctggtcggtcatgttcgccatgaaatcggcccgattgcctcgcctgacaagatccagttctcgccgggtctgccgaagacgcggtcaggcaagatcatgcgccggatcctgcgcaagattgccgaggatgattttggcgcattgggtgacacttcgaccctggcggatcccggtgtggtcgatgatctgattgagaaccggcagaacaagaagggctga

SEQ ID NO: 151667 - protein, 650 aa, Hoeflea phototrophica DFL-43
MSQKSYKVLKDAKTRALIDDETYEKWYKQSVKDPEKFWAKHGKRIDWFKPYTKVKNTNFNGKVSIKWFEDGVTNVSYNCIDRHLKKRGDQVAIIWEGDNPYDDKKITYRELYDQVCRLANVMKSNGVKKGDRVTIYMPMIPEAAYAMLACTRIGAIHSIVFGGFSPDALAGRISDCESTFVITADEGLRGGKKIPLKHNTDLAIEIAARDGVVVKNVLVVQRTAGKVEWFENRDIWYHEAVAAAKPDCPPAKMKAEDPLFILYTSGSTGKPKGVLHTTGGYLVYASMTHEYVFDYHEGDIYWCTADVGWVTGHSYIVYGPLANGATTLMFEGVPNYPSPSRFWDVVDKHQVNIFYTAPTAIRALMGAGDAHVKKSSRKSLRTLGSVGEPINPEAWEWYYNVVGEKKCPIVDTWWQTETGGILITPLPGATKLKPGSATRPFFGVQPQLVDNDGDVLEGTTEGNLCITDSWPGQMRTVYGDHERFIQTYFSTYKGKYFTGDGCRRDEDGYYWITGRVDDVINVSGHRMGTAEVESALVSHDSVSEAAVVGYPHDVKGQGIYCYITLMEGQEGSDELRKALVGHVRHEIGPIASPDKIQFSPGLPKTRSGKIMRRILRKIAEDDFGALGDTSTLADPGVVDDLIENRQNKKG

SEQ ID NO: 151668 - DNA, 1944 bp, alpha proteobacterium BAL199
  CDS (1)..(1944): transl_table=11
atgtccgacgaagtgatcttcgacgttcccgcggcaatcgccaaggcggcgcacatcgacgcggcggcgtaccaggagatgtacgaacactcgattgccaatccggaggccttctgggcccagcagggcaagcggatcgactggatcaagccgtacaccaaggtcaaggacacctcgtttgacgagaaggatctccacatacgctggttcgaggacggcacgctgaacgcatcggccaactgtctcgaccggcatctggccgagcgcggcgaccaaaccgccatcctctgggaaggcgacgatccgtccgagtgcaaggcgatcacctaccgtcaactgcacgccgaggtctgcaagctcgctaacgccctgaagaacctgggggtcaagcagggcgaccgggtgacgatctacatgccgatgattcccgaggcgacggcggccatgctggcctgcgcccggatcggcgccatccattcggtggtgttcggtggattctcgccggacagtctcgccaaccggttacaggactgcgacagctcgatcctgatcaccgccgacgagggcctgcggggcggtcgcaaggtgccgctgaagaagaacgccgacctggcgatggagcacagcccgtcgtgcaagacctgcgtggtggtgcgccgtaccggcggtgccgtggacatgaccgccgggcgcgaccactggtaccacgacctgctggcgacggcgtcggccgactgcccgccgaccgagatgaacgccgaggatccactgttcatcctctacacctcgggttcgaccggcaagccgaagggggttctgcacaccaccggcggctatatggtctacgcctcgatgacccacgagtacgtgttcgactacaagccaggcgaggtctactggtgcaccgccgatgtcggctgggtcaccggtcacagctacatcgtctacggcccgctggcgaacggcgcgacatccgtaatgttcgaaggcgtgccgaactacccggattccagccggttctggcaggtcgtcgacaagcacaaggtcaacatcttctacactgcgccgaccgcgatccgggccctgatgcgcgaaggcgatgggccggtgaagaagacgtcgcgccagtcgctgcgcctgttgggttcggttggcgagccgatcaaccctgaagcctggcagtggtatcaccgggtcgtcggcgatgagcgttgcccgatcgtcgatacttggtggcagaccgaaaccggcggaatcatgatcacgccgctgccgggcgcgatcccattgaagccggggtcggcgaccctgccgttcttcgggatcaagccagtgctggtcgataacgacggcaaggtcatggagggacccgccgacggcaatttgtgcatcgccgatagctggccgggcctgatgcgcacggtctacggcgatcacgagcggttcttccagacctatttcgcgaccttccgggggatgtactttaccggcgacggctgccggcgcgacgaccacggctactactggatcaccggtcgggtcgacgacgtgatcaacgtgtccggccaccgcatgggcaccgccgaggtcgagagctcgctggtcgcccacgccaaggtcgccgaggcggcggtggtcggctatccgcacgacatcaaaggccagggcatctacgcgtatgtgacgctgaacgccggcgagaccccgaccgaggagctgcgcaaggaactggtgcagtgggtccgcaaggacatcggcccgatcgcgtcaccggacctgatccagtgggcgcccggtctgccgaaaacccggtcgggcaagatcatgcgccgcatcctgcgcaagatcgctgccaatgagcatgaccagctcggcgacatctcgaccctggccgacccggccgtggtcgaggatctggtgcagcagcggatgaaccggagatag

SEQ ID NO: 151669 - protein, 647 aa, alpha proteobacterium BAL199
MSDEVIFDVPAAIAKAAHIDAAAYQEMYEHSIANPEAFWAQQGKRIDWIKPYTKVKDTSFDEKDLHIRWFEDGTLNASANCLDRHLAERGDQTAILWEGDDPSECKAITYRQLHAEVCKLANALKNLGVKQGDRVTIYMPMIPEATAAMLACARIGAIHSVVFGGFSPDSLANRLQDCDSSILITADEGLRGGRKVPLKKNADLAMEHSPSCKTCVVVRRTGGAVDMTAGRDHWYHDLLATASADCPPTEMNAEDPLFILYTSGSTGKPKGVLHTTGGYMVYASMTHEYVFDYKPGEVYWCTADVGWVTGHSYIVYGPLANGATSVMFEGVPNYPDSSRFWQVVDKHKVNIFYTAPTAIRALMREGDGPVKKTSRQSLRLLGSVGEPINPEAWQWYHRVVGDERCPIVDTWWQTETGGIMITPLPGAIPLKPGSATLPFFGIKPVLVDNDGKVMEGPADGNLCIADSWPGLMRTVYGDHERFFQTYFATFRGMYFTGDGCRRDDHGYYWITGRVDDVINVSGHRMGTAEVESSLVAHAKVAEAAVVGYPHDIKGQGIYAYVTLNAGETPTEELRKELVQWVRKDIGPIASPDLIQWAPGLPKTRSGKIMRRILRKIAANEHDQLGDISTLADPAVVEDLVQQRMNRR

SEQ ID NO: 151670 - DNA, 1956 bp, Verrucomicrobium spinosum DSM 4136
  CDS (1)..(1956): transl_table=11
atgagcaccgactttaaatctgtccttgtcgaaaaccgtgtctttgaaccctctgaagaattcaagagcaaagcgcggatcagcagcatggaggagtaccagaagctgtggaaggagtctgtggaccaacccgatgttttttgggcgcgtgaagcctccgacctgcagtggcagcagccttgggaaaaggtgctcgactggcaggccccctacgccaagtggttcgtcggagccaaagtaaacgtcaccgaaaactgtgtggaccgccacgtggccaatggccgcaaggacaaggtcgccatcctctgggagggtgagcccggcgactcccgcagcatcacctatggcgagctccaggtggaagtgaacaagtttgccaacgtgttgaaaagccgtggcatcaaggcgggtgaccgtgtgctcatctacatgcccatggtgccagaggcagccatcgccatgctggcctgcgcccgcatcggggccgtgcacagcgtcgtcttcggcggtttcagttccgagagcatcaaggaccgccttcaggacagcggcgcgacctccatcatcacggccgacggcggctatcgtcgtggcaaagtagtggccttgaaggccaatgtggatgtggccctcgccgggaacaccaccgtgcaatccgtgatcgtcctccagcggacgaagcacgacattgccatgcaggatggccgtgatgtgtggtggcacgatgaagtcaccaaggtggatgacaactgccctgcagaaggtttcgacgccgagcacccgctgtttatcctctacaccagcggttccaccgggaagcccaaaggcatcctccacaccagtggtggttacctggtgggtacctacctgacctgcaagtacatcttcgacctgcgcgaagacgacatctactggtgcactgcggacgtgggctggatcaccggccacagctacatcgtgtacggccccctggccaatggagccacggtgctgatgtacgaaggcgcccccgacactccacaccagggtcgcttctgggagatcatcgaaaagtacaaggccaccatcctctacaccgctcccacggccatccgtgccttcatcaagtggggcgatgaatgggtgaagaagcacgatctgagcagcctgcgtcttctgggcagcgtgggtgagcccatcaaccccgaggcctggatgtggtatcatgagatgatcggcggcggccgctgcccgatcgtggacacctggtggcagacggaaacgggcagcatcctcatcagcccgctcccgggtgtgacgcctaccaagccgggcacggccaccctgccgttcttcggtgtggatgcggcgattctggatgaagaaggcgtggaagtgggccccaatgagggcggcaagttggtcatccgcaagccctggccctccatgctgcgcaccatctatggcgatgccgagcgctacgagtccacctactggggcacctatgagggcatctacctcgctggcgacggcgcccgtcgtgatgaagacggctatttctggatcgtaggtcgcctggacgacgtgctgaacgtctctggtcaccgcctcggcaccgccgaagtggaaagcgccctcgtgagccacgaatcggtcgctgagagcgccgtggtgggccgccccgacgagatcaagggccaggccgtggtggccttcgtcaccgtaaagaccggcgtggaagcgaccgacgccctcgccgccgagctcaagaagcacgtcagcaacgtgatcggtgccatcgctcgcccggatgatatccgattcgccgccgcgctgccgaagacccgctccggcaagatcatgcgccgtctcctcaaagaaatctgcgctggtggtcaggtgaaaggtgacaccaccaccctggaagatctgaacgtcgtggccgcgctgcaagccagcggcaaagacgaagactga

SEQ ID NO: 151671 - protein, 651 aa, Verrucomicrobium spinosum DSM 4136
MSTDFKSVLVENRVFEPSEEFKSKARISSMEEYQKLWKESVDQPDVFWAREASDLQWQQPWEKVLDWQAPYAKWFVGAKVNVTENCVDRHVANGRKDKVAILWEGEPGDSRSITYGELQVEVNKFANVLKSRGIKAGDRVLIYMPMVPEAAIAMLACARIGAVHSVVFGGFSSESIKDRLQDSGATSIITADGGYRRGKVVALKANVDVALAGNTTVQSVIVLQRTKHDIAMQDGRDVWWHDEVTKVDDNCPAEGFDAEHPLFILYTSGSTGKPKGILHTSGGYLVGTYLTCKYIFDLREDDIYWCTADVGWITGHSYIVYGPLANGATVLMYEGAPDTPHQGRFWEIIEKYKATILYTAPTAIRAFIKWGDEWVKKHDLSSLRLLGSVGEPINPEAWMWYHEMIGGGRCPIVDTWWQTETGSILISPLPGVTPTKPGTATLPFFGVDAAILDEEGVEVGPNEGGKLVIRKPWPSMLRTIYGDAERYESTYWGTYEGIYLAGDGARRDEDGYFWIVGRLDDVLNVSGHRLGTAEVESALVSHESVAESAVVGRPDEIKGQAVVAFVTVKTGVEATDALAAELKKHVSNVIGAIARPDDIRFAAALPKTRSGKIMRRLLKEICAGGQVKGDTTTLEDLNVVAALQASGKDED

SEQ ID NO: 151672 - DNA, 1956 bp, Providencia stuartii ATCC 25827
  CDS (1)..(1956): transl_table=11
atgactcaaataactaagcatcccgttactgctgaaattgcagaaaatgccctgataaacgagcaacagtacaacaatgagtatcaactctctattcaagaccctgaaacgttttggggggagaaaggaaaggttgttgattggattaagccgtatacccgagtaaaaaacacctccttcgatcctggccatatcagcattcgctggtttgaagatggcacccttaacttaagcgctaactgtttagatcgtcatctggcagataagggcgatcaaaccgcaatcatatgggaaggtgatgacccttctcaatcaaaaaatgtcacttaccgtgaactgcatcatgatgttagtcagttcgctaacgtattaaaacaacatggtattcgtaaaggcgatgttgtcgcgatttacatgccaatggtggttgaagctgccgtcgcaatgttagcttgtgctcgcattggggcgattcatactgttatctttgctggcttctctccagaagcggtatcgggtcgtgttatcgactgtaaagcaaaactgattattacagccgatgaaggcctacgtgctggccgctcaatacctctcaagaaaaacgttgatgacgcattaaccaatgccaatgtcaccaccgttaagaatgtcattgtctaccgtcgtactgggaatgttccaagctgggtagaagggcgtgacttatggtggcatgatgtgattgatggcgtcagcgccgactgcccacctgaagaaatgaacgcagaagacccattattcattctgtatacttcaggctcaacaggtaaaccaaaaggtgtactgcatactactggcggttatttagtctatgcaacactcacctttaaatatactttcgactaccatcccggtgaagtgtattggtgtactgccgatgttggctgggtaacgggtcacagctatttgttatatggccctctatctaatggtgccaagacattgatgtttgaaggcgtgcctaactaccctgcggtcaatcgcatgagccaagtggtcgataagcaccaagttaatatcctgtataccgcgccgactgctatccgcgccctaatggctgaaggtgataaagccattgaaggcaccaaccgtagctcgttgcgtatcctaggatccgttggtgaacctatcaaccctgaagcatgggaatggttctataagaagattggtgatagtcgttgcccaattgttgatacatggtggcaaacagaaactggcggctttatgatcactccgctaccgggagcgaccatgctaaaaccaggctcagcaacgttacctttcttcggggttcgtcctgctcttgttgataatcttggggaaccattagaaggtgcaacagagggtaacctcgtcattgttgactcatggcctggtcaagcacgtaccttatttggtgaccacgagcgttttgagcaaacctacttttctacttttaaaggtatgtatttcagtggcgatggtgctcgccgcgatgaagatggctatttctggatcacgggccgtgttgatgatgtattaaatatttccggtcaccgcctaggtactgctgaaattgaatctgcattagttgcacacccaaaaattgcagaagcagccgttgttggtattcctcataatattaaggggcaagctatctatgcttatgtcaccttaatttcgggggaagagccttcacctgagctatataccgaagttcgtaattgggttcgaaaagaaatcggtccaattgcaacacctgatgttctacactggacggactctttacctaaaacccgctccggtaagatcatgcgccgtatcctacgtaaaattgcctcaggagatactagtaacttaggagatacttccacactggcagatcctggcgttgtcgaaaaactactcgaagaaaaacaatcaatgagtatgtcataa

SEQ ID NO: 151673 - protein, 651 aa, Providencia stuartii ATCC 25827
MTQITKHPVTAEIAENALINEQQYNNEYQLSIQDPETFWGEKGKVVDWIKPYTRVKNTSFDPGHISIRWFEDGTLNLSANCLDRHLADKGDQTAIIWEGDDPSQSKNVTYRELHHDVSQFANVLKQHGIRKGDVVAIYMPMVVEAAVAMLACARIGAIHTVIFAGFSPEAVSGRVIDCKAKLIITADEGLRAGRSIPLKKNVDDALTNANVTTVKNVIVYRRTGNVPSWVEGRDLWWHDVIDGVSADCPPEEMNAEDPLFILYTSGSTGKPKGVLHTTGGYLVYATLTFKYTFDYHPGEVYWCTADVGWVTGHSYLLYGPLSNGAKTLMFEGVPNYPAVNRMSQVVDKHQVNILYTAPTAIRALMAEGDKAIEGTNRSSLRILGSVGEPINPEAWEWFYKKIGDSRCPIVDTWWQTETGGFMITPLPGATMLKPGSATLPFFGVRPALVDNLGEPLEGATEGNLVIVDSWPGQARTLFGDHERFEQTYFSTFKGMYFSGDGARRDEDGYFWITGRVDDVLNISGHRLGTAEIESALVAHPKIAEAAVVGIPHNIKGQAIYAYVTLISGEEPSPELYTEVRNWVRKEIGPIATPDVLHWTDSLPKTRSGKIMRRILRKIASGDTSNLGDTSTLADPGVVEKLLEEKQSMSMS

SEQ ID NO: 151674 - DNA, 1959 bp, Shigella dysenteriae 1012
  CDS (1)..(1959): transl_table=11
atgagccaaattcacaaacacaccattcctgccaacatcgcagaccgttgcctgataaaccctcagcagtacgaggcgatgtatcaacaatctattaacgtacctgataccttttggggcgaacagggaaaaattcttgactggatcaaaccttaccagaaggtgaaaaacacctcctttgcccccggtaatgtgtccattaaatggtacgaggacggcacgctgaatctggcggcaaactgccttgaccgccatctgcaagaaaacggcgatcgtaccgccatcatctgggaaggcgacgacgccagccagagcaaacatatcagctataaagagctgcaccgcgacgtctgccgcttcgccaataccctgctcgagctgggcattaaaaaaggtgatgtggtggcgatttatatgccgatggtgccggaagccgcggttgcgatgctggcctgcgcccgcattggcgcggtgcattcggtgattttcggcggcttctcgtcggaagccgttgccgggcgcattattgattccaactcacgactggtgatcacttccgacgaaggtgtgcgtgccgggcgtagtattccgctgaagaaaaacgttgatgacgcactaaaaaacccgaacgtcaccagcgtagagcatgtgatggtactgaagcgtactggcggaaacatcgactggcaggaagggcgcgacctgtggtggcacgacctggttgagcaagccagcgatcagcaccaggcggaagagatgaacgccgaagatccgctgtttattctctatacctccggttctaccggaaaaccaaaaggcgtactgcacactaccggcggttatctggtgtacgcggcgctgacctttaaatatgtctttgattatcatccgggcgatatctactggtgcaccgccgatgtgggctgggtgaccggacacagttatttgctgtacggcccgctggcctgcggcgcgaccacgctgatgtttgaaggcgtacccaactggccgacgcctgcccgtatggcgcaggtggtggacaagcatcaggtcaatattctctataccgcacccacggcgatccgcgcgctgatggcggaaggcgataaagcgattgaaggcaccgaccgttcgtcgctacgcattctcggttccgtgggcgagccaattaacccggaagcgtgggagtggtactggaaaaaaatcggcaacgagaaatgtccggtggtcgatacctggtggcagaccgaaactggcggtttcatgatcacgccgctgcctggcgctaccgagctgaaagccggttcggcaacacgtccgttcttcggcgtgcaaccggcgctggtcgataacgaaggtaacccgctggaaggcgctaccgaaggcagcctggtgatcaccgactcctggccgggtcaggcgcgtacgctgtttggcgatcacgaacgttttgaacagacctacttctccaccttcaaaaatatgtatttcagcggcgacggcgcgcgtcgcgatgaagatggctattactggataaccggacgcgtggacgacgtgctgaacgtctctggtcaccgtctggggacggcggagatagagtcggcgctggtggcgcatccgaagattgccgaagccgccgtagtaggtattccgcacaatattaaaggtcaggcgatctacgcctacgtcacgcttaatcacggggaggaaccatcaccagaactgtacgcagaagtccgcaactgggtgcgtaaagagattggcccgctggcgacgccagacgtgctgcactggaccgactccctgcctaaaacccgctccggcaaaattatgcgccgtattctgcgcaaaattgcggcgggcgataccagcaacctgggcgatacctcgacgcttgccgatcctggcgtagtcgagaagctgcttgaagagaagcaggctatcgcgatgccatcgtaa

SEQ ID NO: 151675 - protein, 652 aa, Shigella dysenteriae 1012
MSQIHKHTIPANIADRCLINPQQYEAMYQQSINVPDTFWGEQGKILDWIKPYQKVKNTSFAPGNVSIKWYEDGTLNLAANCLDRHLQENGDRTAIIWEGDDASQSKHISYKELHRDVCRFANTLLELGIKKGDVVAIYMPMVPEAAVAMLACARIGAVHSVIFGGFSSEAVAGRIIDSNSRLVITSDEGVRAGRSIPLKKNVDDALKNPNVTSVEHVMVLKRTGGNIDWQEGRDLWWHDLVEQASDQHQAEEMNAEDPLFILYTSGSTGKPKGVLHTTGGYLVYAALTFKYVFDYHPGDIYWCTADVGWVTGHSYLLYGPLACGATTLMFEGVPNWPTPARMAQVVDKHQVNILYTAPTAIRALMAEGDKAIEGTDRSSLRILGSVGEPINPEAWEWYWKKIGNEKCPVVDTWWQTETGGFMITPLPGATELKAGSATRPFFGVQPALVDNEGNPLEGATEGSLVITDSWPGQARTLFGDHERFEQTYFSTFKNMYFSGDGARRDEDGYYWITGRVDDVLNVSGHRLGTAEIESALVAHPKIAEAAVVGIPHNIKGQAIYAYVTLNHGEEPSPELYAEVRNWVRKEIGPLATPDVLHWTDSLPKTRSGKIMRRILRKIAAGDTSNLGDTSTLADPGVVEKLLEEKQAIAMPS

SEQ ID NO: 151676 - DNA, 1974 bp, Dethiobacter alkaliphilus AHT 1
  CDS (1)..(1974): transl_table=11
atgactgaaaaaggaaacgaaacaattgttgaacaaggaaatgcatatgcgccaccggagagctttaagcaaaacgcgcatatcaaaagcatggaagagtaccaaaagatgtaccagagttccatcaacgatcccgatagtttttggtccgatttggcaggtgaactgttggactggttcaagccatgggataaagtggtggatttcgacttcaagaaagcagacatcaaatggttccagggcggaaaactgaatgtctcctataactgcttagaccgtcacctcacaacctggcgtaagaacaaagctgccattatctgggaaggcgacgctcccggtgaaagccggacttatacgtatcatgaactgtaccgggaagtaaaccgctttgccaatgtgctgaagaaaaaaggtgttaaaagaggcgatcgcgtagcgctttacatgcccatgattccccaattggccatttctatgctggcctgcacccgcattggtgctattcatagcattgtcttcggcggattcagtgcggaagccctgcgtgaccggattaacgacagcgaatgtaagttgctggtcacagctgatgccggcctgcgtggcggaaaaactgttaagctgaaggatattgccgacgaagctctaagtgatgcaccttccgtggaaaacgttattgtatatcgtcgtgcaggtaatgaagtgaatatgaaggatggccgtgacacctggtgggatgatgaagttgcggcgacagatattgaaaaatactgccagcccgaagagatggatgcggaagatcccctgttcattctctacaccagcggtagtaccggaaagcccaaaggggttttgcataccaccggtggctatctgacccatgttgctgccaccaccaaatatatctttgacattaaagacgaagacacctactggtgcaccgccgatatcggctgggttaccggccacagctatattgtgtatggcccccttgccaacggcgcaaccagtgtaatgtttgaaggaattcctaactacccgaacccggatcgtttctgggacgtggtggaaaagtatgaagtcaacattttctataccgcacccacagccatccgtgccatgatgcgtgacggcgatgagtggcccaaccgccatgatttaagcagcctgcgtctgctgggttcagtgggtgagcccatcaacccggaagcctggaaatggtatcatagggtgattggtaaggagcgctgccccattgtggatacctggtggcagacagaaaccggcggcattctcattgcccccattccaggagcagtacccaccaagcccggtgccgcaacgactcccttctttggcgttgacgccgctgtcatccgtcaggacggcagcgaggccgacgtggatgagcccggctacctggtaatccgtagagcctggcccggtatgatgcggactgtttacggcgaccatgaacgcttcttcaacacctacttctcccagtatgaaggttactacttcaccggagacggtgcccgcaaagatgaggacggttatttctggctgatgggccgggtggatgatgttatcaatatctccggtcaccgcctgggaactgccgaagtggaaagcgcactggtggcgcatgacgctgtggctgaagctgcggttgtcggcttcccccatgatattaagggtgaaggtatctactcctacgtaatcctcagagaagggtttaccgccagtgatgaactgcgtaaagaactggtgaagcatgtccgtaaagtaatcggacccattgctacaccggaccatatccaattctcccctgccctgcctaaaaccaggagcgggaaaatcatgcgccgtattttgcgcaagattgcccacggcgaagaggatggtatcggcgatacctccacactggctgaccccagcattgtggataccctggttaaggatcgcgtcagctaa

SEQ ID NO: 151677 - protein, 657 aa, Dethiobacter alkaliphilus AHT 1
MTEKGNETIVEQGNAYAPPESFKQNAHIKSMEEYQKMYQSSINDPDSFWSDLAGELLDWFKPWDKVVDFDFKKADIKWFQGGKLNVSYNCLDRHLTTWRKNKAAIIWEGDAPGESRTYTYHELYREVNRFANVLKKKGVKRGDRVALYMPMIPQLAISMLACTRIGAIHSIVFGGFSAEALRDRINDSECKLLVTADAGLRGGKTVKLKDIADEALSDAPSVENVIVYRRAGNEVNMKDGRDTWWDDEVAATDIEKYCQPEEMDAEDPLFILYTSGSTGKPKGVLHTTGGYLTHVAATTKYIFDIKDEDTYWCTADIGWVTGHSYIVYGPLANGATSVMFEGIPNYPNPDRFWDVVEKYEVNIFYTAPTAIRAMMRDGDEWPNRHDLSSLRLLGSVGEPINPEAWKWYHRVIGKERCPIVDTWWQTETGGILIAPIPGAVPTKPGAATTPFFGVDAAVIRQDGSEADVDEPGYLVIRRAWPGMMRTVYGDHERFFNTYFSQYEGYYFTGDGARKDEDGYFWLMGRVDDVINISGHRLGTAEVESALVAHDAVAEAAVVGFPHDIKGEGIYSYVILREGFTASDELRKELVKHVRKVIGPIATPDHIQFSPALPKTRSGKIMRRILRKIAHGEEDGIGDTSTLADPSIVDTLVKDRVS

SEQ ID NO: 151678 - DNA, 2073 bp, Brucella ceti str. Cudo
  CDS (1)..(2073): transl_table=11
ttggcgctttgcgtcggggccgcttcatccggctggaggaagccgggcaatttgttttgggtgcattatgcaatgccggatggttctatttggctgcaaatgctgaaggaggaaatcatgtcggaaaagctttaccccgtgctgccggaggcaaagaaaaacacgctcatcgacaacgagacttatctcgaatggtatgaggagagcgtgagcgacccggatggcttctgggccaagcacggccggcgtatcgactggttcaagcctttcaccaaggtcaagaacaccgatttcaacggcgatgtaacgatcaagtggtatgaggatggcgtcaccaacgtctcatataattgcatcgaccgccatctgaagagccgcggcgacaaggtcgccatcatctgggaaggcgacaacccctatatcgacaagaagatcacctatcgcgagctttacgagaatgtctgccgcatggcgaatgtgctcaagaagcatggggtgaagaagggcgaccgcgtcacgatctatctgccgatgatcccggaagccgcctatgccatgctcgcctgcgcgcgcatcggcgccgtgcattcggtcgtctttgccggtttctcgccggaggcgctcgctggccgcatcgttgactgcgaatccactttcgtcatcaccgccgatgaaggtgtgcgcggcggcaagcctgttgcgctgaaggaaaacaccgataccgccatcgacatcgccgccaagcaatatgtgatggtcaacaaggtgctggtcgtgcgccgcaccggcggcaaggtaagctggggccgcggccgcgatctgtggtaccatcaggaagtcgcaagcgtcgaaccgcattgcgaaccggaaccgatgaatgcggaagacccgcttttcattctctacacatccggttccaccggcaagccgaagggtgtgctgcataccaccggcggctacctcgtctatgcctcgatgacgcatcaatatgtcttcgattaccatgatggcgagatctactggtgcacggcggatgtgggttgggtaacgggccactcctatatcgtctacggaccgctggccaatggcgcgacaacgctgatgtttgaaggcgtgcccaacttccccgatcagggccgtttctgggaagtcgtcgacaagcaccatgtcaatatcttctacaccgcgccaaccgcgctgcgcgcgcttatgggcgcgggcgatgaattcgtaacccgctcatcgcgttcgacgctgcgcctgctgggctcggtcggcgagccgatcaatccagaggcctgggagtggtattacaatgtcgtgggcgaccagaaatgccccatcgtcgatacctggtggcagacggaaaatggcggcatcctcatcaccccacttcccggcgcgaccgatttgaaacccggttcggcaacacgcccgttcttcggcgtcaagccggtgctggtggacaatgaaggcaatgtgcaggagggcgtagccgacggcaacctgtgcatctccgactcctggccgggccagatgcgcaccgtctatggcgaccacaagcgtttcatcgaaacctacttctccacctataaggggatgtatttttcgggcgatggctgccgccgcgacgaggacggctattactggatcaccggccgcgtcgatgacgtgctgaatatttccggccatcgcctcggcacggcggaaatcgaatcggcacttgtctcgcatcactcggtttcggaagccgccgtggtcggctatccgcacccgatcaagggacagggcatctattgctatgtcacgctgatgaccggcgcagacgcgcaggacccggacgagttgcgcaaggaactggtccagcatgtgcgcaaggaaatcggccccatcgccacaccggacaagatccagtttgcgcccggactgccgaaaacccgttccggcaagatcatgcgccgcatcctgcgcaagatcgccgaagacgagttcggcgcattgggcgacacctcaacgctcgccgatccgggcgtggtggacgacctgatcgaaaatcgccagaacaagaaatga

SEQ ID NO: 151679 - protein, 690 aa, Brucella ceti str. Cudo
MALCVGAASSGWRKPGNLFWVHYAMPDGSIWLQMLKEEIMSEKLYPVLPEAKKNTLIDNETYLEWYEESVSDPDGFWAKHGRRIDWFKPFTKVKNTDFNGDVTIKWYEDGVTNVSYNCIDRHLKSRGDKVAIIWEGDNPYIDKKITYRELYENVCRMANVLKKHGVKKGDRVTIYLPMIPEAAYAMLACARIGAVHSVVFAGFSPEALAGRIVDCESTFVITADEGVRGGKPVALKENTDTAIDIAAKQYVMVNKVLVVRRTGGKVSWGRGRDLWYHQEVASVEPHCEPEPMNAEDPLFILYTSGSTGKPKGVLHTTGGYLVYASMTHQYVFDYHDGEIYWCTADVGWVTGHSYIVYGPLANGATTLMFEGVPNFPDQGRFWEVVDKHHVNIFYTAPTALRALMGAGDEFVTRSSRSTLRLLGSVGEPINPEAWEWYYNVVGDQKCPIVDTWWQTENGGILITPLPGATDLKPGSATRPFFGVKPVLVDNEGNVQEGVADGNLCISDSWPGQMRTVYGDHKRFIETYFSTYKGMYFSGDGCRRDEDGYYWITGRVDDVLNISGHRLGTAEIESALVSHHSVSEAAVVGYPHPIKGQGIYCYVTLMTGADAQDPDELRKELVQHVRKEIGPIATPDKIQFAPGLPKTRSGKIMRRILRKIAEDEFGALGDTSTLADPGVVDDLIENRQNKK

SEQ ID NO: 151680 - DNA, 1959 bp, Acinetobacter sp. ATCC 27244
  CDS (1)..(1959): transl_table=11
atgaaagaaatctacccagtgcctgaaaaatttaaagaaacggcaaggatctcggaagcagactatttcaatcgttatcaatactctattgagcagcctgatgctttttgggcagaagaagcacaaaatattgattggattaaaccttttactcaagtcaaaaatacaaattttgaccccgcgaattttaaaatcgaatggtttgccgatggtgaactaaacgtatcagcaaattgcttagaccgtcatttaaaagataatgcattaaagccagcgatcatttgggaaggtgaccatccttcacgtcacaagatcatctcgtttgctgagttgcatgatgaggtttgtcgttttgcaaatgtattaaagaaacagggtattagcaaaggcgaccgcgttgttttatatatgccaatggtccctgaagcagcaattgcgatgttggcttgtgcccgcattggtgctgtgcattgcgtcgtttttggcggattttcacctgattcactggcaagccgtattgaagacagtcaagcaaaattagtcattactgaggatgctggcatgcgtggtggtaagttaattccattgaaagaaaatgtggatgccgctttagaaattcagggtacggaaagtgtagaacatgtgattgtggttcaccgtacaggcaacccgatccaattcaatgaagcacgtgatttatggtatcacctcgaaatcatggaagttgacgagcattgtccacctgaaccaatgaaggcagaggatccgttatttattctctatacatcaggttcaacaggtaagccgaagggtgtgttacatacaacgggtggttatctggtctatgtcaacaccacatttagagaggtttttgatctcaaagaagatgatgtgtattggtgtacagcagatgttggctggattacaggacacagctatttattgtatggtccactttgtaatgcaaccaccacggtcatgtttgaggggattcctcaatacccaacatgggcgcgtattggtcatgtgattgataagcataatgtcacgattttatatacagcaccaactgccatccgtgccatgatgcgtgagggcgatgcttatgttcgtgagagtgatcgtagtagcttacgtttactcggttcagtcggcgagccaattaaccctgaagcatggaactggtatcacgaagtggttggtgaaggacgctgcccgattgtcgatacatggtggcagacggaaacaggtggtattttgatttcaccgttaccgggtgcaaccgctttaaaaccgggttcggcaacacgtccaatgtttggtgtacaacctgcattggttgatggggaaggtaacccacttgaaggtgcgaatgaagggaacctcgtgatcaaggattcttggccgggtcaaatgcgcactatttggggtgatccacagcgctttattgaagcttatttctcaactttcaagaactgctatttcactggcgatggtgcacgtcgtgatgaagacggatactattggatcacaggtcgtgttgatgatgtacttaatgtttccggacatcgtctagggactgctgaaattgaaagtgcattggttgcccatgaagcggttgcagaagctgctgttgttggtatgccacatgacattaaggggcagggaatttgtacctttgtaaccttacaagcagatgtgtcagagtctgaggagttgcgtaaggagttggttaattgggtacgtaaagttcttgggccagtggcaacgccagatgccttgcattgggcacctgctttaccaaaaacacgctcaggtaaaatcatgcgccgtatcttgagaaagattgcagcaaatgaactagatagcttaggcgatacttcaacgcttgctgagccagcagtggtagatgtgttaatcgcaacggtttacccagaaatgagtagtgcagaaggttaa

SEQ ID NO: 151681 - protein, 652 aa, Acinetobacter sp. ATCC 27244
MKEIYPVPEKFKETARISEADYFNRYQYSIEQPDAFWAEEAQNIDWIKPFTQVKNTNFDPANFKIEWFADGELNVSANCLDRHLKDNALKPAIIWEGDHPSRHKIISFAELHDEVCRFANVLKKQGISKGDRVVLYMPMVPEAAIAMLACARIGAVHCVVFGGFSPDSLASRIEDSQAKLVITEDAGMRGGKLIPLKENVDAALEIQGTESVEHVIVVHRTGNPIQFNEARDLWYHLEIMEVDEHCPPEPMKAEDPLFILYTSGSTGKPKGVLHTTGGYLVYVNTTFREVFDLKEDDVYWCTADVGWITGHSYLLYGPLCNATTTVMFEGIPQYPTWARIGHVIDKHNVTILYTAPTAIRAMMREGDAYVRESDRSSLRLLGSVGEPINPEAWNWYHEVVGEGRCPIVDTWWQTETGGILISPLPGATALKPGSATRPMFGVQPALVDGEGNPLEGANEGNLVIKDSWPGQMRTIWGDPQRFIEAYFSTFKNCYFTGDGARRDEDGYYWITGRVDDVLNVSGHRLGTAEIESALVAHEAVAEAAVVGMPHDIKGQGICTFVTLQADVSESEELRKELVNWVRKVLGPVATPDALHWAPALPKTRSGKIMRRILRKIAANELDSLGDTSTLAEPAVVDVLIATVYPEMSSAEG

SEQ ID NO: 151682 - DNA, 1908 bp, Chryseobacterium gleum ATCC 35910
  CDS (1)..(1908): transl_table=11
atgagaaattacttgatagaagatttaccacaatattttgaagactataaaaaatctatcaaaaacccaaaaaaattctgggataaggtagcggatcagaatttcgtgtggtaccagcgatggagcaaggttgttaagtacgatatgaatgaagccaaaatcacatggtttaaaaatgcaaagctcaacattaccaaaaactgtatcgacaggcatctggcaataagaggagataaaacggctatcatctgggaacccaatgatcctaaagaagaagcacaacacatttcttacaacgaactctatacacgtgtcaataaaacagccaatgtgcttcgtgacatgggtattgaaaaaggagacagagtctgcatttaccttcccatgatccctgagcttgccattaccatgcttgcctgcgccaaactgggtgctgtacattctgttatttttgcaggattctcggcttcagcagtagcttccagagtgaatgactgtgaagcgaaaatggtcattacttctgatggaagttatagaggaaataaagttcttgatcttaaaagcatagtagatgatgcattggaaaagacaccaactgttgaaagtgttcttgtggtaaaaagaacccacaatgaaattaagatgaaggaaggaagagatcattggatggctgatttgtatgaaaaagcatctcctgatttcgtcactgtaatcatggattccgaagatccgctcttcattctatatacttccggatctacaggaaaaccaaaaggaatgcttcatacctgcgccggctatatggtgtacactgcttatacctttaaaaatgtattcaattataaggaaaatgatatttattggtgtactgcggatatcggatggattaccggacattcttatatcctttacggacctttattgaatggagcaacaacagtaattttcgaaggcgttcctacttatcctgaaccggatcgtttctgggaagtgattgaaaagcataagatcactcagttttataccgctcctaccgccatccgttctttagcaaaagagagtgcagaatgggtagataagcatgaccttagttctcttaaagtaatcggttctgtgggtgaacctatcaatgacgaggcatggcattggttcaatgatcacgtcggaagaaaaaaatgcccgattgtagacacctggtggcagaccgaaacaggaggaattatgatttcaccgcttccttttgtgacccccaccaaacctacctatgctacccttccattaccaggtatacagcctgtcctgatggatgataaacgaaatgaaattacaggtaaccaggtaaccggaaatctttgcatccgttttccatggccgggaatcgcaagaactatctggggagaccatcaaagatataaagaaacgtacttcacagcctttccgggcaaatattttaccggagacggtgcattaagagatgaagttggttattacagaattacaggccgtgtagatgatgtgatcattgtttcaggacacaaccttgggactgctcctattgaagacagcatcaaccagcaccctgccgttgcagaatccgctatcgtaggctatcctcacgatatcaaaggaaatgcactgtatggatatgtaatgcttaaagaaaccggggaaagccgtgataaggaaaacctgaaaaaagaaattaaccagctgatttcagatcagatcggcccgattgccaagctggacaagatacagtttgtttccgggcttccgaaaacgcgttccggaaagattatgcgtaggattctgagaaaaattgcagaaggtgatttcagtaatttcggagatatcactactcttttgaatcctgaaattgtagaggaaattaaaaacgaaagaatttaa

SEQ ID NO: 151683 - protein, 635 aa, Chryseobacterium gleum ATCC 35910
MRNYLIEDLPQYFEDYKKSIKNPKKFWDKVADQNFVWYQRWSKVVKYDMNEAKITWFKNAKLNITKNCIDRHLAIRGDKTAIIWEPNDPKEEAQHISYNELYTRVNKTANVLRDMGIEKGDRVCIYLPMIPELAITMLACAKLGAVHSVIFAGFSASAVASRVNDCEAKMVITSDGSYRGNKVLDLKSIVDDALEKTPTVESVLVVKRTHNEIKMKEGRDHWMADLYEKASPDFVTVIMDSEDPLFILYTSGSTGKPKGMLHTCAGYMVYTAYTFKNVFNYKENDIYWCTADIGWITGHSYILYGPLLNGATTVIFEGVPTYPEPDRFWEVIEKHKITQFYTAPTAIRSLAKESAEWVDKHDLSSLKVIGSVGEPINDEAWHWFNDHVGRKKCPIVDTWWQTETGGIMISPLPFVTPTKPTYATLPLPGIQPVLMDDKRNEITGNQVTGNLCIRFPWPGIARTIWGDHQRYKETYFTAFPGKYFTGDGALRDEVGYYRITGRVDDVIIVSGHNLGTAPIEDSINQHPAVAESAIVGYPHDIKGNALYGYVMLKETGESRDKENLKKEINQLISDQIGPIAKLDKIQFVSGLPKTRSGKIMRRILRKIAEGDFSNFGDITTLLNPEIVEEIKNERI

SEQ ID NO: 151684 - DNA, 1953 bp, Sphingobacterium spiritivorum ATCC 33300
  CDS (1)..(1953): transl_table=11
gtgacaaatataattaagtataaaccaaaaaataatatgagtctacaaattaaatcatttgaagaatatcaggatgtctacaaacaaagtgtagaaaatccggaagatttctgggcgggggttgccgaaaatttcttctggaaacgtaaatggacaaatgtactggactggaattttaaggagccaaagattaagtggtttgagggaggaaaggtaaatatcacagaaaactgcctggaccgtcatatttataacctgggagacaaacctgctattatctgggaaccaaatgatccgaatgaagcacaccgaatcctttcatacaagcaattgcttgctaaagtagagcaatttgcgaatgtccttaagaataacaatgtcagcaaaggcgaccgtgtttgtatctatctgcctatggttcctgaattggttattgcggtattagcctgtgcccgtataggtgccattcactctgttgtatttggaggattttcggctcagtctattgcagatcgtattacggatgcacagtgtaaactggtcgttacctctgatggcagtttccgtggaaataaaaccatcgaactgaaaagtattgtggatgacgcactgatgcagtgcaagtctgtagaaaaagtaatcgtactgaccagaacccgcacaccggtatctatgatcaaagggcgtgacgtatggtgggaagatgaaatcaaaaaagtagaaacacagggaaaccctgcttgccctgctgaagaaatggatgcagaggataccttatttatcttatatacctccggatctacaggaaagcctaaaggtgtcgtccatacgacaggtggctatatggtatatgcaggatatacttttgcgaatacgttccagtaccaaccgggagaagtatatttctgtacagcagatatcggttggatcacagggcatacttacatcgtctacggacccttatctcagggagctacttctctgatgttcgaaggtgtgcctacataccctgatgccggcagatactgggatattgtggacaaattcaaagtaaacatcttatacactgctcctacagcaatccgttcgctgatggcattcggagatcagtttgttgacaacaaagacctttcttctattaaaaaactgggatcagtaggtgagccgatcaatgaagaggcctggcactggtttcacgataaaatcggaaaagggaaagctcctatcgcagatacatggtggcagacggaaaacgggggacaccttattgctcctattgccggcatctctcctgcaataccgggatatgccatgttacccttaccgggtgtacagccggtgctggtagacgaaaacggaaatgagatagaaggaaatgatgtttccggaaatttgtgtatcaaatttccttggccgggtatgctgcgtacaacgtggggtgaccatgaaagatgtcgccaaacgtatttctctacttatgaaaacatgtatttcacaggagacggatgttaccgtagtcctgaagggtattacaaaatcacaggtcgtgtcgatgatgtattgaatgtgtcaggacaccgcatcggtacagcagaagtagagaatgccatcaatatgcactctgatgtagtcgagtcagcgattgtgggatacccgcacccggtaaaaggacagggtatttatgcattcgttatcgcaaatcatcatattgacgagaacagtacgcgtcaggatattctgcagaccattacacgtatcatcggagcaattgccaaaccggatattattcagtttgtacctgaacttccgaaaacaagatcaggaaagattatgagacgtatccttcgcaaaattgcagaaggtgaagtatccaatctcggagatatctctacattacaggatcccaacattgtccagacaattgtagaaggagctgaaaaacttaagaaatag

SEQ ID NO: 151685 - protein, 650 aa, Sphingobacterium spiritivorum ATCC 33300
MTNIIKYKPKNNMSLQIKSFEEYQDVYKQSVENPEDFWAGVAENFFWKRKWTNVLDWNFKEPKIKWFEGGKVNITENCLDRHIYNLGDKPAIIWEPNDPNEAHRILSYKQLLAKVEQFANVLKNNNVSKGDRVCIYLPMVPELVIAVLACARIGAIHSVVFGGFSAQSIADRITDAQCKLVVTSDGSFRGNKTIELKSIVDDALMQCKSVEKVIVLTRTRTPVSMIKGRDVWWEDEIKKVETQGNPACPAEEMDAEDTLFILYTSGSTGKPKGVVHTTGGYMVYAGYTFANTFQYQPGEVYFCTADIGWITGHTYIVYGPLSQGATSLMFEGVPTYPDAGRYWDIVDKFKVNILYTAPTAIRSLMAFGDQFVDNKDLSSIKKLGSVGEPINEEAWHWFHDKIGKGKAPIADTWWQTENGGHLIAPIAGISPAIPGYAMLPLPGVQPVLVDENGNEIEGNDVSGNLCIKFPWPGMLRTTWGDHERCRQTYFSTYENMYFTGDGCYRSPEGYYKITGRVDDVLNVSGHRIGTAEVENAINMHSDVVESAIVGYPHPVKGQGIYAFVIANHHIDENSTRQDILQTITRIIGAIAKPDIIQFVPELPKTRSGKIMRRILRKIAEGEVSNLGDISTLQDPNIVQTIVEGAEKLKK

SEQ ID NO: 151686 - DNA, 1959 bp, Citrobacter sp. 30_2
  CDS (1)..(1959): transl_table=11
atgagccaaatacataaacacgctattcccgcaaacattgcggatcgttgcctgataaatccggagcagtacgcagagaaataccagcaatccgttaacgaacccgacacattttggggcgagcaaggaaagattcttgattggatcaagccgtacagccaggtgaagaacacctccttcgcaccaggcaacgtgtctattaaatggtacgaagacggcaccctgaacctggccgcaaactgccttgaccgccatctgcaggcaaacggcgatcgtaccgccattatctgggaaggcgatgacgctacccaaagcaaaaacattacctatcgcgagttgcatcgcgatgtctgccgtttcgccaatacgctactggatttaggcattaaaaaaggtgacgtggtggccatttatatgccgatggtgccagaagctgcggttgccatgctggcctgtgcccgcattggggccgtgcattctgtcatcttcggtggtttctcaccggaagccgtcgccggacgtattatcgactccaattcacgcctggtgatcaccgccgacgaaggcgttcgcgccggacgcgctatcccactgaaaaagaacgtggatgatgcgctgaaaaatccaaacgtaaaaaccgttgaacatgtggtcgtcctcaaacgtaccggtggtaaaacggagtggcaggaaggccgtgacctgtggtggtccgatcttattgagaaagccagctcagaacaccaaccggaagagatgaacgcggaagatccactgtttatcctgtatacctccggttcaaccggcaagccaaaaggcgtgctgcacaccaccggcgggtatctggtctacgctgcaaccacctttaagtacgtgtttgattaccatcagggcgatatctattggtgcaccgctgacgtgggttgggtaaccggacacagctacctgctgtacggcccgctggcctgcggcgcaaccacgctgatgttcgaaggcgtaccaaactggccaacgcctgcgcgtatgtcgcaggttgtggacaagcaccaggtcaatattctgtataccgcaccgaccgccattcgcgcactgatggcagaaggcgacaaagcgattgaaggtactgaccgttcgtcgctgcgtatcctgggttccgttggcgagccgatcaacccggaagcgtgggagtggtactggaagaagatcggcaacgaaaaatgcccggtcgtcgatacctggtggcagaccgaaaccgggggattcatgatcaccccactgccgggcgctaccgagctgaaagccggttctgcaacccgtccgttctttggcgtacagcctgcgattgtcgataacgaaggtaatccgctggaaggcgcgacggaaggtaacctggtgattaccgactcatggccaggccaggcgagaacgctgtttggcgatcacgaacgctttgagcaaacctacttctctaccttcaagaatatgtacttcagcggcgacggcgcgcgccgtgacgaagatggctattactggatcaccggacgtgtggacgatgtgctgaacgtctctggccaccgtctgggaacggctgaaatcgaatcagcgctggtgtcgcatccgaagattgccgaagccgcggtggtgggaattccgcataatattaaaggccaggcgatctacgcctacgtcacgctgaatcacggtgaagagccgtcacctgagttgtacgccgaggttcgcaactgggtgcgtaaagaaattggcccgctggcaacgccagacgtgctgcactggaccgactcactgccgaaaacccgctccggcaaaatcatgcgccgcatcctgcgcaaaattgcggcgggcgataccagcaatctgggcgatacctcgaccctcgccgatcctggcgtcgtggagaaactgctcgaagagaagcaggccatcgcgatgccatcataa

SEQ ID NO: 151687 - protein, 652 aa, Citrobacter sp. 30_2
MSQIHKHAIPANIADRCLINPEQYAEKYQQSVNEPDTFWGEQGKILDWIKPYSQVKNTSFAPGNVSIKWYEDGTLNLAANCLDRHLQANGDRTAIIWEGDDATQSKNITYRELHRDVCRFANTLLDLGIKKGDVVAIYMPMVPEAAVAMLACARIGAVHSVIFGGFSPEAVAGRIIDSNSRLVITADEGVRAGRAIPLKKNVDDALKNPNVKTVEHVVVLKRTGGKTEWQEGRDLWWSDLIEKASSEHQPEEMNAEDPLFILYTSGSTGKPKGVLHTTGGYLVYAATTFKYVFDYHQGDIYWCTADVGWVTGHSYLLYGPLACGATTLMFEGVPNWPTPARMSQVVDKHQVNILYTAPTAIRALMAEGDKAIEGTDRSSLRILGSVGEPINPEAWEWYWKKIGNEKCPVVDTWWQTETGGFMITPLPGATELKAGSATRPFFGVQPAIVDNEGNPLEGATEGNLVITDSWPGQARTLFGDHERFEQTYFSTFKNMYFSGDGARRDEDGYYWITGRVDDVLNVSGHRLGTAEIESALVSHPKIAEAAVVGIPHNIKGQAIYAYVTLNHGEEPSPELYAEVRNWVRKEIGPLATPDVLHWTDSLPKTRSGKIMRRILRKIAAGDTSNLGDTSTLADPGVVEKLLEEKQAIAMPS

SEQ ID NO: 151688 - DNA, 1959 bp, Yersinia rohdei ATCC 43380
  CDS (1)..(1959): transl_table=11
atgagccaaatacataaacaccctattcccgctgcaattgcagagcatgccctgatcaatccagaacaatatcaccaatattatcaacagtctgtgcaggatccggataaattttggggcgagcatggcaagattattgattggattaagccgtataaaacggtgaaaaatacctcttttgaccccggccatgtaagtattcgctggtttgaagatggcacactgaatcttgcagccaactgccttgaccgccatctggcagaacgcggtgatcaaactgcgattatctgggaaggcgatgacccgactcagtccaaaactgtgacctacaaacagcttcatcatgatgtatgccagttcgccaatgtgctgaaaaaactgggtattaagaaaggcgatgtggttgcgatttatatgccaatggtgccagaagctgccgtcgcgatgttagcttgtgcgcgtattggtgcggttcactcagtgatttttggtggcttctctcctgacgccgtagctggccgcattatcgactctaactcaaaactggtgattactgccgatgaaggcattcgtgctggtcgtgcaattccactgaaaaaaaatgtcgatgaagccctgaaaaatcctgctattaccagcatcaaaaatgttgtggttttccaacggactggtaatgccagttattggaaagatggacgagacttatggtggcatgacttagttaaagatgcctcttccgactgccccccggaagaaatgaatgcagaagatcccttattcatcctttatacctccggctccaccggtaaacccaaaggcgtggtgcataccaccggcggctatttggtttatgccgcgctgacctttaaatacgtgtttgattaccacccaggtgatatctactggtgcaccgcggatgtcggctgggttaccgggcacagttatctgctgtatggtccactggcttgtggggcaattaccctgatgtttgaaggtgtacctaactaccctggcgtcaatcgtttaggtcaggttattgataagcatcaggttaatattttgtataccgcaccgacggctatccgcgccttaatggccgagggtgataaagccatcgaaggcaccaaacgcacttcgctgcgcctcatggggtcggtcggtgaacctatcaacccagaagcttgggaatggtattacaacaaaatcggcaacagtaactgcccaattgttgatacttggtggcaaaccgaaactggcggtttcatgataaccccgctgcccggcgcaactgaactgaaagccggttctgccactcgcccattcttcggcgtgcaaccagcattagtagacaacttgggtaacccacaagaaggtatggccgaaggtaatttggtgataaccgactcgtggccaggccaggccagaacactgtttggtgatcacgaccgctttgagcaaacttacttttcgactttcaaaggcatgtatttcagtggtgatggcgcacgccgtgacgaagatggctactactggataactggccgagttgatgatgtgctgaacgtttccggtcatcgcttgggcacagctgaaatcgagtctgcgctggtatctcatccaaaaattgctgaagccgcagtagttggggttccacacaatatcaaagggcaggcaatttatgcctatatcaccttgaatcatggtgaagagccaacaccagagctgtataccgaggtgcgtaattgggtacgcaaagaaattggccccatcgcaacaccggatattttgcactggacggattcactaccaaaaacccgctcgggcaaaatcatgcgccggatcctacgtaaaattgccgctggcgataccagcaacttaggggatacctcaacccttgccgatccgggtgtcgtagacaaattactggaagaaaaacaatcaatgcaagcaccgtcgtaa

SEQ ID NO: 151689 - protein, 652 aa, Yersinia rohdei ATCC 43380
MSQIHKHPIPAAIAEHALINPEQYHQYYQQSVQDPDKFWGEHGKIIDWIKPYKTVKNTSFDPGHVSIRWFEDGTLNLAANCLDRHLAERGDQTAIIWEGDDPTQSKTVTYKQLHHDVCQFANVLKKLGIKKGDVVAIYMPMVPEAAVAMLACARIGAVHSVIFGGFSPDAVAGRIIDSNSKLVITADEGIRAGRAIPLKKNVDEALKNPAITSIKNVVVFQRTGNASYWKDGRDLWWHDLVKDASSDCPPEEMNAEDPLFILYTSGSTGKPKGVVHTTGGYLVYAALTFKYVFDYHPGDIYWCTADVGWVTGHSYLLYGPLACGAITLMFEGVPNYPGVNRLGQVIDKHQVNILYTAPTAIRALMAEGDKAIEGTKRTSLRLMGSVGEPINPEAWEWYYNKIGNSNCPIVDTWWQTETGGFMITPLPGATELKAGSATRPFFGVQPALVDNLGNPQEGMAEGNLVITDSWPGQARTLFGDHDRFEQTYFSTFKGMYFSGDGARRDEDGYYWITGRVDDVLNVSGHRLGTAEIESALVSHPKIAEAAVVGVPHNIKGQAIYAYITLNHGEEPTPELYTEVRNWVRKEIGPIATPDILHWTDSLPKTRSGKIMRRILRKIAAGDTSNLGDTSTLADPGVVDKLLEEKQSMQAPS

SEQ ID NO: 151690 - DNA, 1947 bp, Alteromonas macleodii ATCC 27126
  CDS (1)..(1947): transl_table=11
atgaccgccagcaaaacttatcctgtgcctgagaacattcttcagtctacacatttaaccgcatctcaatatgatgagatgtataagcaatctgtagagcaacctgaagcgttctgggctgagcacgcatccatgcttgagtggtatcaaaagcccaccaaaattaaaaacacaatgtttggtgaaaacgatgtgtctattaagtggtttgaagatggtgaattaaatgccagctataactgtattgatcgccatttagctgataatgccacaaaagtcgcctttcactgggaaggtgactcaccagaagatagccaagatatcacgtatcaacaagtgcactatgaagtttgtaaattagcgaatgcacttaaagaaatgggcgtagcaaaaggtgatcgtgttgcgatttacatgccgatggtacctgaggctgcctacgccatgctagcgtgtgcccgaattggtgcagtacattcggtgattttcggtggattttcacctaacgctattgccgatcgtatcaatgacagcaacgccaaagtcgtgattactgctgatgaaggccgtcgtgctggaagaagtattccactgaaagcgaatgtggataaagcactgtctggtgatgcgtgtccgtctattactcatgttttagttcataagctcacaggaggagaagtagactggaatgctaagcacgatgtgtggtggcatgacgctgttgatggcgtgtcagcgcagtgtgaaccagaggtaatgaacgcggaagacccactgtttatcctttatacatcaggctctactggaacgccaaaaggtgtagtacacaccacgggcgggtatctcttatattctgcgatgacctttaaatatgcctttgactacaaagaagacgatgtttattggtgtaccgctgatgtaggctggatcacaggccacagctacatggtttatggccctatggtgaacgccgcatcacaagtgttctttgagggtgtaccaacctatccagacgttaagcgtattgctcaggtagtggaaaaatacaaagtaaatagtttatataccgcgccaactgctatccgcgcattaatggcccacggagatgttccagctgaagggtgtgatgtctcatcgcttcgtctgttaggaacagtaggtgaacctattaatcctgaagcatgggaatggtaccaccgcgtaattggtatgagccgttgtccaatcatcgatacatggtggcagacagaaacaggtggacacatgatcctgcctttacctggcgctacggagttgaagcctggctcagcgacccgtccattcttcggcattcagcctgcgctatttgatgctgacggtaatgagcttgaaggggcagcagaaggtaatcttgttattaaagacagctggcctagccaagctcgaacggtttatggcgatcatcagcgctttattaacacctactttagcgcgtacaaaggtgtgtacttcaccggtgacggtgctcgttgcgacgaagatggcttctactggatcaccggtcgtgtagatgacgtgctaaacgtttctggacaccgtttgggcaccgctgaaatcgaaagtgcacttgttgcccatcctaaagtggctgaggctgccgttgttggcttcccacatgatatcaaagggcagggtatctacgtttacgtaacgccaaatgaaggggttgaagcagatgaagcccttactaaagagcttaaggcgtgggtgcgtcaagagctaagcccgattgctacacctgatatgatccaatggtctcgcggattacctaaaacccgctctggtaaaattatgcgccgtattttgcgtaagattgccgccaatgagcatgagcaattaggtgacacatctacgttggcggatccatcggttgttgatacactgatagaggaacgtctaaataagtag

SEQ ID NO: 151691 - protein, 648 aa, Alteromonas macleodii ATCC 27126
MTASKTYPVPENILQSTHLTASQYDEMYKQSVEQPEAFWAEHASMLEWYQKPTKIKNTMFGENDVSIKWFEDGELNASYNCIDRHLADNATKVAFHWEGDSPEDSQDITYQQVHYEVCKLANALKEMGVAKGDRVAIYMPMVPEAAYAMLACARIGAVHSVIFGGFSPNAIADRINDSNAKVVITADEGRRAGRSIPLKANVDKALSGDACPSITHVLVHKLTGGEVDWNAKHDVWWHDAVDGVSAQCEPEVMNAEDPLFILYTSGSTGTPKGVVHTTGGYLLYSAMTFKYAFDYKEDDVYWCTADVGWITGHSYMVYGPMVNAASQVFFEGVPTYPDVKRIAQVVEKYKVNSLYTAPTAIRALMAHGDVPAEGCDVSSLRLLGTVGEPINPEAWEWYHRVIGMSRCPIIDTWWQTETGGHMILPLPGATELKPGSATRPFFGIQPALFDADGNELEGAAEGNLVIKDSWPSQARTVYGDHQRFINTYFSAYKGVYFTGDGARCDEDGFYWITGRVDDVLNVSGHRLGTAEIESALVAHPKVAEAAVVGFPHDIKGQGIYVYVTPNEGVEADEALTKELKAWVRQELSPIATPDMIQWSRGLPKTRSGKIMRRILRKIAANEHEQLGDTSTLADPSVVDTLIEERLNK

SEQ ID NO: 151692 - DNA, 1953 bp, Brevundimonas sp. BAL3
  CDS (1)..(1953): transl_table=11
atgctggagacgtctcgcgtgcccgattccgaactctaccccgttcccgcagacttcgccgcccgtgcccacatggaccggcaggcctatgaggcggcgcgggttgcggcgcgcgagacgcccgaagccttctggtccgagcaggcccagcgcctcgactggatcaaggcaccgaccaagatcaaggacgtctccttcaagaaggaagatttccgcatccgctggttcgaggacggcgtcctgaacgtcgccgccaactgcatcgaccgccacctgccccatcgccaggacgagactgccatcatctgggaaggcgacgatccggcggacagccagcacatcacctatggccggctgcacgacgaagtctgccgcatggccaatgtgctgaaggcgcatggcgccaggaagggcgaccggatcaccatctatatgccgatgatccccgaggccgcctacgccatgctggcctgcgcccgcatcggggcggtccattccgtggtcttcggcggcttctcgcccgacagcctgtgcggccggatcgaggactgcggctccaccctggtcatcaccgccgacgagggcgtgcggggcggcaagatcgtgccgctgaaggccaatgtcgatgcggccctggagaaggtgaaggtcgacaccgtcctggtcatccgccgcaccggcgccgacgtgccgatgatcgaaggccgcgacgtggattacgccgtcgaggccgccaaggccgcgaccgaatgcccgcccgagccgatgaacgcggaagatccgttgtttatcctctacacctcaggttccacaggaaagccgaaaggcgttcttcacacgaccggcggctacctgttctgggccgcctggacccatgagctgaccttcgactatcgtcccggcgaggtcttctggtgcaccgccgacgtgggctgggtaacgggccactcgtatctggtctatgggccgctggcgaatgcggcgaccaccctgatgttcgaaggcgtgccaaactaccccgacgccagccgtttctggcaggtggtggacaagcacaaggtcgaggccttctacaccgcccccacggcccttcgcgccctgatgcgcgaaggcgaggcgcccgtgaaggcgacctcgcgcaagtcgctgcgggtgctcggcacggtcggcgaaccgatcaatccggaggcctggcgctggtatcacgaggtggtcggagacggccgctgccccgtcgtggacacctggtggcagaccgaaaccggcgggcatctgatcacccccctgcccggcgccaccgacctgaagcccggctcggccaccctgcccctgcccggcgtcgaactgcagatcgtcgatgccgaaggccaggaactggtcggggccgtctcgggcaatctgtgcatcaccgacagctggccgggccagatgcgcaccgtctatggcgacgaccagcgcttcttcgacacctatttctcgacctacccgggccggtatttcaccggcgacggctgccgccgggatcaggacggctattactggatcaccggccgggtcgatgacgtcatcaatgtctcgggccaccggatgggcacggccgagatcgagagcgccctggtgctgcacgacgatgtcgccgaggcggccgtggtcggctatccccacgacatcaagggccagggcatctacgcctatgtcaccctgaacaagggggtcgaggcgaccgaggatctgcgcaaggccctgggggcccatgtccgccgcgagatcggtccgatcgccacgcccgacgtgatccagtgggcccccggcctgcccaagacccggtcgggcaagatcatgcgccgcatcctgcgcaagatcgccgagaacgagattggggcgctgggcgacacctcgaccctggccgatccgtcggtcgtcgaggatctggtccagaaccgcgcgggctga

SEQ ID NO: 151693 - protein, 650 aa, Brevundimonas sp. BAL3
MLETSRVPDSELYPVPADFAARAHMDRQAYEAARVAARETPEAFWSEQAQRLDWIKAPTKIKDVSFKKEDFRIRWFEDGVLNVAANCIDRHLPHRQDETAIIWEGDDPADSQHITYGRLHDEVCRMANVLKAHGARKGDRITIYMPMIPEAAYAMLACARIGAVHSVVFGGFSPDSLCGRIEDCGSTLVITADEGVRGGKIVPLKANVDAALEKVKVDTVLVIRRTGADVPMIEGRDVDYAVEAAKAATECPPEPMNAEDPLFILYTSGSTGKPKGVLHTTGGYLFWAAWTHELTFDYRPGEVFWCTADVGWVTGHSYLVYGPLANAATTLMFEGVPNYPDASRFWQVVDKHKVEAFYTAPTALRALMREGEAPVKATSRKSLRVLGTVGEPINPEAWRWYHEVVGDGRCPVVDTWWQTETGGHLITPLPGATDLKPGSATLPLPGVELQIVDAEGQELVGAVSGNLCITDSWPGQMRTVYGDDQRFFDTYFSTYPGRYFTGDGCRRDQDGYYWITGRVDDVINVSGHRMGTAEIESALVLHDDVAEAAVVGYPHDIKGQGIYAYVTLNKGVEATEDLRKALGAHVRREIGPIATPDVIQWAPGLPKTRSGKIMRRILRKIAENEIGALGDTSTLADPSVVEDLVQNRAG

SEQ ID NO: 151694 - DNA, 1938 bp, Alcanivorax sp. DG881
  CDS (1)..(1938): transl_table=11
atgtcccaagtacacattcatcctgttcccgccgagtataaaaaacagaccctgatggaccgcgacacctacgaccgctggtacgcccagtccatcaatgacccggacacgttctgggccgagcgcgcgaaacagtttctggactggaagaccccctgggacaccgtcagcgaatgggacttcagcgaaggccgggctgcctggttcaagggcgccacccttaatgcctgctataactgcgtagaccgccacctgcccgagcgcgcctctcaaaccgcgatcatctgggaaggcgacgagcccgatcaggacaagcacatcagctatcaacagctgttcgaggaagtgagcaagttcggtaacgtgctcaagaaccggggcgtgaaaaaaggcgaccgcgtcgttatctacatgcccatgatccccgaagcggcctacgccatgttggcctgcgcccgtatcggcgccattcattccgtggtgtttggcggcttttctccggaagccttgaaagaccgcatcctcaatgccgaagcctgcgcgctgatcaccgccgacgaaggggtgcgtggcggcaagacgattgcgctgaaagagaatgcagacaaagcgctggacggggtcgactgcgtccacacctgcctgacggtgaagcgcaccggcggcgatgtagactggcaggccccgcgtgatgtctggtaccacgaggccatggctgatgcctccagcgattgtgaaccggagtgggtcgacgctgaagacccgctgttcaccctgtacacctccggctccaccggcaaacccaaaggggtggtgcacaccactgccggctacctgctcaacagcgccctgacccacaaatacgtgttcgactatcaggacggcgacatctattggtgcaccgccgacgtgggctggatcaccggacacagctacatcgtttacggcccgctggccaacggcgccaccaccctgatgttcgaaggcgtacccacctatcccgatgcctcccgttgctggcaggtggtggacaagcacaaggtcaatattttctacactgcccccactgccattcgcgccctgatggggctgggggatgcccccgtggaacagacctcccgcgccagcctgaagctgctgggcacggtgggcgaacccatcaacccggaagcctgggagtggtactacaaagtggtgggtgattcccgctgcccgattgtggacacctggtggcagaccgaaaccggcgccatcatgattgcccccctgcccggcgccgtggacctgaaagccggctcggccaccctgcccatgttcggtgtgcaacccggcctgatggacccggatggcaaggaactggacggcgcggcctccggcaacctggtcatcaagtccagctggcccagccagattcgtaccgtgtatggcgatcatcagcgcctgatcgacacctacttcagcgcctacaaggactgctatttcactggtgacggcgcccgccgtgatgaagatggctactactggatcaccggccgggtggacgacgtgctcaacgtgtccgggcaccgcctgggcaccgccgaaatcgaatctgccctggtgctgcaccccagcatctccgaagccgctgtggtcggttaccagcatgacgtcaagggccagggcatctacgcgtatgtatcgttgatggccggcaaggaaggcagcgaggaactggtccaggcgctgcgggatctggtcacccaggagatcggccccattgccaagcccgacctgattcactttgcaccgggcctgccgaaaacgcgctccggcaagattatgcgccgcattctgcgcaagatcgccgccgatgaactggacagcctgggcgacacctccaccctggctgaccccggcgtggtggatcagcttattgagacccgccagaacaaataa

SEQ ID NO: 151695 - protein, 645 aa, Alcanivorax sp. DG881
MSQVHIHPVPAEYKKQTLMDRDTYDRWYAQSINDPDTFWAERAKQFLDWKTPWDTVSEWDFSEGRAAWFKGATLNACYNCVDRHLPERASQTAIIWEGDEPDQDKHISYQQLFEEVSKFGNVLKNRGVKKGDRVVIYMPMIPEAAYAMLACARIGAIHSVVFGGFSPEALKDRILNAEACALITADEGVRGGKTIALKENADKALDGVDCVHTCLTVKRTGGDVDWQAPRDVWYHEAMADASSDCEPEWVDAEDPLFTLYTSGSTGKPKGVVHTTAGYLLNSALTHKYVFDYQDGDIYWCTADVGWITGHSYIVYGPLANGATTLMFEGVPTYPDASRCWQVVDKHKVNIFYTAPTAIRALMGLGDAPVEQTSRASLKLLGTVGEPINPEAWEWYYKVVGDSRCPIVDTWWQTETGAIMIAPLPGAVDLKAGSATLPMFGVQPGLMDPDGKELDGAASGNLVIKSSWPSQIRTVYGDHQRLIDTYFSAYKDCYFTGDGARRDEDGYYWITGRVDDVLNVSGHRLGTAEIESALVLHPSISEAAVVGYQHDVKGQGIYAYVSLMAGKEGSEELVQALRDLVTQEIGPIAKPDLIHFAPGLPKTRSGKIMRRILRKIAADELDSLGDTSTLADPGVVDQLIETRQNK

SEQ ID NO: 151696 - DNA, 1959 bp, Octadecabacter antarcticus 307
  CDS (1)..(1959): transl_table=11
atgtcagccaccaaatccaagacatatccacccaccgccgcagccgccaaacgcgcccatgttgacgccgctggctacgataaaatgtacgcccattccatcaacgatcccgacgggttctggggggagcatggcaagcgcattgattggattaagcccttcacaacagtgaagaatacgtcatttgaaccgggtaacatcgacatcaaatggtttgaagacggcaccctgaatgtgtctgccaactgcgtggatcgccacgtcgaaacccgcggcgatcaggtggcgatcatctgggaacccgacgatccgaacacgactgaatcgctgcacatcacctaccgcgaactgcaaacgcacgtttgcaaaatggccaatgttctccagaccttaggcgtcactaaaggtgatcgcgtcgtcatctatatgccgatggttccagaagctgcctacgcaatgctggcctgcacacgcatcggcgctgtgcattccatcgtgttcgcaggcttctcacccgacgccctcggtgcgcggatcaacggctgcgacgccaaagtcgtcatcaccgccgatcacgcgccccgcggtggcaaagctacgcccttgaaatcaaacgcagatgcggcactgttgcgttgcaaagacagcgtcaaatgcctcgttgtgaaacggacaggcggccaaaccacatggacggaccgtgactacagttacaacgacatggtgctagaagccgacgactatcagcaacccgttgaaatggctgcagaagatccactgtttatcctgtatacgtccggttcaacaggtcagcccaaaggcgtcgtgcacacgacaggcggctacctcgtctatgcagccatgacccatgaatacacgttcgattaccacgaaggcgatgtgttctggtgtaccgccgacgttggctgggtgacgggccacagctatatcgtctatggcccgctcgccaatggtgccacaacgatcatgtttgagggtgtgccaacctaccctgacccgggtcggttctgggatgtctgtgccaagcataaggtcaaccagttctacaccgccccgactgccattcgcgcgttgatggcccacgggaatgactgggtagaaaagcacgatctgtccgatctcaaactgctcggctcggtcggtgaaccgatcaatcctgaagcgtggaattggtactataacgttgtagggaaaggcaattgtcccattgtcgacacgttctggcagactgaaacaggtggccacatgctgacccccctgcccggtgcaacgaccctgaaacccggtgccgcgcaggtgcctttctttggtgtgctcccagtcgtgttggacccgcaatcaggcgaggaggttcacggcaacgacgtcagcggcgtgctgtgtatcaaagacagttggcccggccagatgcggacaatttggggcgatcatgagcgctttgaaacgacctattttggggattacgcgggctactatttctctggtgacggttgcaaacgcgatgcagacggcgacctctgggtaacgggacgcgtcgatgacgtgatcaacgtctctggccaccgcatgggcaccgcagaggtcgaatccgcactggtggcgcatgtcgcagtggccgaagccgccgtcgttggttacccgcacgacatcaagggtcagggcatctacgcctatgttactttgatgaatgggatcgaccctacggacgaattacgtgctgaattgaataaatgggtccgcagcgaaatcggccccatcgccaagcctgacctgttgcagtgggcccccggcttgccaaaaacccgttctggaaaaattatgcgccgcattctgcgcaagattgctgagaacgactttgacacattgggggatacgtccacgctcgcagatccgtccgtcgtggaagacctggttgaaaaccggatgaatcgcagctga

SEQ ID NO: 151697 - protein, 652 aa, Octadecabacter antarcticus 307
MSATKSKTYPPTAAAAKRAHVDAAGYDKMYAHSINDPDGFWGEHGKRIDWIKPFTTVKNTSFEPGNIDIKWFEDGTLNVSANCVDRHVETRGDQVAIIWEPDDPNTTESLHITYRELQTHVCKMANVLQTLGVTKGDRVVIYMPMVPEAAYAMLACTRIGAVHSIVFAGFSPDALGARINGCDAKVVITADHAPRGGKATPLKSNADAALLRCKDSVKCLVVKRTGGQTTWTDRDYSYNDMVLEADDYQQPVEMAAEDPLFILYTSGSTGQPKGVVHTTGGYLVYAAMTHEYTFDYHEGDVFWCTADVGWVTGHSYIVYGPLANGATTIMFEGVPTYPDPGRFWDVCAKHKVNQFYTAPTAIRALMAHGNDWVEKHDLSDLKLLGSVGEPINPEAWNWYYNVVGKGNCPIVDTFWQTETGGHMLTPLPGATTLKPGAAQVPFFGVLPVVLDPQSGEEVHGNDVSGVLCIKDSWPGQMRTIWGDHERFETTYFGDYAGYYFSGDGCKRDADGDLWVTGRVDDVINVSGHRMGTAEVESALVAHVAVAEAAVVGYPHDIKGQGIYAYVTLMNGIDPTDELRAELNKWVRSEIGPIAKPDLLQWAPGLPKTRSGKIMRRILRKIAENDFDTLGDTSTLADPSVVEDLVENRMNRS

SEQ ID NO: 151698 - DNA, 1956 bp, Octadecabacter antarcticus 238
  CDS (1)..(1956): transl_table=11
atgtccgccaaatccaagacctacccgcccacggccgccgccgccaaacgcgcccatgttgacgccgctggttatgacaaaatgtatgcccattccattgcagatcccgacgagttttggggtgagcatggcaagcgcatcgattggattaagcccttcacaacagtgaaaaatacgtcgtttgcaccgggcaaagtcgacatcaaatggtttgaagacggcaccctgaacgtgtccgccaactgcgtggatcgtcacgtcgaaacccgcggcgatcaagtggcgatcatctgggaacccgacgatccgaacacgacggactcgctgcatattacctacagcgaactgcaggtccatgtctgcaaagtggccaatgttctcaagaccttaggcgtcactaaaggcgaccgcgtcgtcatctatatgccgatgatcccagaagccgcctatgcgatgctggcctgcacacgcatcggcgctgtgcactccattgtgttcgcaggcttctcacccgatgccctcggcgcgcgcatcaatggttgtgacgccaaagtcgtcatcaccgccgatcacgcaccccgtggtggcaaggcgacgccattgaaatcaaacgcggaaacggcgctactgcactgcaaagacagcgtcaaatgccttgttgtgaaacgcacaggcgcccaaaccacgtggaccgaccgcgattacagctacaacgacatggtgctggacgccgatgactaccagcaacccgttgaaatggcggcagaagacccgctgttcatcctctatacatccggctccacgggccagcccaaaggcgtcgtacacaccactggcggctacctcgtttacgccgcgatgacccacgaatacacattcgattatcacgaaggcgatgtgttctggtgcacggcggatgtcggctgggtcacgggccacagctatatcgtctatggcccgctggccaacggcgccacgacgatcatgtttgagggcgtgccgacctacccggacgctggtcgcttctgggaggtttgcgccaagcataaagtcaatcaattctataccgcccccacagctattcgcgcgctcatggcgcacggaaatgactgggtcgaaaagcacgacctttccgatctcaaattgctcggctcggttggtgaaccaatcaatcccgaagcgtggaactggtactatgacgttgttggcaagtgcaattgtccaatcgttgacacgttctggcagaccgaaacgggcggccacatgctgacccccctgcccggtgcgacaaccctgaaacctggggccgcgcaggtgccgttcttcggtgtgcagcccgtagtgctggacccgcaatcgggcgatgaagtccacggcaatgacgtgagtggcgtgctgtgcatcaaagacagctggcccggtcagatgcgcaccatctggggcgatcatgagcggtttgaaaagacatattttggtgattacgcgggctattatttctccggcgacggctgcaaacgcgacgcagacggcgattattgggtcacggggcgcgttgacgacgtgatcaacgtctccggccaccgcctgggcaccgcggaagtcgaatccgcgctcgtggcacatgtcgccgtggccgaagccgccgtggtcggctacccgcacagcatcaaaggccaaggcatctatgcctacgtgacgttgatgaacggcattgagccgacggacgagttgcgcaaagagcttgaaaaatgggtccgcacagaaatcggacccatcgccaagcctgacctgttgcagtgggcccccggcctgccaaagacccgttctggtaaaattatgcgccgcattttgcgcaagatcgccgagaatgattttggcgcattgggggatacgtccacccttgcggatccgtccgtcgtggacgaattggttgaaaaccgaatgaatcgggactga

SEQ ID NO: 151699 - protein, 651 aa, Octadecabacter antarcticus 238
MSAKSKTYPPTAAAAKRAHVDAAGYDKMYAHSIADPDEFWGEHGKRIDWIKPFTTVKNTSFAPGKVDIKWFEDGTLNVSANCVDRHVETRGDQVAIIWEPDDPNTTDSLHITYSELQVHVCKVANVLKTLGVTKGDRVVIYMPMIPEAAYAMLACTRIGAVHSIVFAGFSPDALGARINGCDAKVVITADHAPRGGKATPLKSNAETALLHCKDSVKCLVVKRTGAQTTWTDRDYSYNDMVLDADDYQQPVEMAAEDPLFILYTSGSTGQPKGVVHTTGGYLVYAAMTHEYTFDYHEGDVFWCTADVGWVTGHSYIVYGPLANGATTIMFEGVPTYPDAGRFWEVCAKHKVNQFYTAPTAIRALMAHGNDWVEKHDLSDLKLLGSVGEPINPEAWNWYYDVVGKCNCPIVDTFWQTETGGHMLTPLPGATTLKPGAAQVPFFGVQPVVLDPQSGDEVHGNDVSGVLCIKDSWPGQMRTIWGDHERFEKTYFGDYAGYYFSGDGCKRDADGDYWVTGRVDDVINVSGHRLGTAEVESALVAHVAVAEAAVVGYPHSIKGQGIYAYVTLMNGIEPTDELRKELEKWVRTEIGPIAKPDLLQWAPGLPKTRSGKIMRRILRKIAENDFGALGDTSTLADPSVVDELVENRMNRD

SEQ ID NO: 151700 - DNA, 1962 bp, Rhodobacterales bacterium Y4I
  CDS (1)..(1962): transl_table=11
atgaacgcgctgcacgcagacgctgtctatccgccatccgacgaaactgttgcccgcgcgcatgtcaatgccgcgaaataccaggagatgtacgacgcctcattgaacgacccggaaggcttctggggcgaacagggcaagcgcatcgactggatcaagccgttcacccaagtgaaggacgtgaattacggcttcggcaatgtttcgatcaactggtacgcggacggcaccctcaacgtttccgccaactgtatcgaccgccaccttgacacccgcggcgaccagaccgcgatcatctgggaaccggatgatccgaacgaggacgcgcagcacatcacctataaagagctgcaccgccgcacctgccggatggccaacatcctggaatcgatgggcgtgcgcaagggcgaccgggtggtgatctacctgccgatgatccccgaggcagcctatgccatgctggcctgcgcccgcatcggcgccattcattccatcgtctttgccggcttctcccccgacgcgctggcggcgcgggtcaacggctgcgacgccaaggtgatcatcaccgccgacgaggcgccgcgcggcggccgcaagacgccgctgaaatcgaacgccgacgccgccctgctgcacaccaaggacaccgtgaaatgccttgtggtcaagcgcaccggcggccagaccacctgggtggacgggcgcgattatgactacaacgagatggcgctggaagcggatgattactgcaaaccggccgagatgaacgccgaagatccgctgttcatcctctacacctccggctccaccggccagcccaagggcgtggtgcacacctccggcggctacctgacctatgcggcgctgacccacgaaatcacctttgattaccacgacggcgacatctactggtgcaccgcggacgtgggctgggtcaccgggcacagctatatcgtctacggcccgctggccaatggcgccaccaccctgatgttcgagggcgtgccgacctaccccgatgcctcccgcttctggcaggtctgcgaaaaacacaaggtcaaccagttctacaccgcccccaccgccctgcgcgcgctgatgggccagggcaacgcctgggtcgagaaatgcgatctctccagcctcaaggtgctgggcaccgtgggcgagccgatcaaccccgaagcctggacctggtacaacgaggttgtcggcaagggcaaatgcccgatcgtcgacacctggtggcagaccgagaccggcggccacctgatgaccccgctgccgggtgcccatgcgatgaagcccggcgcggcgatgaagcccttcttcggcatccagccggtggtgctggacccccagaccggcgctgagatcgaaggcaacgatgtcgaaggcgtgctgtgcatcaaggacagctggccgggccagatgcgcaccgtctggggcgaccatgagcggttcgagaagacctatttctcggactacaaggggtactacttcaccggcgacggctgccgccgcgacgcggatggcgattactggatcaccggccgcgttgacgacgtgatcaacgtctccggccaccgcatgggcacggctgaggtcgaaagcgccctggtcgcccacgccgccgtggccgaggccgccgtggtcggctacccgcatgagatcaagggccagggcatctattgctatgtcaccctgatgaacgaccgcgaaccctcggatgagctgctgaaggagctgcgcacctgggtgcggaccgaaatcggcccgattgcctctccggacgtgatacagtgggcgccgggcctgccgaaaacccgctcgggcaagatcatgcgccgcatcctgcgcaagattgccgagaacgacttcggctccctgggcgacacttcgaccctggccgatccgtcggtggtcgaagacctgatcgaaaaccgcgcgaacaaggggtga

SEQ ID NO: 151701 - protein, 653 aa, Rhodobacterales bacterium Y4I
MNALHADAVYPPSDETVARAHVNAAKYQEMYDASLNDPEGFWGEQGKRIDWIKPFTQVKDVNYGFGNVSINWYADGTLNVSANCIDRHLDTRGDQTAIIWEPDDPNEDAQHITYKELHRRTCRMANILESMGVRKGDRVVIYLPMIPEAAYAMLACARIGAIHSIVFAGFSPDALAARVNGCDAKVIITADEAPRGGRKTPLKSNADAALLHTKDTVKCLVVKRTGGQTTWVDGRDYDYNEMALEADDYCKPAEMNAEDPLFILYTSGSTGQPKGVVHTSGGYLTYAALTHEITFDYHDGDIYWCTADVGWVTGHSYIVYGPLANGATTLMFEGVPTYPDASRFWQVCEKHKVNQFYTAPTALRALMGQGNAWVEKCDLSSLKVLGTVGEPINPEAWTWYNEVVGKGKCPIVDTWWQTETGGHLMTPLPGAHAMKPGAAMKPFFGIQPVVLDPQTGAEIEGNDVEGVLCIKDSWPGQMRTVWGDHERFEKTYFSDYKGYYFTGDGCRRDADGDYWITGRVDDVINVSGHRMGTAEVESALVAHAAVAEAAVVGYPHEIKGQGIYCYVTLMNDREPSDELLKELRTWVRTEIGPIASPDVIQWAPGLPKTRSGKIMRRILRKIAENDFGSLGDTSTLADPSVVEDLIENRANKG

SEQ ID NO: 151702 - DNA, 1956 bp, Pseudovibrio sp. JE062
  CDS (1)..(1956): transl_table=11
ttgaccatgactggtgatgtgtatccagtaccggctgagattgccgaaaacgccctgctcaacaacgagcagtacttggagatgtacaacaagtccgttgaagatcccgacggattctggggggagcacggaaagcggattgattggatcaaaccctacaaaaccgttaaaaacacctcctatgactatcacaatgtttccatcaaatggtttgaagacggcacgctgaacgtagcagcaaactgtattgaccgtcatctggcagaacgcggcgatcagcctgcaatcatctgggagggtgatgagccggatcaaagcaaaaccatcacctataagcagctttctgaagccgtaaatcgcttcgcaaatgttttgctggccaatggcgtcaaaaaaggtgaccgcgtcactgtctacatgccaatgatccctgaagcagcctacgcaatgctcgcctgtgcccgcatcggtgccgtgcattcagttgtgttcggtggtttctcaccagacagccttgcaggccgtattgaggactgttcctctcgcttcgtgatcaccgctgacgaaggcgttcgcggtggcagaaccgtgccgctgaaggaaaacaccgaccgcgcaatcgagaaatgcggaaacgtcgacaaagtgttcgtcgcgaaacgcaccggtggcaacatcaacatgactgaaggccgtgacctttggtaccacgaagagatcgaaaaagtctcagcagactgcccgccagctgaaatgaatgctgaagacccactcttcatcctctacacctctggctccacagggcagcccaaaggcgtcatgcacacctcgggcggttacctcgtctacgcatccatgacgcaccaatacgtcttcgactatcatccgggcgaagtctactggtgtacagctgacgttggctgggtcacaggccacagctacattctctacggcccactcgcaaacggcgccacaaccctgatgttcgaaggtgtgccaacctacccaactgcaggtcgcttctgggaagtttgtgacaagcacaacgtcaacatcttctacactgccccaactgcaattcgcgcattgatgggtgcaggcgatgagcacgtcaccaacacatcccgcaagtccctccgtattcttggctccgttggtgaaccgatcaatccagaagcatggatgtggtaccacaacgtggttggtgagcagcgctgcccaatcgtggatacatggtggcaaacggaaaccggcggcatcctgatcacgccactgccgggtgcaacagacctcaaaccaggctctgcaacccgaccattctttggaatccaacctgcaatcgttgatgcagaaggcaacttccaggaaggcgccaccgaaggtaacctcgtcatcacagacagctggccaggccagatgcgtacggtctacggagatcacgagcgcttcgtccagacctacttcgcaacctacaaaggcctgtacttcactggtgacggctgccgccgtgacgaagacggttactactggatcacaggccgcgtagatgatgtaatcaacgtttccggccaccgtatgggcaccgcggaagtagaaagcgctctcgtcgctcacccagacgtctcagaagccgctgtagtgggctacccgcacgatgtgaagggtcagggcatctacgcttatgtcaccctcatggaaggccttgagccgtctgaagaactgaaaaagaaactggtgaagcacgttcgcgccgaaatcggcccaattgcatcccctgaccttattcagttcgccccaggtctaccaaagactcgaagcggtaaaatcatgcgccgcatccttcgcaaaatcgcagaggacagcttcgaaaacctaggcgacacctcaaccctcgccgacccaaccgtagtaggcgacctaatcgacaaccgccaaaaccgggctgaaacggtatag

SEQ ID NO: 151703 - protein, 651 aa, Pseudovibrio sp. JE062
MTMTGDVYPVPAEIAENALLNNEQYLEMYNKSVEDPDGFWGEHGKRIDWIKPYKTVKNTSYDYHNVSIKWFEDGTLNVAANCIDRHLAERGDQPAIIWEGDEPDQSKTITYKQLSEAVNRFANVLLANGVKKGDRVTVYMPMIPEAAYAMLACARIGAVHSVVFGGFSPDSLAGRIEDCSSRFVITADEGVRGGRTVPLKENTDRAIEKCGNVDKVFVAKRTGGNINMTEGRDLWYHEEIEKVSADCPPAEMNAEDPLFILYTSGSTGQPKGVMHTSGGYLVYASMTHQYVFDYHPGEVYWCTADVGWVTGHSYILYGPLANGATTLMFEGVPTYPTAGRFWEVCDKHNVNIFYTAPTAIRALMGAGDEHVTNTSRKSLRILGSVGEPINPEAWMWYHNVVGEQRCPIVDTWWQTETGGILITPLPGATDLKPGSATRPFFGIQPAIVDAEGNFQEGATEGNLVITDSWPGQMRTVYGDHERFVQTYFATYKGLYFTGDGCRRDEDGYYWITGRVDDVINVSGHRMGTAEVESALVAHPDVSEAAVVGYPHDVKGQGIYAYVTLMEGLEPSEELKKKLVKHVRAEIGPIASPDLIQFAPGLPKTRSGKIMRRILRKIAEDSFENLGDTSTLADPTVVGDLIDNRQNRAETV

SEQ ID NO: 151704 - DNA, 1962 bp, Ruegeria sp. R11
  CDS (1)..(1962): transl_table=11
atgacccaagagagggacagcaccacctatgcgccgtcggcagagaccgtcgcccgcgcgcatgtgacagccgcacaatatgacgagatgtatgccgcctccatgcaggatcccgaaggattctgggccaaacaggcggagcggatcgactggatcaagccgttttcccaagtgaaagacgtcaactatgattttggcaatgtctcgatcaaatggttcgctgacggctccttgaatgttgcggccaactgtatcgaccgccacctggcaacccgtggcgatcagaccgccatcatctgggagccggacgacccacaggatgccgcgcagcacatcacctactcggaactgcatggcagcgtctgccgcatggcaaatgttctgcagtcgatgggtgtgggcaaaggcgaccgtgtcgtcatctacctgccgatgatcccggaagccgcctatgccatgctggcctgtgcccgtatcggtgcgatccattcgatcgtgtttgcaggcttctcccccgacgcattggcggcgcggatcaatggctgtgacgccaaggtcatcatcaccgcggacgaggccccccgtggtggccgcaaaacaccgctgaagtccaacgcagacgccgctctgctgcataccaaagacacggtgaaatgccttgtggtaaagcgcacgggcgggcagaccacttggatcgacgggcgtgatcacgactataacgcgctggcggccgaggcatcagacagctttgagcctgcggaaatgaacgcagaagatccgctgttcatcctttatacctccggctctaccggccagcccaaaggggttgtgcatacaaccggcggctatctgacctatgcggcgatgacgcatgagatcacgtttgattaccacgatggcgatatctactggtgtacggccgatgtgggctgggtcacgggccacagctatatcgtctatggcccgctggccaatggtgccacaaccctgatgtttgaaggcgtgccgacctaccccgatgccggccgtttctgggaggtctgcgccaagcataaggtgaaccagttctacaccgcccccaccgcaatccgcgccttgatgggtcagggtccggaatgggtggaaaagcacgacctgagcgatctgcgcaccctcggaactgtgggcgagccgatcaaccctgaggcctggaactggtacaacgacgttgtcggcaagggcaaatgcccgatcgtcgacacctggtggcagactgaaactggcggtcatctgatgaccccgctgcccggtgcccatgcaaccaaaccaggggctgcgatgaaaccgttctttggtattgcaccggtggttctggatccgcagaccggtgtggaaatcgaaggcaacggcgttgagggcgtcctgtgcatcaaggacagctggcccggccagatgcgcactgtctggggcgaccatgaacgtttcgagaagacctatttctctgactacaagggctattacttcaccggtgacggctgccgccgcgatgaggatggtgattattggatcaccggccgtgttgatgacgtgatcaatgtctctggtcaccgcatgggcacagccgaggtcgaaagcgcactggtggcccatgccgccgtggccgaggccgcggttgttggctacccgcacgaaatcaagggacagggcatctattgctatgtgaccctgatgaacgaccgcgagccctcggacgagctgatgaaggagctgcgcacgtgggtgcgcaccgagatcggcccgattgcctccccggacgtcattcagtgggcaccgggcctgccgaaaacccggtctggcaagattatgcgccgcatcctgcgcaagatcgccgagaacgatttcggctctcttggcgacacctccaccctggcggatccgtcggttgtggatgacctgatcgaaaaccgggccaacaagggatga

SEQ ID NO: 151705 - protein, 653 aa, Ruegeria sp. R11
MTQERDSTTYAPSAETVARAHVTAAQYDEMYAASMQDPEGFWAKQAERIDWIKPFSQVKDVNYDFGNVSIKWFADGSLNVAANCIDRHLATRGDQTAIIWEPDDPQDAAQHITYSELHGSVCRMANVLQSMGVGKGDRVVIYLPMIPEAAYAMLACARIGAIHSIVFAGFSPDALAARINGCDAKVIITADEAPRGGRKTPLKSNADAALLHTKDTVKCLVVKRTGGQTTWIDGRDHDYNALAAEASDSFEPAEMNAEDPLFILYTSGSTGQPKGVVHTTGGYLTYAAMTHEITFDYHDGDIYWCTADVGWVTGHSYIVYGPLANGATTLMFEGVPTYPDAGRFWEVCAKHKVNQFYTAPTAIRALMGQGPEWVEKHDLSDLRTLGTVGEPINPEAWNWYNDVVGKGKCPIVDTWWQTETGGHLMTPLPGAHATKPGAAMKPFFGIAPVVLDPQTGVEIEGNGVEGVLCIKDSWPGQMRTVWGDHERFEKTYFSDYKGYYFTGDGCRRDEDGDYWITGRVDDVINVSGHRMGTAEVESALVAHAAVAEAAVVGYPHEIKGQGIYCYVTLMNDREPSDELMKELRTWVRTEIGPIASPDVIQWAPGLPKTRSGKIMRRILRKIAENDFGSLGDTSTLADPSVVDDLIENRANKG

SEQ ID NO: 151706 - DNA, 1932 bp, marine gamma proteobacterium HTCC2148
  CDS (1)..(1932): transl_table=11
atgtccgaatttcccacccatctggttccagcaaatttcaacgatgcgcatatcaacgcagagcgttaccaggcgatgtacaagcgttccattgaagacccagacgccttctggggagaaatggccagcgaattcctgagctgggaaaaaccctgggataaagttgtggagttcgacttcgtcaaaggagaggctgcatggtttgccggaggtaaactgaacgtcagtcacaactgcatcgatcgtcacctgccagaacgcgctgatcaaacagccctcatctgggaaggcgatgatccagcagacagcaagcacatcacctacgctgaacttaaagaccacgtctgcaagctcgctaacgcactgaaagcacgcggcgtgaagaaaggtgatcgcgtgtgcatttatatgccgatgattcccgaggcgacctatgccatgctggcttgcacccgaatcggcgctgttcattccattgtcttcggtggcttttcaccagaggcactaaaggatcgcattttggattcggactgccagacgttgatcaccgcggatgagggcgtgcgcggaggtcggccggtaccactgaaagacaacgcggacaaagcactggaagcctgccccaacgtccatacttgcctggtagtcaggcgcaccggcggagatgtcacatggacagaatctcgcgatgtctactacggagatctggtcgatagccagagtagcgattgtcctcccgagcccatggacgcagaagacccgctgttcattctctatacctcaggctccacaggtaagcccaagggcgtattacatacgactgcaggctacctgttgcaagcgagcatgaccttcaaatacgtctttgactatcgcgagggagaggtttactggtgcaccgccgatgtgggctgggtgaccggtcacagctatattgtctatgggcccctggctaacggagctattagcctgatgtttgaaggggtacctacctaccccgacgcgggtcgctgctgggaaatcgtagacaagcatcaggttaacatcttctacactgctcctacggccatccgggcactgcaggcggtaggaaacgaaccggtcacccgttcctcgcgctccagcttgagactactgggcactgtcggcgagcccattaaccccgaagcctggacctggtaccacgaagttgtgggtgacagtcgctgccccatcgtcgacacctggtggcaaaccgaaaccgggggacatatgatcactccactgcccggggctaccgcactgaagcccggctcggccacattccccttcttcggtgttgatctcgcattactcaatgaggatggctctgaagttgaaggtcccggctcaggctacctggtcatcaaatcttcgtggcccggccaaatacgcagtgtttacggtgaccataagcgaatgatagacacatacttcagtaactaccctggctattacttcaccggcgacggcgccaccagggacgatgacggctactattggatcaccggccgcgtagatgatgtgctcaacgtttctgggcaccgtatgggcaccgcagaggtcgagagcgccctggtgctgcatgacgatatcgctgaggccgcagtggtcggtttccctcatgatattaaaggccagggcatttacgcttacgtcacccccatgcagggcgtggaactcagcgaggagttacgccaggagctgattcaactgtgtgtgaaggagattggaccgatcgccaagcccgatattattcagtgggcgccgggattaccaaaaacgcgctccgggaaaattatgcgacgcatcctgcgtaaaattgcagagaacgaattggatagcctgggagataccagcacactggcagatccctctgtagtagaaagtctggttgagaatcgaccggcttag

SEQ ID NO: 151707 - protein, 643 aa, marine gamma proteobacterium HTCC2148
MSEFPTHLVPANFNDAHINAERYQAMYKRSIEDPDAFWGEMASEFLSWEKPWDKVVEFDFVKGEAAWFAGGKLNVSHNCIDRHLPERADQTALIWEGDDPADSKHITYAELKDHVCKLANALKARGVKKGDRVCIYMPMIPEATYAMLACTRIGAVHSIVFGGFSPEALKDRILDSDCQTLITADEGVRGGRPVPLKDNADKALEACPNVHTCLVVRRTGGDVTWTESRDVYYGDLVDSQSSDCPPEPMDAEDPLFILYTSGSTGKPKGVLHTTAGYLLQASMTFKYVFDYREGEVYWCTADVGWVTGHSYIVYGPLANGAISLMFEGVPTYPDAGRCWEIVDKHQVNIFYTAPTAIRALQAVGNEPVTRSSRSSLRLLGTVGEPINPEAWTWYHEVVGDSRCPIVDTWWQTETGGHMITPLPGATALKPGSATFPFFGVDLALLNEDGSEVEGPGSGYLVIKSSWPGQIRSVYGDHKRMIDTYFSNYPGYYFTGDGATRDDDGYYWITGRVDDVLNVSGHRMGTAEVESALVLHDDIAEAAVVGFPHDIKGQGIYAYVTPMQGVELSEELRQELIQLCVKEIGPIAKPDIIQWAPGLPKTRSGKIMRRILRKIAENELDSLGDTSTLADPSVVESLVENRPA

SEQ ID NO: 151708 - DNA, 1914 bp, Roseobacter sp. GAI101
  CDS (1)..(1914): transl_table=11
atggccgccaaggcccatgtcgatgctgcgaaatatgacgcgatgtacaaagcctcgatcgaggatgcggacgggttctggcgcgatcaggcgcagcgcattgactggatgacaccattcacgaccgtgaaagacgtcgatttcacccttggtcaggtcaagatcaactggttcgccgatggtgaattgaacgtcagcgccaattgcatcgaccgccaccttgagacacgcggcgatcagactgcgatcatctgggaacccgacagccccgaagaaggcgcgcagcacatcacctacaaggaattgcacgcccagacctgcaagatggccaatatcctgcgcgaccttggtgtcggcaagggcgacagggtcgtgatctatctgcccatgatccccgaagccgcctatgccatgctggcctgcgcgcggatcggcgcgatccattcgatcgtttttgcagggttttcgcccgatgcgctggcatcgcgggtcaatggatcggaagccaaggttgtgatcaccgccgattacgcgccgcgcgggggcaaggcgaccccgttgaagaccaatgccgatcaggcgctgctgcactgcaaggacagcgtcaaatgccttgtggtcaagcgcacgggcggccagaccacatggacagaagggcgcgatttcgactacaacgcgctggcaaaggacgccgcagacacctgcgcgcccgaggccatgaacgcagaggacccgctgttcatcctgtacacttcaggatccaccgggcagcccaagggcgttgtgcattccaccggcgggtatctggtctatgccgcgatgacccacgagatcacattcgattaccatgatggcgacatctactggtgcacggcggatgtcggctgggtcacgggccacagctatatcgtctatggcccgctggccaatggtgcgaccacattgatgttcgagggcgtgccgacctatcccgacgccagccggttctggcagatttgcgaaaagcacaaggtgaaccagttctataccgcccccaccgccattcgtgcgctgatgggcaaggggcgggaattcgttgacggctgtgacctgagcagcctgaaactgctgggcaccgtgggcgaaccgatcaaccccgaagcgtggaactggtacaatgacgtggttggcaagggcaattgccccatcgtcgacacgtggtggcagaccgaaaccggcggccatttgatgacccccctgcccggtgcccatgccaccaagcccggtgccgcgatgaaaccgttctttggcatcaagcccgtcgtgctggaacccacgtcgggcgaagagatcgcgggcaatggcgtcgaaggtgtcttgtgcatcgccgacagctggcccggccagatgcgcaccgtctggggcgatcacgagcggttcgaaaagacgtatttcagcgattatgcgggctattactttaccggtgacggctgccgccgcgacgaagatggcgactactggatcacgggccgcgtcgatgacgtgatcaatgtgtcgggccaccgcatggggaccgccgaagtggaaagcgcgctggtcgcacatcccaaggtggccgaggccgccgtggtcggatacccgcacaccatcaagggccaaggcatctattgctacgtctcgttgatggcgggcgaggaaccgaccgatgacctgcgcacagagctgcgcaattgggtccggaacgagatcggcccgatagcatcgcccgacctgatccagtgggcccccggcctgcccaagacccggtccggcaagatcatgcgccgcatcctgcgcaagatcgccgaaaacgactttggcgcgcttggcgatacgtcgacccttgcagaacccgaagtggtggatgacctgatcgaaaaccgcatgaaccgctag

SEQ ID NO: 151709 - protein, 637 aa, Roseobacter sp. GAI101
MAAKAHVDAAKYDAMYKASIEDADGFWRDQAQRIDWMTPFTTVKDVDFTLGQVKINWFADGELNVSANCIDRHLETRGDQTAIIWEPDSPEEGAQHITYKELHAQTCKMANILRDLGVGKGDRVVIYLPMIPEAAYAMLACARIGAIHSIVFAGFSPDALASRVNGSEAKVVITADYAPRGGKATPLKTNADQALLHCKDSVKCLVVKRTGGQTTWTEGRDFDYNALAKDAADTCAPEAMNAEDPLFILYTSGSTGQPKGVVHSTGGYLVYAAMTHEITFDYHDGDIYWCTADVGWVTGHSYIVYGPLANGATTLMFEGVPTYPDASRFWQICEKHKVNQFYTAPTAIRALMGKGREFVDGCDLSSLKLLGTVGEPINPEAWNWYNDVVGKGNCPIVDTWWQTETGGHLMTPLPGAHATKPGAAMKPFFGIKPVVLEPTSGEEIAGNGVEGVLCIADSWPGQMRTVWGDHERFEKTYFSDYAGYYFTGDGCRRDEDGDYWITGRVDDVINVSGHRMGTAEVESALVAHPKVAEAAVVGYPHTIKGQGIYCYVSLMAGEEPTDDLRTELRNWVRNEIGPIASPDLIQWAPGLPKTRSGKIMRRILRKIAENDFGALGDTSTLAEPEVVDDLIENRMNR

SEQ ID NO: 151710 - DNA, 1908 bp, Polaribacter sp. MED152
  CDS (1)..(1908): transl_table=11
atgagtaattatcacatcaaaaattttccagaatattatcacgtttatagaaattcggtaagagaacctgaaacattttgggaagaaattgcagaagaacattttgtttggaaaaagaaatgggacaatgtattaagttgggatttttcaaagcccgagattaaatggtttgaaggtgctaaactaaacataacagaaaactgtatagacaggcatttggcaacaagaggagataaaaccgctattttatttgagcctaataatccagatgaagaagcagagcacattacttacaagcagctttcagaaagagtaaatcagtttgcgaatgttttaaaagaaaatggtattcaaaaaggagatcgtgtttgtatttatgtaccgatgattccagaattggcaatagctacactagcatgtgctagaattggagctatacattctgtagtctttgcaggtttttctgcaacagcattatcaacaagaataaacgatgcagactgtaaaatggtgattacttctgacggttcatatagaggttctaaaacaatcgatttaaaaggaattgtagatgaggctttagaatcttgctcttctgtagaaactgttttggttgctaaaagaatcaactcagacataaatatgaaagaaggtagagacaaatggttacaacccttattagacaaagcatctacggtttgcgaagcagaagtgatggatgcagaagatcctctatttattctatacacttcaggttctacaggaatgccaaaaggtatggttcatactacagcaggttatatgatttacacagcatatacgtttaaaaatgcgtttcaatatcgagaaaatgatgtgtattggtgtactgcagatattggttggattactgggcattcttatattgtgtatgggcctttagcaaacggagctacaactttaatgtttgagggtgtaccaagttatccagattttgggcgattttgggacattgtacaaaaacataaagtcaatcaattttatacagcaccaaccgctattagagcattggcaaaacacggaacagaattggtagatcaatacgatttatcatcattaaaagttctgggttctgtaggagagccaataaacgaagaagcttggcattggtataatgatactattggtaaaaagaacagtccaattatagatacttggtggcaaaccgaaactggtggaatgatgattactccaattccgtttgtaacaccaacaaaaccaacctatgcaacattgccatttattggtattcaaccttgtttgatggatgaaaatggaaacgaattaaaaggcaatcaagtagaaggtaggttatgtataaaatatccttggccaagtatggcaagaaccatttggggaaatcatcagcgctataaagaaacctatttctctgcttatgaaaataaatattttacaggagatggtgctttacgtgatgaagttggttactacagaattacaggaagagtagatgatgtaattatagtttctggtcataatttaggaactgcaccaatagaagatgctataaacgagcatcctgcagttgcagaatctgcaattgttggttttccacatgatatcaagggaagtgctttatatggctatataacccttaaagatttgggtgaaagtagagatcataacaatttaagaaaagaaataaaccaattaatttctgataaaatagggccaattgctaagctcgataaaattcaattttcagaaggtttaccaaaaacacgttcaggaaaaatcatgagacgaattttgcgtaaaatagcctctaacgaaatggataatttaggagatacaagtacactgttaaatcctgaagttgtgcaaagtattatagaccatagattgtaa

SEQ ID NO: 151711 - protein, 635 aa, Polaribacter sp. MED152
MSNYHIKNFPEYYHVYRNSVREPETFWEEIAEEHFVWKKKWDNVLSWDFSKPEIKWFEGAKLNITENCIDRHLATRGDKTAILFEPNNPDEEAEHITYKQLSERVNQFANVLKENGIQKGDRVCIYVPMIPELAIATLACARIGAIHSVVFAGFSATALSTRINDADCKMVITSDGSYRGSKTIDLKGIVDEALESCSSVETVLVAKRINSDINMKEGRDKWLQPLLDKASTVCEAEVMDAEDPLFILYTSGSTGMPKGMVHTTAGYMIYTAYTFKNAFQYRENDVYWCTADIGWITGHSYIVYGPLANGATTLMFEGVPSYPDFGRFWDIVQKHKVNQFYTAPTAIRALAKHGTELVDQYDLSSLKVLGSVGEPINEEAWHWYNDTIGKKNSPIIDTWWQTETGGMMITPIPFVTPTKPTYATLPFIGIQPCLMDENGNELKGNQVEGRLCIKYPWPSMARTIWGNHQRYKETYFSAYENKYFTGDGALRDEVGYYRITGRVDDVIIVSGHNLGTAPIEDAINEHPAVAESAIVGFPHDIKGSALYGYITLKDLGESRDHNNLRKEINQLISDKIGPIAKLDKIQFSEGLPKTRSGKIMRRILRKIASNEMDNLGDTSTLLNPEVVQSIIDHRL

SEQ ID NO: 151712 - DNA, 1938 bp, Labrenzia alexandrii DFL-11
  CDS (1)..(1938): transl_table=11
atgtccgcatctgtttttcccgttccggcggaggtagccgctcgggcgcatgtcgataacgtcaaatatctggaaatgtatcagcagtcggtgagcgacccggatggcttctggggcgagcacggaaagcgtgttgactggatcaagcctttcaccaaggtgaagaacacctcttacgactaccacaatgtctcgatcaaatggttcgaagacggcacgttgaatgtctcggccaactgtatcgaccggcatctggcgacacgcggcgatcagccggccatcatctgggaaggtgacgatccgtctgaaagcaaggtgatcacctacaaggagctgcatcacgaggtgaacaagttcgccaacgtgctgcatgcccaaggcgtcaagaaaggcgaccgggtcaccctctatctgccgatgatcccggaagcggcatatgcgatgctggcttgcacccggatcggggcggttcactcgatcgtgtttggcggcttttctccagatagtctggcccaacgcatcgaaagctgtaaaagcacctgcatcgtgaccgcggacgagggtctacgcggtggccgcaaggtgccgctgaaagccaatgtcgacaaggcggtcgagaaggcaccggtcgatagcgtgatcgtggtcaagcgtactggcggcgacatttccatgcaggacggacgggacgtctggtaccacgacgaagccgaccgcgtgtctgaccattgcgatccggttgaaatgaatgcggaagacccgctcttcattctctacacgtccggatccacgggtcagccaaagggggtggtccacaccacgggcggatatctcgtctacgcctcgatgacccaccaatatgttttcgactatcaggatggcgacatctactggtgtacggcggatgtgggctgggtcaccggacacagctacatcgtctatggtccgctcgccaatggcgcgaccacgctgatgttcgaaggcgtgccgacctatccggatgccggccgcttctggcaggtctgcgagaagcacaaggtcaacatcttctacacggcaccaactgcgatccgggcgctcatgggtgctggagacgacttcgtaaacaagtcagatttgtcctcgctgcgcctgcttggctcggtcggtgagcctatcaacccggaagcctggaactggtattacaacgtcgtcggcaagcagaactgcccgattgtagacacttggtggcagactgaaaccggcggcatcctgatcacgccgctcccaggcgcgaccgacctgaagcccggatctgcaacccgtccgttcttcggcgtgcagccggccgtcgttgatgcggaaggcaagttcctggaaggggcaaccgagggcaacctggtcatcaccgacagctggccgggccaaatgcgcacggtttacggcgaccacgaccgcttcgtgcagacctatttcgccacatacaagggcctttattttaccggtgacggctgccgccgggacgaggacggctactactggattactggccgcgtcgatgacgtgatcaacgtctccggccaccgcatgggcacagcggaagtggaaagcgcgctggttgctcatgagaaagtctcagaggccgccgtggtcggctatccgcatgacatcaaggggcagggcatttatgcctatgtcacgctgatggaaggcgaagaaccaacggatgagctgaaaaaagaactcgtcaaacatgtccgggcagaaatcggccccatcgcctcaccggacctcatccagttctcacccggcctgccgaagacgcgctcgggcaagatcatgcgccgcatcctgcgcaagatcgccgaggacagcttcgacaatctcggcgacacctcgacactggcagacccggctgtggtcgatgacctcatcgacaaccgccagaaccgggcgtaa

SEQ ID NO: 151713 - protein, 645 aa, Labrenzia alexandrii DFL-11
MSASVFPVPAEVAARAHVDNVKYLEMYQQSVSDPDGFWGEHGKRVDWIKPFTKVKNTSYDYHNVSIKWFEDGTLNVSANCIDRHLATRGDQPAIIWEGDDPSESKVITYKELHHEVNKFANVLHAQGVKKGDRVTLYLPMIPEAAYAMLACTRIGAVHSIVFGGFSPDSLAQRIESCKSTCIVTADEGLRGGRKVPLKANVDKAVEKAPVDSVIVVKRTGGDISMQDGRDVWYHDEADRVSDHCDPVEMNAEDPLFILYTSGSTGQPKGVVHTTGGYLVYASMTHQYVFDYQDGDIYWCTADVGWVTGHSYIVYGPLANGATTLMFEGVPTYPDAGRFWQVCEKHKVNIFYTAPTAIRALMGAGDDFVNKSDLSSLRLLGSVGEPINPEAWNWYYNVVGKQNCPIVDTWWQTETGGILITPLPGATDLKPGSATRPFFGVQPAVVDAEGKFLEGATEGNLVITDSWPGQMRTVYGDHDRFVQTYFATYKGLYFTGDGCRRDEDGYYWITGRVDDVINVSGHRMGTAEVESALVAHEKVSEAAVVGYPHDIKGQGIYAYVTLMEGEEPTDELKKELVKHVRAEIGPIASPDLIQFSPGLPKTRSGKIMRRILRKIAEDSFDNLGDTSTLADPAVVDDLIDNRQNRA

SEQ ID NO: 151714 - DNA, 1965 bp, Rhodobacteraceae bacterium KLH11
  CDS (1)..(1965): transl_table=11
atgaccaccgctgcccaggcagatgccaagacatatccgccatccgcagaaaccgtcgcccgtgcccatgtcgacgctgacaaatatgcagtcatgtatgctgcctcgatcaacaaccccgaggcgttctgggacgaacagggtaaacgtatcgactggatcaagccctataccaaaatcaaagaggtcgattacaccctcggctcggttggcatcaactggtacagcgacggcacgctgaacgtttcggccaattgtctggaccggcacctgacagcgcgcagcaatcagactgcaatcatctgggagcctgatgatcccaatgatgcggcccaacacattacatatgctgaactgcaccgccgcacctgccggatggccaatattctggaatcaatgggtgtgtgcaaaggtgaccgggtggtcatctatctgcccatgatccccgaagcggcctatgccatgctggcctgcgcccggatcggagccatccactcgatcgttttcgcaggcttctcgcccgatgcgctggccgcgcggatcaacgggtgtgatgccaaggtgttgatcaccgccgatgaagccccgcgtggtggccgcaagacagcgttgaaatcaaacgctgacgccgctttgctgcattgcaaggacacggtgaaatgtctggtcgtcaaacgcaccggcgggcaaaccacctgggtggacgggcgcgaccatgactataacgcaatggcgcttgaggcggatgactactgcgccccggctgaaatgagtgccgaagacccgctgttcatcctgtatacctccggctcgaccgggcagcccaagggggttgttcacaccaccggcggctatctggtctatgcctcgatgacgcatgagatcacgttcgattaccacgacggtgacgtttactggtgtaccgctgacgtgggctgggtcaccggccacagctatatcgtctatggcccgctggccaatggtgcgacgacgctgatgtttgaaggcgtgcccacctatccggatgcttcgcggttctggcaggtctgcgagaaacacaaggtgaaccagttctacaccgcccccacggcgatccgcgcgctgatgggtcagggcaacgagtttgtcgagaaatgcgacctcagcgatctgaaggtgctgggtacggtcggtgagccgatcaacccggaagcgtggaactggtacaatgaagttgtcggcaagggcaactgcccgatcgtggatacctggtggcagaccgagaccggtggccacctgatgacccccctgcccggcgcgcatgcgatgaaaccgggatcggccatgaagccgttctttggcattgaacctgtggttctggacccgcaatccggtgtcgagatcgacggcaatggcgtcgagggcgtgctgtgcatcaaggacagctggcccggtcagatgcgcaccgtctggggcgatcatgagcggttcgagaaaacctatttctcggactacaaaggctattacttcaccggcgacggctgccgccgcgatgaggatggcgactattggatcaccggccgtgtggatgatgtgatcaacgtttcgggccaccgcatggggacggccgaggtcgaaagcgcgctggtcgcgcacgccgccgtggccgaggccgccgtggtgggttacccccatgaaatcaaggggcaaggcatctactgctatgtcacgctgatgaacgatcaggagccaagtgatgagctgctgaaagagctgcgcacatgggtccggaccgagattggcccgattgccagccccgatgtgatccagtgggccccgggcctgcccaagacccgctcgggcaagatcatgcgccgcatcctgcgcaagatcgccgaaaatgactttggctcgctgggcgatacctcaacgctggccgatccgtcggtggtcgaggatctgatcgaaaaccgggccaataagtga

SEQ ID NO: 151715 - protein, 654 aa, Rhodobacteraceae bacterium KLH11
MTTAAQADAKTYPPSAETVARAHVDADKYAVMYAASINNPEAFWDEQGKRIDWIKPYTKIKEVDYTLGSVGINWYSDGTLNVSANCLDRHLTARSNQTAIIWEPDDPNDAAQHITYAELHRRTCRMANILESMGVCKGDRVVIYLPMIPEAAYAMLACARIGAIHSIVFAGFSPDALAARINGCDAKVLITADEAPRGGRKTALKSNADAALLHCKDTVKCLVVKRTGGQTTWVDGRDHDYNAMALEADDYCAPAEMSAEDPLFILYTSGSTGQPKGVVHTTGGYLVYASMTHEITFDYHDGDVYWCTADVGWVTGHSYIVYGPLANGATTLMFEGVPTYPDASRFWQVCEKHKVNQFYTAPTAIRALMGQGNEFVEKCDLSDLKVLGTVGEPINPEAWNWYNEVVGKGNCPIVDTWWQTETGGHLMTPLPGAHAMKPGSAMKPFFGIEPVVLDPQSGVEIDGNGVEGVLCIKDSWPGQMRTVWGDHERFEKTYFSDYKGYYFTGDGCRRDEDGDYWITGRVDDVINVSGHRMGTAEVESALVAHAAVAEAAVVGYPHEIKGQGIYCYVTLMNDQEPSDELLKELRTWVRTEIGPIASPDVIQWAPGLPKTRSGKIMRRILRKIAENDFGSLGDTSTLADPSVVEDLIENRANK

SEQ ID NO: 151716 - DNA, 1944 bp, Stenotrophomonas sp. SKA14
  CDS (1)..(1944): transl_table=11
atggctgatatctaccccgtcgatccgcagttcgccgccaaggcacgcatcgacaagacgtcgtacgaacagcagtaccaggcttcggtgaccgacccggatggtttctggggcaaggccgccgagcgcctgcaatggatgcgcaagccgacgaagatcaagaacgtcagctatgacctgtccgatttccacatcaagtggttcgaggatggcgagctcaatgccagcgtgaactgcctggaccgccagctggacacgcgcggcgacaagaccgcgctgctgttcgaaccggatggtcccgatgcaccggcccagcacgtgacctatcgcgagctgtacgagcgcacctgccgcctcggcaacgcgctgcgcaacctgggtgtcaagaagggcgaccgggtcaccatctacctgccgatgatcgtcgacgctgcggtggcgatgctggcctgcgcgcgcatcggtgcgatccactcggtggtgttcggtggcttcgcaccgaactcgatcgccgaccgcgtcagcgactgccagagcaagctgatcatcaccgccgacgagggcctgcgcggcggccggaagattccgctgaaggccaacgtcgatgccgcgctgaagctgcccggcaccaataccgtggaaaccgtgctggtggtgcgccacaccggcggcgcggtggacatgcaggcgccgcgcgaccgctggttccacgacgtagtggacagccaaccggccacctgcgaacccgagcgcatgaacgcggaagacccgctgttcatcctctacacctccggttccaccggcaagcccaagggcgtgctgcacaccaccggcggctacctgctgtacgcagcctacacccatgaagcggtgttcgacctgcgcgaggacgacatctactggtgcaccgccgacgtcggctgggtcaccggccacagctacatcgtgtacgggccgctggccaacggcgcgacctcgctgatgttcgaaggcgtgccgaactatccggatacctcgcgcttctggaacgtgatcgacaagcacaaagtgtcgatcttctacaccgctccgaccgccatccgcgcgctgatgcgcgagggcgaggagccggtgaagaagacttcgcgcgcctcgctgcgcctgctcggcagcgtcggcgagccgatcaatccggaagcctggcgctggtattacgaggtggtcggcgacagccgctgcccgatcgtcgatacctggtggcagaccgaaaccggcggcatcctgatctcgccgctggccggtgcaatggacctcaagccgggctcggccaccctgcccttcttcggcgtgcagccggcgctggtcaatgccgatggcgagatccaggacggcccgaccgagggcaacctgatcatccgtgattcctggccgggccagatgcgaacggtgtacggcgaccaccagcgtttcatcgacacctatttccgtacctacccgggcagctacttcaccggcgacggttgccgccgcgacgaggaaggctactactggatcaccggccgcgtcgacgatgtgatcaatgtgtccggccaccgcatcggcaccgccgaagtggaaagcgcgctggtctcgcacccgaaggtggccgaagcggccgtggtcggtttcccgcacgacgtgaagggccagggcatctacgcctacgtgaccctggtggccgaagaagcaccgagcgacgaactgcagaaggaactggtcgcctgggtgcgcaaggagatcggaccgatcgccacgccggaccacctgcagtgggcgccgggcctgccgaagacccgctcgggcaagatcatgcgccgtatcctgcgcaagatcgccgagaacgcaccggaccagctcggtgacacctcgaccctggccgatccgtcggtggtggcgtcgctggtggacgagcgcaaggtgcgctga

SEQ ID NO: 151717 - protein, 647 aa, Stenotrophomonas sp. SKA14
MADIYPVDPQFAAKARIDKTSYEQQYQASVTDPDGFWGKAAERLQWMRKPTKIKNVSYDLSDFHIKWFEDGELNASVNCLDRQLDTRGDKTALLFEPDGPDAPAQHVTYRELYERTCRLGNALRNLGVKKGDRVTIYLPMIVDAAVAMLACARIGAIHSVVFGGFAPNSIADRVSDCQSKLIITADEGLRGGRKIPLKANVDAALKLPGTNTVETVLVVRHTGGAVDMQAPRDRWFHDVVDSQPATCEPERMNAEDPLFILYTSGSTGKPKGVLHTTGGYLLYAAYTHEAVFDLREDDIYWCTADVGWVTGHSYIVYGPLANGATSLMFEGVPNYPDTSRFWNVIDKHKVSIFYTAPTAIRALMREGEEPVKKTSRASLRLLGSVGEPINPEAWRWYYEVVGDSRCPIVDTWWQTETGGILISPLAGAMDLKPGSATLPFFGVQPALVNADGEIQDGPTEGNLIIRDSWPGQMRTVYGDHQRFIDTYFRTYPGSYFTGDGCRRDEEGYYWITGRVDDVINVSGHRIGTAEVESALVSHPKVAEAAVVGFPHDVKGQGIYAYVTLVAEEAPSDELQKELVAWVRKEIGPIATPDHLQWAPGLPKTRSGKIMRRILRKIAENAPDQLGDTSTLADPSVVASLVDERKVR

SEQ ID NO: 151718 - DNA, 1956 bp, Brucella ceti M644/93/1
  CDS (1)..(1956): transl_table=11
atgtcggaaaagctttaccgcgtgctgccggaggcaaagaaaaacacgctcatcgacaacgagacttatctcgaatggtatgaggagagcgtgagcgacccggatggcttctgggccaagcacggccggcgtatcgactggttcaagcctttcaccaaggtcaagaacaccgatttcaacggcgatgtaacgatcaagtggtatgaggatggcgtcaccaacgtctcatataattgcatcgaccgccatctgaagagccgcggcgacaaggtcgccatcatctgggaaggcgacaacccctatatcgacaagaagatcacctatcgcgagctttacgagaatgtctgccgcatggcgaatgtgctcaagaagcatggggtgaagaagggcgaccgcgtcacgatctatctgccgatgatcccggaagccgcctatgccatgctcgcctgcgcgcgcatcggcgccgtgcattcggtcgtctttgccggtttctcgccggaggcgctcgctggccgcatcgttgactgcgaatccactttcgtcatcaccgccgatgaaggtgtgcgcggcggcaagcctgttgcgctgaaggaaaacaccgataccgccatcgacatcgccgccaagcaatatgtgatggtcaacaaggtgctggtcgtgcgccgcaccggcggcaaggtaagctggggccgcggccgcgatctgtggtaccatcaggaagtcgcaagcgtcgaaccgcattgcgaaccggaaccgatgaatgcggaagacccgcttttcattctctacacatccggttccaccggcaagccgaagggtgtgctgcataccaccggcggctacctcgtctatgcctcgatgacgcatcaatatgtcttcgattaccatgatggcgagatctactggtgcacggcggatgtgggttgggtaacgggccactcctatatcgtctacggaccgctggccaatggcgcgacaacgctgatgtttgaaggcgtgcccaacttccccgatcagggccgtttctgggaagtcgtcgacaagcaccatgtcaatatcttctacaccgcgccaaccgcgctgcgcgcgcttatgggcgcgggcgatgaattcgtaacccgctcatcgcgttcgacgctgcgcctgctgggctcggtcggcgagccgatcaatccagaggcctgggagtggtattacaatgtcgtgggcgaccagaaatgccccatcgtcgatacctggtggcagacggaaaatggcggcatcctcatcaccccacttcccggcgcgaccgatttgaaacccggttcggcaacacgcccgttcttcggcgtcaagccggtgctggtggacaatgaaggcaatgtgcaggagggcgtagccgacggcaacctgtgcatctccgactcctggccgggccagatgcgcaccgtctatggcgaccacaagcgtttcatcgaaacctacttctccacctataaggggatgtatttttcgggcgatggctgccgccgcgacgaggacggctattactggatcaccggccgcgtcgatgacgtgctgaatatttccggccatcgcctcggcacggcggaaatcgaatcggcacttgtctcgcatcactcggtttcggaagccgccgtggtcggctatccgcacccgatcaagggacagggcatctattgctatgtcacgctgatgaccggcgcagacgcgcaggacccggacgagttgcgcaaggaactggtccagcatgtgcgcaaggaaatcggccccatcgccacaccggacaagatccagtttgcgcccggactgccgaaaacccgttccggcaagatcatgcgccgcatcctgcgcaagatcgccgaagacgagttcggcgcattgggcgacacctcaacgctcgccgatccgggcgtggtggacgacctgatcgaaaatcgccagaacaagaaatga

SEQ ID NO: 151719 - protein, 651 aa, Brucella ceti M644/93/1
MSEKLYRVLPEAKKNTLIDNETYLEWYEESVSDPDGFWAKHGRRIDWFKPFTKVKNTDFNGDVTIKWYEDGVTNVSYNCIDRHLKSRGDKVAIIWEGDNPYIDKKITYRELYENVCRMANVLKKHGVKKGDRVTIYLPMIPEAAYAMLACARIGAVHSVVFAGFSPEALAGRIVDCESTFVITADEGVRGGKPVALKENTDTAIDIAAKQYVMVNKVLVVRRTGGKVSWGRGRDLWYHQEVASVEPHCEPEPMNAEDPLFILYTSGSTGKPKGVLHTTGGYLVYASMTHQYVFDYHDGEIYWCTADVGWVTGHSYIVYGPLANGATTLMFEGVPNFPDQGRFWEVVDKHHVNIFYTAPTALRALMGAGDEFVTRSSRSTLRLLGSVGEPINPEAWEWYYNVVGDQKCPIVDTWWQTENGGILITPLPGATDLKPGSATRPFFGVKPVLVDNEGNVQEGVADGNLCISDSWPGQMRTVYGDHKRFIETYFSTYKGMYFSGDGCRRDEDGYYWITGRVDDVLNISGHRLGTAEIESALVSHHSVSEAAVVGYPHPIKGQGIYCYVTLMTGADAQDPDELRKELVQHVRKEIGPIATPDKIQFAPGLPKTRSGKIMRRILRKIAEDEFGALGDTSTLADPGVVDDLIENRQNKK

SEQ ID NO: 151720 - DNA, 1956 bp, Brucella sp. 83/13
  CDS (1)..(1956): transl_table=11
atgtcggaaaagctttaccccgtgctgccggaggcaaagaaaaacacgctcatcgacaacgagacttatctcgaatggtatgaggagagcgtgaaagacccggatggcttctgggccaagcacggccggcgtatcgactggttcaagcctttcaccaaggtcaagaacaccgatttcaacggcgatgtaacgatcaagtggtatgaggatggcgtcaccaacgtctcatataattgcatcgaccgccatctgaagagccgcggcgacaaggtcgccatcatctgggaaggcgacaacccctatatcgacaagaagatcacctatcgcgagctttacgagaatgtctgccgcatggcgaatgtgctcaagaagcatggggtgaagaagggcgaccgcgtcacgatctatctgccgatgatcccggaagccgcctatgccatgctcgcctgcgcgcgcatcggcgccgtgcattcggtcgtctttgccggtttctcgccggaggcgctcgctggccgcatcgttgactgcgaatccactttcgtcatcaccgccgatgaaggtgtgcgcggcggcaagcctgttgcgctgaaggaaaacaccgataccgccatcgacatcgccgccaagcaatatgtgatggtcaacaaggtgctggtcgtgcgccgcaccggcggcaaggtaagctggggccgcggccgcgatctgtggtaccatcaggaagtcgcaagcgtcgagccgcattgcgaaccggaaccgatgaatgcggaagacccgcttttcattctctacacatccggttccaccggcaaaccgaagggggtgctgcataccaccggcggctacctcgtctatgcctcgatgacgcatcaatatgtcttcgattatcatgatggcgatatctactggtgcacggcggatgtgggctgggtaacgggccactcttatatcgtctacggaccgctggccaatggcgcgacgacgctgatgtttgaaggcgtgcccaacttccccgatcagggccgtttctgggaagtcgtcgacaagcaccatgtcaatatcttctacactgcgccaaccgcgctgcgcgcgcttatgggcgcaggcgacgaattcgtaacccgctcatcgcgttcgacgctgcgcctgctgggctcggtcggcgagccgatcaatccggaggcatgggagtggtattacaatgtcgtgggcgaccagaaatgccccatcgtcgatacctggtggcagacggaaaatggcggcatcctcatcaccccgcttcccggcgcgaccgatttgaaacccggttcggcaacacgcccgttcttcggcgtcaagccggtgctggtggacaatgacggcaatgtgcaggagggcgtggccgacggcaacctgtgcatctccgactcctggccgggccagatgcgcaccgtctatggcgaccacaagcgtttcatcgaaacctacttctccacctataaggggatgtatttttcgggcgatggctgccgccgcgacgaggatggctattactggatcaccggccgcgtcgatgacgtgctgaatatttccggccatcgcctcggcacggcggaaatcgaatcggcacttgtctcgcatcattcggtttcggaagctgccgtggtcggctatccgcacccgatcaagggacagggcatctattgctatgtcacgctgatgaccggcgcagacgcgcaggacccggacgagttgcgcaaggaactgatccagcatgtgcgcaaggaaatcggccccatcgccacaccggacaagatccagtttgcgcccggactgccgaaaacccgttccggcaagatcatgcgccgcatcctgcgcaaaatcgccgaagacgagttcggcgcattgggcgacacctcaacgctcgccgatccgggcgtggtggacgacctgatcgaaaatcgccagaacaagaaatga

SEQ ID NO: 151721 - protein, 651 aa, Brucella sp. 83/13
MSEKLYPVLPEAKKNTLIDNETYLEWYEESVKDPDGFWAKHGRRIDWFKPFTKVKNTDFNGDVTIKWYEDGVTNVSYNCIDRHLKSRGDKVAIIWEGDNPYIDKKITYRELYENVCRMANVLKKHGVKKGDRVTIYLPMIPEAAYAMLACARIGAVHSVVFAGFSPEALAGRIVDCESTFVITADEGVRGGKPVALKENTDTAIDIAAKQYVMVNKVLVVRRTGGKVSWGRGRDLWYHQEVASVEPHCEPEPMNAEDPLFILYTSGSTGKPKGVLHTTGGYLVYASMTHQYVFDYHDGDIYWCTADVGWVTGHSYIVYGPLANGATTLMFEGVPNFPDQGRFWEVVDKHHVNIFYTAPTALRALMGAGDEFVTRSSRSTLRLLGSVGEPINPEAWEWYYNVVGDQKCPIVDTWWQTENGGILITPLPGATDLKPGSATRPFFGVKPVLVDNDGNVQEGVADGNLCISDSWPGQMRTVYGDHKRFIETYFSTYKGMYFSGDGCRRDEDGYYWITGRVDDVLNISGHRLGTAEIESALVSHHSVSEAAVVGYPHPIKGQGIYCYVTLMTGADAQDPDELRKELIQHVRKEIGPIATPDKIQFAPGLPKTRSGKIMRRILRKIAEDEFGALGDTSTLADPGVVDDLIENRQNKK

SEQ ID NO: 151722 - DNA, 1950 bp, Thalassiobium sp. R2A62
  CDS (1)..(1950)
atgactgccaaaacctatgcccctaccgctgactttgccgcgaacgcccatgccgatgccgcaaagtaccaagagatgtacgacgcttctattgctgatcccgcagcgttctggggcgaacatggtaaacggatcgattggatcaagccctattcagccgtcaagaacacgacgtatgagttcggcaaggtcgacataaagtggtatgaagacggcagcctgaacgtcagtgccaactgcatcgatcgccatctcgcgacacgcggcgaccagacagcgatcatttgggaacccgatagcccagctgaagacgccaaacacatcacttacaaccagctgcacgccgaagtttccaaattcgccaacgtgctcaaagaactgggtgtcggcaaaggcgaccgcgtcgtcatatacatgccaatgatccccgaagcggcctatgccatgctggcatccgcgcgcattggtgcgatccattccatcgtctttgctggcttttcggcggacgcgctcgccgctcgtgtgaatggctctgaggccaaggtggtcatcacggcagacgaggcaccgcgaggcggcaagaacacaccgctcaaaaccaacgccgatacagcattcgagaaaattactgttggcgcaaaaatgctcgtggttcagcgcactggcggcgacgtcccaatggtcgatggtcgggatcactggttgcacgaagtttccgcaacagtctctgacacctgcgagccaaccgagatgaacgcagaggatccactcttcatcctctacacctctggatcaacgggcatgcccaagggcgtcgttcactcgaccggtggatatatcgtctatgcctcgatgacgcatcagtacacattcgattatcacgacggcgatatcttctggtgcaccgcggacgtgggctgggtcacaggccacagctatatcgtctatggccccctcgccaacggtgcgacgactgttatgtttgagggtgtaccgacgtacccagacgccagccgcttttggcaggtctgcgagaagcacaaggtaaaccaattctatacagcaccaaccgcgatacgcgcgttgatggggcaaggcgacgactttgtcaccggatcagacctctcatcgctcaagctcttgggcacagtgggcgagccaatcaaccccgaggcttggaactggtataacgacgttgtgggcggcggccgttgcccaatcgttgacacgtggtggcagaccgaaacaggtggtcacctgctgacgcccctacccggcgcaacgacgacaaagcccggttcggccaccaaaccgttctttggcatccagcccgtgatcctcgagccgacaacaggcgaagaaatcactgaaaccgctgccgaaggcgtgctctgcatcaaagacagctggcctgctcaaatgcgtaccgtctggggtgatcacgagcgattcatgaagacctattttgccgactacaaaggctactactttaccggtgacggatgccgccgcgacgccgatggcgactattggatcacaggccgtgttgacgacgtcatcaacgtctcgggccaccgcatgggtacagccgaagtcgaatccgccctcgttgcccacccgaaagtcgccgaaagcgcggttgtcggctatccccacgacatcaagggtcagggcatctatgcctatgtcacgctgatgggcggcgaagagccaacagaagagctgcgcaaagagctagaggtttgggtccgttctgaaatcggcccgatcgccaaacccgacttgatccagtgggcccctgggctgccgaaaacacgttcgggtaaaatcatgcgccggatcctgcgcaaaatcgctgaaaatgactttggtgcattgggcgatacatcgacgctcgctgatccatcggtggttgatgatctgatcgaaaaccgcatgaaccgcagctga

SEQ ID NO: 151723 - protein, 649 aa, Thalassiobium sp. R2A62
MTAKTYAPTADFAANAHADAAKYQEMYDASIADPAAFWGEHGKRIDWIKPYSAVKNTTYEFGKVDIKWYEDGSLNVSANCIDRHLATRGDQTAIIWEPDSPAEDAKHITYNQLHAEVSKFANVLKELGVGKGDRVVIYMPMIPEAAYAMLASARIGAIHSIVFAGFSADALAARVNGSEAKVVITADEAPRGGKNTPLKTNADTAFEKITVGAKMLVVQRTGGDVPMVDGRDHWLHEVSATVSDTCEPTEMNAEDPLFILYTSGSTGMPKGVVHSTGGYIVYASMTHQYTFDYHDGDIFWCTADVGWVTGHSYIVYGPLANGATTVMFEGVPTYPDASRFWQVCEKHKVNQFYTAPTAIRALMGQGDDFVTGSDLSSLKLLGTVGEPINPEAWNWYNDVVGGGRCPIVDTWWQTETGGHLLTPLPGATTTKPGSATKPFFGIQPVILEPTTGEEITETAAEGVLCIKDSWPAQMRTVWGDHERFMKTYFADYKGYYFTGDGCRRDADGDYWITGRVDDVINVSGHRMGTAEVESALVAHPKVAESAVVGYPHDIKGQGIYAYVTLMGGEEPTEELRKELEVWVRSEIGPIAKPDLIQWAPGLPKTRSGKIMRRILRKIAENDFGALGDTSTLADPSVVDDLIENRMNRS

SEQ ID NO: 151724 - DNA, 1950 bp, Enhydrobacter aerosaccus SK60
  CDS (1)..(1950): transl_table=11
atgaagagctaccctcatagcgctgaatttgccgctaaagccaacaccactccccaaaaatacgccgagacctatcaagaatctatcgaaaacaatgaagcgttttgggcaaaacgcgctgaatggattgattggataaaaaaacccaccaaaatcaaaaacgtcaattatgacctaaacaattttagcattaaatggtttgaagatggtgagcttaatctatcggtcaactgtcttgaccgtcatgtggctgaaaacccttacaagcctgcgattatttgggaaggcgatcacccctcacttcacaaaatcatctcatacaaagagctacattcagaagtatgccgccttggtagcgcactgcgtcgtaaaggcgtcaaaaaaggcgaccgcgtcaccatttatttgccgatgattcctgaagcggcggttgcgatgctggcttgtgctcggattggcgcggttcactcattggtatttggcgggttttcagcagacagtctagccagccgtatcatcgatagccaatcaaaaattgtcattaccgctgatgaatctgtgcgtggtggtaaacatacgccgcttaaacaaaatgtggatcgtgcgctagaccaggacggtaccgaatgtgttgaaaatgtcattgtggtgtaccgtaccggtgaatccatcccaatgagcggacgccgcgacatttggtatcacaacttaatcgacaacgcctctgaagactgtccaccagagccaatgaatgccgaagacccgctatttttgctttacacttcaggctcaactggcaagcctaaaggcgtggtacacaccaccggtggttatttgacctatgcgttatccaccttccgtgacgtgtttgatatcaaagacaatgacgtattttggtgtaccgcggatgtgggctgggttactggtcacacctatgtggtatatggaccgcttgccaatggtacaacaaccgtgatgtttgaaggggtgccacagtacccagattgggcgcgtatcggtcatatcgttgataagcatgacgttaccatcctatatactgcgccaaccgccattcgcgcgatgatgaaagaaggcgatgattacgtccgtaaatcaaaccgttctagcttacgtctattgggctcggtgggtgaacctatcaatcctgaagcctggaactggtactataacgtggtgggcgaaggacgttgtccgattgttgatacttggtggcaaactgaaacagggggtattttgatgacgccaatccccaatacggttgatcttaaaccaggctctgcgatgaatccgctgtatggcgtcatgccagcgattgtcgatgccgaaggtgctgaattaacgggtgctgccgaaggcaacttaatcatcaaagacagttggccaggtcaaatgcgtaccatttggggagaccataaacgcttcttagaaacttactttagcacctatcccggcgcttacttcacaggtgatggtgctctgcgcgatgaagacggtcattattggatcacaggtcgtgtggatgatgtcttaaacgtctctgggcatcgcctagggacagcagagattgaaagtgcgttagtatcgcatccttccgtcgctgaagcagctattgtcggtatgccgcatgagcttaaaggtcaaggcgttgccgcttacgtcatcttaaaatcgggcgaagagccaagcgaaatgcttaaaggtgaaatcaaccgtcatgtccgtggtgagattggtccaatcgccaacttagactcgctctacttggtcgaagcattaccaaaaacgcgctccggtaaaatcatgcgccgtattctgcgtaaacttgccgcgcatgaatttgaaggtttaggcgatacttcaaccttggcagaaccagaggtggttgataaccttatcaatgtggttaaagctgataaacagcctgcttag

SEQ ID NO: 151725 - protein, 649 aa, Enhydrobacter aerosaccus SK60
MKSYPHSAEFAAKANTTPQKYAETYQESIENNEAFWAKRAEWIDWIKKPTKIKNVNYDLNNFSIKWFEDGELNLSVNCLDRHVAENPYKPAIIWEGDHPSLHKIISYKELHSEVCRLGSALRRKGVKKGDRVTIYLPMIPEAAVAMLACARIGAVHSLVFGGFSADSLASRIIDSQSKIVITADESVRGGKHTPLKQNVDRALDQDGTECVENVIVVYRTGESIPMSGRRDIWYHNLIDNASEDCPPEPMNAEDPLFLLYTSGSTGKPKGVVHTTGGYLTYALSTFRDVFDIKDNDVFWCTADVGWVTGHTYVVYGPLANGTTTVMFEGVPQYPDWARIGHIVDKHDVTILYTAPTAIRAMMKEGDDYVRKSNRSSLRLLGSVGEPINPEAWNWYYNVVGEGRCPIVDTWWQTETGGILMTPIPNTVDLKPGSAMNPLYGVMPAIVDAEGAELTGAAEGNLIIKDSWPGQMRTIWGDHKRFLETYFSTYPGAYFTGDGALRDEDGHYWITGRVDDVLNVSGHRLGTAEIESALVSHPSVAEAAIVGMPHELKGQGVAAYVILKSGEEPSEMLKGEINRHVRGEIGPIANLDSLYLVEALPKTRSGKIMRRILRKLAAHEFEGLGDTSTLAEPEVVDNLINVVKADKQPA

SEQ ID NO: 151726 - DNA, 1956 bp, Pantoea sp. At-9b
  CDS (1)..(1956): transl_table=11
atgagccaaattcacaagcaccccgttcctgctgcaattgccgaaaacgccctgattaatgcagagcaatatgcagcgatgtatcaacagtcggttgacgatcccgaaaccttttggggcgagcaaggcaaaattctcgactggattaccccttatagcaaagtgaagaacacttcctttgccccggggaatgtcgccattcgttggtatgaagatggcacgctcaatctcgcggccaactgccttgatcgccatctggcaagccgtggcgaccatcctgccatcatctgggagggcgatgacgccaacgagagcaaaaccctgacgttccgtcagttgcatgctgacgtgtgtcgcttcgccaatgtactcggcagcctcggcgtgaagaaaggcgatgtggtcgccatttatatgccgatggtgccggaagcagcgatagccatgctggcctgtgcgcgcattggtgcggtgcattccgtgatttttggcggtttctcacccgaagccgtcgctggacgcatcatcgactcgaacgccaaactggtgattaccgcagatgaaggcatccgcgccggacgcggcatcccgctgaagaaaaacgtcgatgacgcgctgaacaacccgaatgtcaccagtgtgaaaaacgtggtggtatttaaacgcaccggtaaagataccggctggcgtgaaggacgcgacctgtggtggcatgatttgatggctgatgccgccgatcaacatcaaccggtggcgatgaatgcggaagacccgctgtttattctgtacacctccggctccaccggcaagccgaaaggcgtgctgcataccaccggcggttatctggtgtatgccgcgaccacctttaagtatgtatttgattatcatcctgaagatgtttactggtgtaccgccgatgtcggctgggttaccggacacagctacctgatttatggcccactggcctgcggtgccaccacgctgatgttcgaaggcgtgccgaactggccgaaaccgagccgcatggcagaagtggtcgataaacataaagtgactctgctctacaccgctccgaccgcgattcgcgccctgatggccgagggcgataaagccatcgaaggcaccgaccgcagcagcctgcgcattatgggatcggtgggtgaaccaattaacccggaagcctgggagtggtactacaacaagattggtgatggccgttgcccgatcgtcgatacctggtggcagaccgaaaccggtggtttcatgatcaccccattgccgggtgccattgagctgaaagctggctccgcgaccaaaccgttcttcggtgtacaaccggcgctggtcgataacgaaggcaatacgctggaaggtgcaacggaaggcaatctggtgattgttgattcgtggcctggccaggcgcgaaccctgtttggcgatcatgatcgttttgagcagacttacttctccaccttcaagaaccgttacttcagcggtgacggcgcgcgtcgtgatgaagatggttactactggatcaccgggcgtgttgatgacgtactgaacgtctccggccaccgtctcggcaccgctgagattgagtcagcgttggtgtcgcatccgaagattgctgaagcggcggtagtcggcattccgcacagcatcaagggccaggcgatctatgcttatattacgctgaaccacggtgaggagccgtcgccagaactttacaccgaggtgcgtaattgggtgcgtaaagagattggcccgattgccacccctgacgtgctgcactggaccgattcgctgccgaaaacccgctccggcaaaatcatgcgccgtattctgcgcaagatcgccacgggcgacaccagcaatctgggcgatacctcgacactggccgatcctggcgtcgtggaaaaattactggaagaaaaacagtctatcaaaatgccgtaa

SEQ ID NO: 151727 - protein, 651 aa, Pantoea sp. At-9b
MSQIHKHPVPAAIAENALINAEQYAAMYQQSVDDPETFWGEQGKILDWITPYSKVKNTSFAPGNVAIRWYEDGTLNLAANCLDRHLASRGDHPAIIWEGDDANESKTLTFRQLHADVCRFANVLGSLGVKKGDVVAIYMPMVPEAAIAMLACARIGAVHSVIFGGFSPEAVAGRIIDSNAKLVITADEGIRAGRGIPLKKNVDDALNNPNVTSVKNVVVFKRTGKDTGWREGRDLWWHDLMADAADQHQPVAMNAEDPLFILYTSGSTGKPKGVLHTTGGYLVYAATTFKYVFDYHPEDVYWCTADVGWVTGHSYLIYGPLACGATTLMFEGVPNWPKPSRMAEVVDKHKVTLLYTAPTAIRALMAEGDKAIEGTDRSSLRIMGSVGEPINPEAWEWYYNKIGDGRCPIVDTWWQTETGGFMITPLPGAIELKAGSATKPFFGVQPALVDNEGNTLEGATEGNLVIVDSWPGQARTLFGDHDRFEQTYFSTFKNRYFSGDGARRDEDGYYWITGRVDDVLNVSGHRLGTAEIESALVSHPKIAEAAVVGIPHSIKGQAIYAYITLNHGEEPSPELYTEVRNWVRKEIGPIATPDVLHWTDSLPKTRSGKIMRRILRKIATGDTSNLGDTSTLADPGVVEKLLEEKQSIKMP

SEQ ID NO: 151728 - DNA, 1959 bp, Silicibacter sp. TrichCH4B
  CDS (1)..(1959)
atgaccacgcccgagagcgcagtgtacccgccgtctgaggacatcatcaaaaacgcgcatattgatgctgcgaaatatgatgagatgtacgcgcaatccattcagaacccagagaaattctgggccgagcaggcagagcgtatcacctggattaagcctttcaccaaggtcaaagatgtctcctacgactttggcaatgtgaacatcaaatggttcgaagacggccaattgaacgtcgccgccaactgcattgatcgccatttggcgacccgtggcgatcagaccgcgatcatctgggaacccgatgatccgaacgaggatgccaagcatatctcctataaggagctgcatctgaagacctgccgcatggccaatatcctagagagcctgggcgtcggcaaaggcgaccgcgtggtgatttatctgccgatgatccccgaagcggcctatgccatgctggcctgcgcgcgcatcggtgccatccactccattgtgtttgcaggcttttcgccggacgcactggcggcacgggtcaatggctgtgatgcaaaggttgtaatcaccgcagacgaggccccgcgtggcggtcgcaaaacaccgctgaaatcaaacgccgacgccgcgctcctgcactgcaaagagagcgtcaaatgtctggtggtgcgccgcaccggcggccagaccacttggatcgatgggcgcgactacgactacaacgagatggcactggaggcgaacgactactgtaagcctgccgagatgaattccgaggatccgctgtttatcctctacacctccggctctaccggccagcccaagggtgtggtgcataccaccggcggctatctgacctacgcagcgctgacccatgaggtgactttcgattaccacgacggcgacatctactggtgcacagcggatgtgggctgggtcacgggccacagctacatcgtctatggccccctcgccaatggcgcgaccacgctgatgtttgagggcgtgcccacctaccccgacgccggtcgattctgggcggtctgtgaaaagcacaaggtcaatcagttctataccgcgcccaccgccatccgtgcattgatggggcaaggaactgaatttgttgaaaaatacgatctctccgatctcaaagtgctgggcactgtgggagagccgatcaaccccgaagcgtggaactggtacaacgacgtcgtcggtaaaggcaaatgccccattgtcgacacttggtggcagaccgaaaccggcggccacctgatgacgccgctgcccggcgcgcatgccaccaagcccggcgcagccatgaagccgtttttcgggattgagccagtggttcttgacccgcaatccggcgcggaaatcgagggcaatggtgtcgaaggtgtcctgtgtatcaaggatagctggcccggtcagatgcgcaccgtttggggcgatcatgaacggttcgagaaaacctatttctccgactacaaaggctactatttcacgggtgatggctgccgccgcgatgaggggggcgattactggatcaccggacgcgtcgacgacgtgatcaacgtctccggtcaccgcatgggcaccgccgaggtcgaaagcgcattggtcgcacatgccgccgtggccgaggccgccgtggtgggctacccgcatgagatcaaaggtcagggcatctactgctatgtgaccctcatgaatgatcgtgagccatcggatgagctcatgaaggagctgcgccagtgggtgcgtacggaaatcggcccgattgcctcaccggatgtgatccaatgggcgccgggcctgccaaagacccgttcaggcaagatcatgcgccgtatcctgcgcaaaattgcggaaaacgattttggcagccttggcgatacctcgaccctcgcggacccgtccgtcgtggacgatctgatcaccaaccgcgccagcaaggggtaa

SEQ ID NO: 151729 - protein, 652 aa, Silicibacter sp. TrichCH4B
MTTPESAVYPPSEDIIKNAHIDAAKYDEMYAQSIQNPEKFWAEQAERITWIKPFTKVKDVSYDFGNVNIKWFEDGQLNVAANCIDRHLATRGDQTAIIWEPDDPNEDAKHISYKELHLKTCRMANILESLGVGKGDRVVIYLPMIPEAAYAMLACARIGAIHSIVFAGFSPDALAARVNGCDAKVVITADEAPRGGRKTPLKSNADAALLHCKESVKCLVVRRTGGQTTWIDGRDYDYNEMALEANDYCKPAEMNSEDPLFILYTSGSTGQPKGVVHTTGGYLTYAALTHEVTFDYHDGDIYWCTADVGWVTGHSYIVYGPLANGATTLMFEGVPTYPDAGRFWAVCEKHKVNQFYTAPTAIRALMGQGTEFVEKYDLSDLKVLGTVGEPINPEAWNWYNDVVGKGKCPIVDTWWQTETGGHLMTPLPGAHATKPGAAMKPFFGIEPVVLDPQSGAEIEGNGVEGVLCIKDSWPGQMRTVWGDHERFEKTYFSDYKGYYFTGDGCRRDEGGDYWITGRVDDVINVSGHRMGTAEVESALVAHAAVAEAAVVGYPHEIKGQGIYCYVTLMNDREPSDELMKELRQWVRTEIGPIASPDVIQWAPGLPKTRSGKIMRRILRKIAENDFGSLGDTSTLADPSVVDDLITNRASKG

SEQ ID NO: 151730 - DNA, 1956 bp, Mesorhizobium opportunistum WSM2075
  CDS (1)..(1956): transl_table=11
atgtccgaggttcatgtccatcgtgtccagccggcgtggaagaagaatgcgctgatcgacaatgatacctacctgaaatggtatgccgacagcatgaagaacccggacaagttctggggcaagcacggcaagcggatcgactggttcaagccctacagcaaggtcaagaacacctccttcgacggcaaggtctcgatcaagtggttcgaggacgggctgaccaacgtttcgtacaactgcatcgatcgccacctgaagaagcgcggcaaccagaccgccatcatctgggaaggtgacaacccctacgacgacaagaagatcacctacaacgagctttacgagcatgtctgccggctcgccaacgtgatgaagaagcacggcgtcaagaagggcgaccgcgtcaccatttacatgccgatgatcccggaggccgcctatgcaatgctggcctgcacccgtatcggcgccatccattcgatcgtcttcggcggcttttcgccggacgcgctggcaggccgtatcgacgattgcaagtcgactttcgtcatcaccgccgacgagggcctgcgcggcggcaagccgatcccgctgaaggagaacaccgacaaggcgatcgagatcgcagccaaggccggcaccaaagtcgaaaaggtggtggtcgtgcgccgcaccggcggcaagatcggctgggctccgggccgcgacgtctggtaccacgacgaggtcgcgacggtgaaggccgagtgcaagccggagaagatgaaggccgaggatccgctgttcatcctctacacctccggctcgaccggcaagccgaagggtgtgctgcacaccaccgccggctacctcgtctatgtctcgatgacgcaccaatatgtcttcgactatcatgacggcgacatctactggtgcaccgccgatgtcggctgggtgaccggccacagctacatcgtctatggcccgctcgccaacggcgccaccacgctgatgttcgagggcgtgccgaattatccgtcgcagtcgcgcttctgggaagtcatcgacaagcacaaggtcaacatcttctacaccgcgccgaccgcattgcgcgcgctgatgggcgccggcaacgatcctgtgaagaagacctcgcgcaagtcgctgcgcgtgctgggatcggtcggcgagccgatcaacccggaagcctgggagtggtatttcaacgtcgtcggcaacggcaaggtaccgatcgtcgacacctggtggcagaccgagaccggcggcatcctgatcacgccgctgcccggcgccaccgatctcaaggcgggttcggcgacgcggcctttcttcggcatcaagccgcagttggtcgacggcgaaggcaaggtgctggaaggggcggccgacggcaatctctgcatcaccgattcctggcccggccagatgcgcaccgtctatggcgatcacgatcgtttcgtgcagacctatttttccacctacaagggcaagtacttcaccggtgacggctgccgccgcgacgccgacggctactactggatcaccggccgcgtcgacgacgtcatcaacgtttccggccatcgcatgggcacggccgaagtcgaatcggcgctggtcagccatgagaaggtctccgaggccgctgtcgtcggctacccgcacgacatcaagggtcagggcatctacagctacgtcaccttgatgaagggtgccgaaccgaccgaagagctgcgcaaggagcttgtcgcccatgtccgcaaggagatcggcgccatcgcctcgcccgacaagatccagttcgcgcccggcctgcccaagacgcgttccggcaagatcatgcgccgcatcctgcgcaagatcgccgaggacgattttgccgcccttggcgatacctcgacactcgccgatccagccgtggtcgacgatctggttgccaaccggcagaacaagaagggctga

SEQ ID NO: 151731 - protein, 651 aa, Mesorhizobium opportunistum WSM2075
MSEVHVHRVQPAWKKNALIDNDTYLKWYADSMKNPDKFWGKHGKRIDWFKPYSKVKNTSFDGKVSIKWFEDGLTNVSYNCIDRHLKKRGNQTAIIWEGDNPYDDKKITYNELYEHVCRLANVMKKHGVKKGDRVTIYMPMIPEAAYAMLACTRIGAIHSIVFGGFSPDALAGRIDDCKSTFVITADEGLRGGKPIPLKENTDKAIEIAAKAGTKVEKVVVVRRTGGKIGWAPGRDVWYHDEVATVKAECKPEKMKAEDPLFILYTSGSTGKPKGVLHTTAGYLVYVSMTHQYVFDYHDGDIYWCTADVGWVTGHSYIVYGPLANGATTLMFEGVPNYPSQSRFWEVIDKHKVNIFYTAPTALRALMGAGNDPVKKTSRKSLRVLGSVGEPINPEAWEWYFNVVGNGKVPIVDTWWQTETGGILITPLPGATDLKAGSATRPFFGIKPQLVDGEGKVLEGAADGNLCITDSWPGQMRTVYGDHDRFVQTYFSTYKGKYFTGDGCRRDADGYYWITGRVDDVINVSGHRMGTAEVESALVSHEKVSEAAVVGYPHDIKGQGIYSYVTLMKGAEPTEELRKELVAHVRKEIGAIASPDKIQFAPGLPKTRSGKIMRRILRKIAEDDFAALGDTSTLADPAVVDDLVANRQNKKG

SEQ ID NO: 151732 - DNA, 1959 bp, Enterobacter cancerogenus ATCC 35316
  CDS (1)..(1959): transl_table=11
atgagccaagtacacaaacacgacattcccgcaaacattgcggaccgttgcctgataagccccgagcagtaccacgagaagtatcagcaatccatcaccagcccggatgcgttctggggtgagcagggtcatattcttgactggatcacgccctatcagaaggtgaaaaacacctccttcgcgccggataacgtctccattaaatggtatgaagacggcacgctaaacctggcggcaaactgcctggatcgccaccttgccgagcgcggcaatgaaacggccatcatctgggaaggcgacgacgcttctcagagtaaacacattacctataatgaactgcaccgcgacgtgtgccgctttgccaacgtgctgctggaccagggcatcaaaaaaggcgacgttgtggcgatttatatgcctatggtcccggaagcggccgtggcgatgctggcctgcgcgcgtatcggcgcgatccactccgttattttcggcggcttttcgcctgaagcagtggccgggcgcatcatcgactccagctctaagctggtgatcaccgccgatgaaggcgtacgcgccgggcgcggcattccgctgaagaaaaacgtcgatgaggcgctgaaaaatccgaacgtaaaaaccatcagcaacgttatcgtgtttaaacgtaccggcggcaacatcgactggcacgaaggacgcgacctgtggtggagcgacctgatggcgaacgccagcgaccagcatcagccagaagagatgaacgcggaagatccgctgtttatcctttatacctcggggtcgaccggcaagccgaagggcgtgctgcacaccaccggtggctatctggtttacgcggcgactaccttcaaatatgtgttcgattaccatccgggcgacatttactggtgtaccgccgacgtaggctgggtcaccggccacagctacctgctgtatggcccgctggcctgcggggccaccacgctgatgttcgagggcgtgccaaactggccgaccccggcgcgcatgtgccaggtggtcgacaaacatcaggttaacattctctataccgcccctacggcgatccgcgccctgatggcggaaggggataaggcgattgaaggcaccgaccgctcttcgctgcgcattctgggttctgtgggcgagccgattaacccggaagcctgggagtggtactggaagaagatcggcaacgagaaatgcccggtgatggatacctggtggcagaccgaaaccggcgggttcatgatcaccccgctaccgggtgccacgccgctgaaagcggggtcggcaacgcgtccgttcttcggcgtgcagccggcgctggtggataacgaaggtaacccgcttgagggcgccaccgagggcaacctggtgatcaccgattcctggcctggccaggcccgcaccctgtttggcgatcatgagcgcttcgagcagacctacttctccacctttaaaaacatgtatttcagcggcgacggcgcacggcgtgacgaagacggttactactggatcaccgggcgcgtggatgacgtgctgaacgtctccggccaccgtctgggcacggcagaaatcgaatccgcgctggtgtcccatccgaaaattgctgaagccgcagttgtcgggatcccgcacaacattaagggccaggcgatttatgcctacgtcacgctgaaccacggcgaagaaccgtcgccagagctgtatgccgaggtgcgcaactgggtgcgtaaagagattggcccgcttgccacgccggatgttctgcactggaccgactcgctgccgaaaacccgctccggcaagatcatgcgccgtattctgcgcaaaatcgcggcgggcgataccagcaacctcggcgatacctcaacgcttgccgatcctggcgtggtggacaaactgctcgaagagaagcaggccatcgcaatgccttcgtaa

SEQ ID NO: 151733 - protein, 652 aa, Enterobacter cancerogenus ATCC 35316
MSQVHKHDIPANIADRCLISPEQYHEKYQQSITSPDAFWGEQGHILDWITPYQKVKNTSFAPDNVSIKWYEDGTLNLAANCLDRHLAERGNETAIIWEGDDASQSKHITYNELHRDVCRFANVLLDQGIKKGDVVAIYMPMVPEAAVAMLACARIGAIHSVIFGGFSPEAVAGRIIDSSSKLVITADEGVRAGRGIPLKKNVDEALKNPNVKTISNVIVFKRTGGNIDWHEGRDLWWSDLMANASDQHQPEEMNAEDPLFILYTSGSTGKPKGVLHTTGGYLVYAATTFKYVFDYHPGDIYWCTADVGWVTGHSYLLYGPLACGATTLMFEGVPNWPTPARMCQVVDKHQVNILYTAPTAIRALMAEGDKAIEGTDRSSLRILGSVGEPINPEAWEWYWKKIGNEKCPVMDTWWQTETGGFMITPLPGATPLKAGSATRPFFGVQPALVDNEGNPLEGATEGNLVITDSWPGQARTLFGDHERFEQTYFSTFKNMYFSGDGARRDEDGYYWITGRVDDVLNVSGHRLGTAEIESALVSHPKIAEAAVVGIPHNIKGQAIYAYVTLNHGEEPSPELYAEVRNWVRKEIGPLATPDVLHWTDSLPKTRSGKIMRRILRKIAAGDTSNLGDTSTLADPGVVDKLLEEKQAIAMPS

SEQ ID NO: 151734 - DNA, 1944 bp, Acinetobacter johnsonii SH046
  CDS (1)..(1944): transl_table=11
atgaaagaagtctatcctgtacctgctgaatttgaaaaaactgcgcgcaccaatgaacaagaatattttgaacgttatcaaaaatcgatagaacaacctgatgaatattgggctgaacaagctttgaagctcgattggatcaagccttttagtcaagttaaaaacaccagttatgataaagataattttaaaattgaatggtttgcagatggtcagttaaacctaagtgctaactgccttgatcgccacttaaaagagcatccgtataaacccgccattatttgggaaggtgaccatccctcacgccataaaatcatttcctttgcagaactgtatgatgaagtgtgtcgtttttctaatgttctaaaaaagcatggtgtggtgaaaggcgatcgtgtagtgctgtatatgccgatgatttcagaagcggccatttcgatgttggcctgtgcccgaatcggtgccgtgcattgtgtggtgtttggcggtttctcgcctgattcattggcaagccgaattgatgacagtcaagccaaaattgtgattaccgcagactctggaatgcgcggggggaaacccattccgctgaaagaaaatgtagacgcagcattgaatctacctgggacagactcggtacaaaacgtgattgtggtacaccggacaggcaatccgattacgctgaaagaagggcgggatttgtggtatcacatggaaatcatgaccgttaacgagatttgtccacctgaaccgatgaatgccgaggatcccctgtttattttatatacctcaggttcaacgggtaagcccaaaggggtgctgcataccacagggggatatttaacttatgtgaatagtaccttccgtgaagtattcgacttaaaacaagatgatgtattttggtgtaccgccgatgtaggttggattacggggcactcttatgtgctgtatggccctttgtcgaatggaaccacaacagtgatgtttgaagggattccacaatatccaagttgggcacgtacaggacatattgtcgacaaacacaatgtgacgattttatacactgccccgacagcgatccgcgccatgatgcgcgaaggggatgcctttgtccgtgagagtgaccgtagcagtttgcgtttaattggttccgtcggagagccgatcaaccctgaagcatggaattggtactacacagtggtgggggaaagccgttgcccagtggttgatacttggtggcaaactgaaacaggcgggattttaatctctccacttccgggtgcgacaccacttaaaccggggtctgcaacgcgtcctttatttgggattcaacccgctttggttgatgttgaaggcaaagagttagaaggtgaggccgaaggcaatctggtgattaaggattcatggccgggacaaatgcgaaccatttggggggatcctgagcggtttatcgaagcgtattttgcaacttatccgggaacgtatttcacgggcgatggtgcacgccgtgataaagatggttattactggatcacaggtcgagtggatgatgtactgaatgtgtcagggcaccgcttaggcacggccgaagtggaaagtgctttggtggcacatgaggcggttgctgaggctgcggtggtgggaatgccacatgaaatcaaagggcagggaatttgttcctttgtcactttacaagcgggcgcagcgcaaacggaagaactccgtgcagagctgattcagtgggtacgaaaggtactcggtcctgtggcgacaccagatgccttacattgggcaccgtctttacccaaaacacgttcaggcaaaattatgcgccgtattttaagaaaaattgcggcgaacgagttagatagtttgggcgatacatcgacgctggctgaaccacaagtggtcgaagtgttgattaaagaagtatatccaaacggataa

SEQ ID NO: 151735 - protein, 647 aa, Acinetobacter johnsonii SH046
MKEVYPVPAEFEKTARTNEQEYFERYQKSIEQPDEYWAEQALKLDWIKPFSQVKNTSYDKDNFKIEWFADGQLNLSANCLDRHLKEHPYKPAIIWEGDHPSRHKIISFAELYDEVCRFSNVLKKHGVVKGDRVVLYMPMISEAAISMLACARIGAVHCVVFGGFSPDSLASRIDDSQAKIVITADSGMRGGKPIPLKENVDAALNLPGTDSVQNVIVVHRTGNPITLKEGRDLWYHMEIMTVNEICPPEPMNAEDPLFILYTSGSTGKPKGVLHTTGGYLTYVNSTFREVFDLKQDDVFWCTADVGWITGHSYVLYGPLSNGTTTVMFEGIPQYPSWARTGHIVDKHNVTILYTAPTAIRAMMREGDAFVRESDRSSLRLIGSVGEPINPEAWNWYYTVVGESRCPVVDTWWQTETGGILISPLPGATPLKPGSATRPLFGIQPALVDVEGKELEGEAEGNLVIKDSWPGQMRTIWGDPERFIEAYFATYPGTYFTGDGARRDKDGYYWITGRVDDVLNVSGHRLGTAEVESALVAHEAVAEAAVVGMPHEIKGQGICSFVTLQAGAAQTEELRAELIQWVRKVLGPVATPDALHWAPSLPKTRSGKIMRRILRKIAANELDSLGDTSTLAEPQVVEVLIKEVYPNG

SEQ ID NO: 151736 - DNA, 1944 bp, Acinetobacter junii SH205
  CDS (1)..(1944): transl_table=11
atgaaagaaatctacctagtgccagagaaatttaaagaaacggcaagaatctcggaaacagactatttcaaacgttatcagtactctatcgagcagccagatgcattctgggctgaagaagcgaaaaaggtcgattggatcaagccttttacccaagtgaaaaatactagttttcaacaggacaatttcaagatcgaatggtttgcagatggggagttgaacgtctccgcaaactgtttggatcgccatctaaaaactaacccgttaaagcctgccattatttgggaaggtgatcatccatcacgtcataaaattatttcttttgctgagttacatgacgaagtatgccgcttcgcaaatgtattgaaaaagcagggcattgtgaagggtgatcgtgtcgttttatatatgccaatggtacctgaagcagcaattgcgatgttggcttgtgcacgtattggggcagtccattgtgtagtgtttggtggtttctcacccgactcattggcgagtcgtattgaagatagccaagcaaaattagtgattactgcggatgctggcatgcgcggtggcaagcttattcctttgaaagagaatgtagatgcagctttgcaaatcaaagggacagaaagtgttgaacatgtaatcgtggttcatcgtactggaaacccaattcaattcaatgatgatcgtgacgtttggtaccaccttgccatcatggaagtggatgagcattgcccacctgaaccgatgaaagcggaagatcctctattcattctctatacctcgggttctacaggcaaaccaaaaggggtattacataccacgggtggttatttagtttatgtgaacaccacatttagagaagtctttgatctaaaagaagatgatgtgtactggtgtactgctgatgtgggttggattacaggacatagctatttgttgtatggtccattaagcaatgcaaccaccacagtaatgtttgaaggaattcctcaatacccaacatgggcacgtatcgggcatgtaattgataaacataacgttaccattttgtatactgcaccaactgcgattcgcgcgatgatgcgtgaaggtgatgcttatgtccgtgaaagtgatcgcagtagtttacgtttgcttggttcggtgggtgaaccaattaaccctgaagcatggaactggtatcacgaagtggtcggtgaaggccgttgcccaattgttgatacatggtggcaaactgaaacaggcggtattctaatttcaccattaccaggtgcaactgcactcaaaccaggttctgcaacacgtccattgtttggtgtgcaacctgctttagttgatggtgaaggcaacgagttagagggtgcagcagaagggaatcttgtcattaaagattcttggccaggtcaaatgcgtacgatttggggtgacccgcagcgttttatcgaagcttatttctcaacttttaaaaactgctatttcacaggagatggtgcacgccgtgatgctgatggctattactggattactggacgtgtagatgatgtgctgaatgtttcaggacaccgtttgggaacagctgaaatagaaagtgcgctagttgcgcatgaggcagtcgctgaagcggcggtcgttggtatgccacatgatattaaaggacaaggaatttgtacttttgtcactttgcaggctgatgttgcagaatctgaagaacttcgtaaagagctcgtggattgggtacgtaaagtacttggtcctgtggcgacaccagatgctttgcattgggcgcctgctttacccaaaacacgctcaggtaagatcatgcgtcgtatcttgcgtaagatcgcggcaaatgagttagatagcttaggagatacttcaacattggctgagccggcagtggtggaaaatctgattgcaacggtttatccaaatcgttga

SEQ ID NO: 151737 - protein, 647 aa, Acinetobacter junii SH205
MKEIYLVPEKFKETARISETDYFKRYQYSIEQPDAFWAEEAKKVDWIKPFTQVKNTSFQQDNFKIEWFADGELNVSANCLDRHLKTNPLKPAIIWEGDHPSRHKIISFAELHDEVCRFANVLKKQGIVKGDRVVLYMPMVPEAAIAMLACARIGAVHCVVFGGFSPDSLASRIEDSQAKLVITADAGMRGGKLIPLKENVDAALQIKGTESVEHVIVVHRTGNPIQFNDDRDVWYHLAIMEVDEHCPPEPMKAEDPLFILYTSGSTGKPKGVLHTTGGYLVYVNTTFREVFDLKEDDVYWCTADVGWITGHSYLLYGPLSNATTTVMFEGIPQYPTWARIGHVIDKHNVTILYTAPTAIRAMMREGDAYVRESDRSSLRLLGSVGEPINPEAWNWYHEVVGEGRCPIVDTWWQTETGGILISPLPGATALKPGSATRPLFGVQPALVDGEGNELEGAAEGNLVIKDSWPGQMRTIWGDPQRFIEAYFSTFKNCYFTGDGARRDADGYYWITGRVDDVLNVSGHRLGTAEIESALVAHEAVAEAAVVGMPHDIKGQGICTFVTLQADVAESEELRKELVDWVRKVLGPVATPDALHWAPALPKTRSGKIMRRILRKIAANELDSLGDTSTLAEPAVVENLIATVYPNR

SEQ ID NO: 151738 - DNA, 1947 bp, Acinetobacter lwoffii SH145
  CDS (1)..(1947): transl_table=11
atgcaagagatctatccagtacccgaagaatttaaaaaaacagcacgcacgctcgaagaccagtactttgaacgttatcagtattctatagaacagccagataaattttgggcagaacaggcgcaacgtctggactggatcaagccctttacccaagtcaaaaataccagctttaacaaagacgattttaaaatcgaatggtttgccgatggtcagctcaatgtcagtgccaattgtctggatcggcacctgaaagaacatccttataaaccggcgatcatctgggaaggggatcatccttcgcggcacaagattatttcctttgccgaactgcatgatgaaacctgccgttttgccaatgtgttgaagaaaaatggcatccagaaaggcgaccgggtcatgctgtatatgccgatggtctctgaagccgcgattgccatgctggcctgtgcccggatcggggcggtacattgcgtggtatttggtggtttctcgccagattctctggctagccggattgaagactgtcaggcgaaaatggtgattacagccgattccggcatgcgcggcggtaaggccattccgctgaaagccaatgtcgatgaggcactaaaactggcaggtacagactcgattcaaaatgtaatggtggtacaccgcaccggtaacccgattgaaatgcaggaagggcgtgatctgtggtatcacacggaaattatgtcagtgaatgacatctgcccaccggaaccgatgaatgccgaagatccgctgtttatcctgtatacctcaggttccaccggcaagcccaagggcgtgatgcataccactggcggttatctgacttatgtcaactgcaccttccgtgaagcgtttgatatcaagcaggatgatgtgttctggtgtaccgcagatgtcggctggatcactggacattcctatgtgctgtatgggccactttcgaatgggaccaccactgtgatgtttgaaggtgtaccgcaatatccaagctgggcgcgtactggacatattgttgataagcataacgtgaccattctctatactgcaccgaccgcgatccgcgccatgatgcgtgagggcgatgcttttgtacgggaaagtgaccgtagcagcctgagaattttaggatcggtcggtgagccaattaatccggaagcctggaactggtactacaccgtggtcggtgaaagccgctgtcccgtcatcgatacctggtggcaaaccgaaactggcggttttatgattacgccattgccgggtgcgactgatttaaaaccaggttctgcgacacggcctttcttcggggtacaaccggctattgtcgatgccgatggcaaggaactggagggtgaagctgagggaaatctggtgattaaggattcctggccgggtcagatgcgtaccatttggggagacccggagcgttttattgaagcttatttctctacctatcccggtacttattttaccggagatggggcgcgtcgcgataaagatggttattactggattaccggccgtgtcgatgatgtcctgaatgtatccggacaccgtttaggtactgcagaaattgaaagtgcactggtggcgcatgaatcggtagcagaggccgctgtagtcggtatgccgcatgatattaaaggtcagggaatttgtgcctttgtcaccttacaggctgatgttgccagttcagatcaattacgtggagaactggtcagctgggtacgcaagattctcgggccagtggcgactcccgatgccttgcactgggcaccggcattgccgaaaacccgttccggcaaaatcatgcgccggatattgagaaagattgcagccgatgagctggatagtctcggagatacttcgaccctagctgaaccgcaagtggtggatcatctgattgcagaggtacagcgtaataacgcttaa

SEQ ID NO: 151739 - protein, 648 aa, Acinetobacter lwoffii SH145
MQEIYPVPEEFKKTARTLEDQYFERYQYSIEQPDKFWAEQAQRLDWIKPFTQVKNTSFNKDDFKIEWFADGQLNVSANCLDRHLKEHPYKPAIIWEGDHPSRHKIISFAELHDETCRFANVLKKNGIQKGDRVMLYMPMVSEAAIAMLACARIGAVHCVVFGGFSPDSLASRIEDCQAKMVITADSGMRGGKAIPLKANVDEALKLAGTDSIQNVMVVHRTGNPIEMQEGRDLWYHTEIMSVNDICPPEPMNAEDPLFILYTSGSTGKPKGVMHTTGGYLTYVNCTFREAFDIKQDDVFWCTADVGWITGHSYVLYGPLSNGTTTVMFEGVPQYPSWARTGHIVDKHNVTILYTAPTAIRAMMREGDAFVRESDRSSLRILGSVGEPINPEAWNWYYTVVGESRCPVIDTWWQTETGGFMITPLPGATDLKPGSATRPFFGVQPAIVDADGKELEGEAEGNLVIKDSWPGQMRTIWGDPERFIEAYFSTYPGTYFTGDGARRDKDGYYWITGRVDDVLNVSGHRLGTAEIESALVAHESVAEAAVVGMPHDIKGQGICAFVTLQADVASSDQLRGELVSWVRKILGPVATPDALHWAPALPKTRSGKIMRRILRKIAADELDSLGDTSTLAEPQVVDHLIAEVQRNNA

SEQ ID NO: 151740 - DNA, 1947 bp, Rhodomicrobium vannielii ATCC 17100
  CDS (1)..(1947): transl_table=11
atgacgggcaaaatttatccagtctccgaggcctggagcagctcggcctacatcgatgaaaacaagtatcgcgcgctctacgagcagagcgtcagcgatcccgaaggtttctggggtgaacaggccgcccgcatcgactggatcaaaccgtttacaaaggtcaagaacacttcatacgatcctcataacgtctcgatcaagtggtacgaagacggctcgctgaatgttgccgcgaactgcatcgaccgccatctcgaaactcgtggcgaccagattgccatcatttgggaaggcgacgagccgaatctggatctcaaggtcacgtatcgagaactacatgaccgcgtcagccgcttcgcgaacgtgctcaagaagcacggcgtcaagaagggcgatcgcgtcacgatctaccttccgatgatccccgaggccgcctatgcgatgctcgcttgcgcgcgcatcggagcaatccattcagtcgttttcggcgggttctcgccggacagcctcgcgagccgcattgtcgactgcgactcgagcgtcgtcatcacggccgacgagggcgtgcgcggtggccgcaaggttccgctcaaggcgaacgccgacaaagcgcttgaaaagtgcccaagcgtggaacgcgtgctcgtggtgaaacgcaccaatggcacggtcggctggacacccggccgggattactggcttgcggaagaaatggagtccgtctctgcagattgcccgccggaggagatcaacgcggaagacccgctgttcattctctatacgtcgggctcgacgggccagccgaagggcgtgcttcacacatccggcggatatctggtttatgcttctctgacgcaccaatacatcttcgattacaaggatggcgatatctattggtgcacggcagacgtcggctgggtcaccggccacagctacatcctctacggcccgctcgccaacggcgcgacgacggtcatgttcgagggcgtgccaaactatcccacggcatcgcgcttctgggatgtcatcgacaagcatcaggtgaacacgttctacacagcgccaaccgcgattcgcgcgctgatgggcgccggggacgaactcgtcaagaaaacgagccgcaagtcattgaaactgcttggtagcgtcggtgagccgatcaatcccgaagcttgggaatggtattaccacgtcgtcggcgaggaacgttgccccatcgtcgacacctggtggcagactgaaaccggcggcattctcatcagcgctctgcccggtgctatcgcccttaagcccggctcggccacgctgccgttcttcggcataaagcccgcactcgtgacgcctgatgggcagccgatcgagggcgctggagagggcaacctcgtcatcaccgattcatggcccggccagatgcgctccgtctacaaggatcacacgcgtttcgtccaaacctacttctcggcctacccgggcacctatttcacgggcgatggctgccgccgcgatgaggacggctactactggatcaccggccgcgtcgacgacgtgatcaacgtggcggggcaccgcatggggacggccgaggtcgagtcggcgctcgtggctcacccgaaggtggcggaagcggcctgcgtcggctatccgcacagcctgaaaggtcagggtatctatgtctacgtcaccctgatggaaggcatcgagccgaccgaggcgctccgcaccgaattgcgcaattgggtgcggcaggaaatcgggccgatcgcgacgccggacctcatccagttcgcgcccggcctgccgaaaacgcgctccggcaagatcatgcgtcgcatcctgcgcaagatcgcggaggacgacttttcgaacctcggcgatacgtccacgctggcggaaccgggcgtggtgtcggatctgatcgagaatcgcatgaacaaggcagtcgcctga

SEQ ID NO: 151741 - protein, 648 aa, Rhodomicrobium vannielii ATCC 17100
MTGKIYPVSEAWSSSAYIDENKYRALYEQSVSDPEGFWGEQAARIDWIKPFTKVKNTSYDPHNVSIKWYEDGSLNVAANCIDRHLETRGDQIAIIWEGDEPNLDLKVTYRELHDRVSRFANVLKKHGVKKGDRVTIYLPMIPEAAYAMLACARIGAIHSVVFGGFSPDSLASRIVDCDSSVVITADEGVRGGRKVPLKANADKALEKCPSVERVLVVKRTNGTVGWTPGRDYWLAEEMESVSADCPPEEINAEDPLFILYTSGSTGQPKGVLHTSGGYLVYASLTHQYIFDYKDGDIYWCTADVGWVTGHSYILYGPLANGATTVMFEGVPNYPTASRFWDVIDKHQVNTFYTAPTAIRALMGAGDELVKKTSRKSLKLLGSVGEPINPEAWEWYYHVVGEERCPIVDTWWQTETGGILISALPGAIALKPGSATLPFFGIKPALVTPDGQPIEGAGEGNLVITDSWPGQMRSVYKDHTRFVQTYFSAYPGTYFTGDGCRRDEDGYYWITGRVDDVINVAGHRMGTAEVESALVAHPKVAEAACVGYPHSLKGQGIYVYVTLMEGIEPTEALRTELRNWVRQEIGPIATPDLIQFAPGLPKTRSGKIMRRILRKIAEDDFSNLGDTSTLAEPGVVSDLIENRMNKAVA

SEQ ID NO: 151742 - DNA, 1953 bp, Rhodopseudomonas palustris DX-1
  CDS (1)..(1953): transl_table=11
atgtccgacaagatctacgacgtgcccgcagaatgggcgagccgcgccttcgtcgacgatgccaaatatcggcagatgtacgatcgctcggtgacggacccgacagggttctgggcggagcacgccaagcgcgtcgactggatcaacgcaccgaccaagatcgacaattggtcgtatgccccgggcaacgtctcgatcaaatggttcgaggacggcgtcctcaacgccgcctacaactgcatcgaccgccacctcgacaagcgcggcgaccaggtcgcgatcatctgggaaggcgacgatccctcgcagtcgcgcagcatcacctatcgggagctgcacgacgaggtctgcaagttcgccaacatcctgcgcaaccgcaatgtcggcaagggcgaccgcgtcaccatctatctgccgatgattccggaggccgcgttcgcgatgctggcctgcgcccggatcggcgcgatccattcggtggtgttcgccggcttctcgccagacagcctcgccggccgcatcaacgactgccagtccaagatcgtgatcaccgccgacgaaggtctgcgcggcggccgcaaggtgccgctgaaggccaatgtcgatgcggcgctgaagaagtgcgacggtgtcgattgggtgatggtggtgaagcgcaccggcgccgccatcgagatggatgacgtccgcgacttctggtaccacgaagcggccgagatggtgacgaccgagtgcccggtcgagcacatgaacgccgaagacccgctgttcatcctctacacttcgggttcgaccggccagcccaagggcgtgctgcacacgaccggcggctacctggtgttcgcgtcgatgacccaccagtacgtcttcgactatcacgacggcgacatctactggtgcaccgccgacgtcggctgggtcaccggccacagctacattctgtacggcccgctcgccaacggcgccaccacgctgatgttcgaaggcgtgcccaactacccgaccaactcccgattctgggaagtgatcgacaagcacaaggtcaacatcttctacaccgcgccaactgcgatccgcgcgctgatgcaggccggcgacgagccggtgaagaagacctcgcgcaagtcgctgcgcctgctcggctcggtcggcgagccgatcaatccggaagcctgggagtggtaccaccgcgtcgtcggcgaggaccgctgcccgatcgtcgacacctggtggcagaccgagaccggcggcatcctgatcacgccgctgcccggcgccaccaagctgaagcccggctcggcgacccggccgttcttcggcgtggtgcccgagatcctcgatcccgagggcaacgtgctggacggcgaatgcaccggcaatctttgcctcgcccgctcgtggccgggccagatgcgcaccgtgtacggcgaccacgcccggttcgagcagacctacttctcggcctacaagggcaaatatttcaccggcgacggctgccggcgcgatgccgacggcttctactggatcaccggccgggtcgacgacgtcatcaacgtctcgggccaccgcatggggaccgccgaggtcgaatcctcgctggtggcgcatccgaaggtgtccgaggcggccgtggtcggctatccgcacgacatcaagggccagggcatctacgcctatgtgaccctgatggccggcgaggagccgaccgaggagctgcgcaaggagctggtcgcctgggtccgcaaggacatcggtccgatcgcctcgcccgacctgatccagttcgcgcccggcctgcccaagacccgatccggcaagatcatgcgccgcatcctgcgcaagatcgccgaggacgagccgtcctcgctcggcgacacctcgacgctggccgatccggccgtggtcgacgacctggtcgaacatcgccagaacaagcaccacaaggcgggttga

SEQ ID NO: 151743 - protein, 650 aa, Rhodopseudomonas palustris DX-1
MSDKIYDVPAEWASRAFVDDAKYRQMYDRSVTDPTGFWAEHAKRVDWINAPTKIDNWSYAPGNVSIKWFEDGVLNAAYNCIDRHLDKRGDQVAIIWEGDDPSQSRSITYRELHDEVCKFANILRNRNVGKGDRVTIYLPMIPEAAFAMLACARIGAIHSVVFAGFSPDSLAGRINDCQSKIVITADEGLRGGRKVPLKANVDAALKKCDGVDWVMVVKRTGAAIEMDDVRDFWYHEAAEMVTTECPVEHMNAEDPLFILYTSGSTGQPKGVLHTTGGYLVFASMTHQYVFDYHDGDIYWCTADVGWVTGHSYILYGPLANGATTLMFEGVPNYPTNSRFWEVIDKHKVNIFYTAPTAIRALMQAGDEPVKKTSRKSLRLLGSVGEPINPEAWEWYHRVVGEDRCPIVDTWWQTETGGILITPLPGATKLKPGSATRPFFGVVPEILDPEGNVLDGECTGNLCLARSWPGQMRTVYGDHARFEQTYFSAYKGKYFTGDGCRRDADGFYWITGRVDDVINVSGHRMGTAEVESSLVAHPKVSEAAVVGYPHDIKGQGIYAYVTLMAGEEPTEELRKELVAWVRKDIGPIASPDLIQFAPGLPKTRSGKIMRRILRKIAEDEPSSLGDTSTLADPAVVDDLVEHRQNKHHKAG

SEQ ID NO: 151744 - DNA, 1983 bp, Desulfovibrio sp. FW1012B
  CDS (1)..(1983): transl_table=11
atgacagctgacaacatcgaaagcctcatgcacgaacagcgccgctacgaaccgccggccacgggccgcgacacggcccacgtcaaaagcctcgacgcgtaccaggccatctacaagcgctccatcgaggacccggacggctactgggccgaccgggccacggagctcctcacctggtccaaaccctgggacacggtgctcgaatacgatttcgacaagcccgagatcaaatggttcgccggcggacagctcaacgccgcctacaactgcctggaccggcacctgaccgacggccggcgcaacaaggcggcgctcatctggcagggcgaggcggacggggccgttcgcacctacacctaccagatgctccacgacgaggtctgccggttcgccaatgtgctcaagaagcttggcgtcaaaaagggcgaccgggtcagcctctatctgcccatggtgccggaactggccatcgccatgctggcctgcgcccgcatcggcgcgccccacagcatcgttttcgccggcttttccgccaacagcctgcgcgaccgggtcaacgactgcgaatcgaagatcctcgtctgcagcgacgcggtcatccgctcgggcaagaccataccgctcaagcccaatgccgaccaggccctcaccgagtgcccgtcggtcgagaagtgcgtggtggtgcgccacgccggcaacgaggtggccatgcaggccggccgcgacctctggtggcacgacgtcatgtgcgaccacggcgtgcagggcgcctgcgagcccgagcccatggatgccgaggacgtgcttttcatcctctacacctccggttccacgggcaagcccaagggcgtctaccacaccaccggcggctatctgacctacgccgcccacaccagccagctcgtcttcgacctccacgacgacgacatccactggtgcacggccgacatcggctggatcacgggccattcctacatcgtctacggcccgctggcccttggcgccacctcgctcatgttcgagagcgtgccgacctaccccgagccggaccggttctggcagatctgcgagaagttcaaggtcaatatcttctacaccgcgccgacggtcatccggtcgctcatgcgctcgggcccggcctggacccagaagcacgacctgtcgtcgctgcgcatcctcggctcggtcggcgagcccatcaaccccgaggcctggatgtggtaccacgagcatgtcggccacgggaaactgcccatcgtcgacacctggtggcagaccgagaccggcgggctcatgatttcgcccctgccctacgccacgccgctcaagcccgggtcggcctccctgccgctgcccggcatcgacgccgccatcgtggacaacgagaacaaggaagtcggccccaaccagggcggcttcctggtcatcaaaaagccctggcccggcatgctgcgcggcatctggaacgcgccggagcggttcaagcagcagtatttcaccggcttcaagggcgcctacgagtccggcgacggggcccggcgcgacgaggaaggctatttctggatcatgggccgggtggacgacgtgatcaacgtctccggccaccgcatgggcacggccgagatcgaatccgccctggtctcccatccgaccgtggccgaggcggcggtcgtcggcatgccgcatgacatcaagggccagagcatctacgcctacgtgacgctcaaggccggctacgaggagagcgacgacctcctgaaagccctcaagatgcacgtgcgcaaggaaatcggccccatcgcggccccggaagtcatccagttcgcgcccgggctgcccaagacccgaagcggcaagatcatgcggcgcatcctgcgcaagatcgcctccaacgaggtggacagcctcggcgacacctcgaccctggccgatccgagcgtggtgacggaactgatcgacggcaagaagaagcttttcgcctag

SEQ ID NO: 151745 - protein, 660 aa, Desulfovibrio sp. FW1012B
MTADNIESLMHEQRRYEPPATGRDTAHVKSLDAYQAIYKRSIEDPDGYWADRATELLTWSKPWDTVLEYDFDKPEIKWFAGGQLNAAYNCLDRHLTDGRRNKAALIWQGEADGAVRTYTYQMLHDEVCRFANVLKKLGVKKGDRVSLYLPMVPELAIAMLACARIGAPHSIVFAGFSANSLRDRVNDCESKILVCSDAVIRSGKTIPLKPNADQALTECPSVEKCVVVRHAGNEVAMQAGRDLWWHDVMCDHGVQGACEPEPMDAEDVLFILYTSGSTGKPKGVYHTTGGYLTYAAHTSQLVFDLHDDDIHWCTADIGWITGHSYIVYGPLALGATSLMFESVPTYPEPDRFWQICEKFKVNIFYTAPTVIRSLMRSGPAWTQKHDLSSLRILGSVGEPINPEAWMWYHEHVGHGKLPIVDTWWQTETGGLMISPLPYATPLKPGSASLPLPGIDAAIVDNENKEVGPNQGGFLVIKKPWPGMLRGIWNAPERFKQQYFTGFKGAYESGDGARRDEEGYFWIMGRVDDVINVSGHRMGTAEIESALVSHPTVAEAAVVGMPHDIKGQSIYAYVTLKAGYEESDDLLKALKMHVRKEIGPIAAPEVIQFAPGLPKTRSGKIMRRILRKIASNEVDSLGDTSTLADPSVVTELIDGKKKLFA

SEQ ID NO: 151746 - DNA, 1944 bp, Xanthomonas campestris pv. vasculorum NCPPB702
  CDS (1)..(1944): transl_table=11
atggcagatgtttatcccgtcgatcccgcgttcgccgccgatgcgcgcgtgacgcgcgagcagtacgccgcgctgtatcgcgaatcgatcgaacaccccgagcagttctggggcaaggccgcgcagcggttggaatggttcaagcaacccacccaggtcaaggacgtcagctatgcgctggacgacttccatatccgctggttcggcgatggcgagctcaatgccagcgtcaactgcctggaccgccagctggccacgcgcggcgacaagaccgcgctgctgttcgaacccgacagcccgggcgcggcgtcgtacccggtcacctatcgcgagttgtacgagcgcgtctgcaagctgggcaatgcgctgcgtaacctgggcgtcaagaagggcgaccgggtcaccatctatctgccgatgattgtggatgcggccgtggccatgctcgcctgcgcgcgcatcggtgcggtgcactcggtggtgttcggcggctttgctgccaactcgatcgccgaccgcgtcatcgattgccagagcaagctgattatcaccgccgacgaaggcctgcgcggcggcaagaagattccgctcaaggccaatgtcgatgcagcgctgaagatttccggcaccgacacggtcgaaaccgtgctggtggtgcgccacacaggtggtgcggtggagatacaggcaccgcgcgaccgctggtttcatgatgtggtcgacggccagccggccgagtgcgaacccgagcgaatgaacgccgaagacccgcttttcatcctctacacgtccggctccaccggcaaacccaagggcgtgctgcacaccaccgccggctatctgttgtttgccagctacacccatgaagtggtgttcgacctgcgcgaggacgacatctactggtgcactgcggatgtgggttgggttaccggccacagctacatcgtctacggcccgcttgccaatggcgccaccgcggtgatgttcgaaggcgtacccaattacccgaacgtgtcgcgcttttgggaagtgatcgacaagcatcaggtcaccatcttctacaccgcgcccaccgccattcgcgcgctgatgcgcgatggcgcggaaccggtcaagaagacctcgcgcaagagcctgcgcctgctcggcagcgtcggcgagccgatcaatccggaagcctggcgctggtattacgaagtggtcggcgacagccgctgcccgatcgttgacacctggtggcagaccgaaaccggcggcattctaatttcgccgctggctggcgcggtcgacctcaagccgggctcggccaccctgccgttctttggcgtgcagccggcgctggtggatgccgaaggcaagattctgcaaggcgccaccgaaggcaatctggtgttgctggattcgtggccgggccagatgcgtagcgtgtatggcgaccaccagcgtttcatcgacacctatttccgcacctatccgggtagctatttcaccggcgacggttgccggcgcgatgctgacggctattactggatcaccggccgcgtggacgatgtgatcaacgtctccggccaccgtatcggcaccgccgaagtggaaagcgcactggtctcgcaccccaaggttgccgaagcggccgtggtcggcttcccgcacgacgtcaagggccaaggcatctatgcctatgtcaccctgatcgccggcgagactccgagcgacgaactgcataaggaactggtgagctgggtgcgcaaggagatcggcccgatcgcctcgccggatcacctgcagtgggcccccggcctgcccaagacccgctcgggcaagatcatgcgccgcatcctgcgcaagatcgccgagaacgccccggaccagctgggcgatacctcgaccctggctgatccgtcggtggtggattcgctggtcaatgagcgtctggcgcgctga

SEQ ID NO: 151747 - protein, 647 aa, Xanthomonas campestris pv. vasculorum NCPPB702
MADVYPVDPAFAADARVTREQYAALYRESIEHPEQFWGKAAQRLEWFKQPTQVKDVSYALDDFHIRWFGDGELNASVNCLDRQLATRGDKTALLFEPDSPGAASYPVTYRELYERVCKLGNALRNLGVKKGDRVTIYLPMIVDAAVAMLACARIGAVHSVVFGGFAANSIADRVIDCQSKLIITADEGLRGGKKIPLKANVDAALKISGTDTVETVLVVRHTGGAVEIQAPRDRWFHDVVDGQPAECEPERMNAEDPLFILYTSGSTGKPKGVLHTTAGYLLFASYTHEVVFDLREDDIYWCTADVGWVTGHSYIVYGPLANGATAVMFEGVPNYPNVSRFWEVIDKHQVTIFYTAPTAIRALMRDGAEPVKKTSRKSLRLLGSVGEPINPEAWRWYYEVVGDSRCPIVDTWWQTETGGILISPLAGAVDLKPGSATLPFFGVQPALVDAEGKILQGATEGNLVLLDSWPGQMRSVYGDHQRFIDTYFRTYPGSYFTGDGCRRDADGYYWITGRVDDVINVSGHRIGTAEVESALVSHPKVAEAAVVGFPHDVKGQGIYAYVTLIAGETPSDELHKELVSWVRKEIGPIASPDHLQWAPGLPKTRSGKIMRRILRKIAENAPDQLGDTSTLADPSVVDSLVNERLAR

SEQ ID NO: 151748 - DNA, 1944 bp, Xanthomonas campestris pv. musacearum NCPPB4381
  CDS (1)..(1944): transl_table=11
atggcagatgtttatcccgtcgatcccgcgttcgccgccgatgcgcgcgtgacgcgcgagcagtacgccgcgctgtatcgcgaatcgatcgaacaccccgagcagttctggggcaaggccgcgcagcggttggaatggttcaagcaacccacccaggtcaaggacgtcagctatgcgctggacgacttccatatccgctggttcggcgatggcgagctcaatgccagcgtcaactgcctggaccgccagctggccacgcgcggcgacaagaccgcgctgctgttcgaacccgacagcccgggcgcggcgtcgtacccggtcacctatcgcgagttgtacgagcgcgtctgcaagctgggcaatgcgctgcgtaacctgggcgtcaagaagggcgaccgggtcaccatctatctgccgatgattgtcgatgcggccgtggccatgctcgcctgcgcgcgcatcggtgcggtgcactcggtggtgttcggcggctttgctgccaactcgatcgccgaccgcgtgatcgattgccagagcaagctgattatcaccgccgacgaaggcctgcgcggcggcaagaagattccgctcaaggccaatgtcgatgcagcgctgaagattcccggcaccgacacggtcgaaaccgtgctggtggtgcgccacaccggtggtgcggtggagatacaggcaccgcgcgaccgctggtttcatgatgtggtcgacggccagccggccgagtgcgaacccgagcgaatgaacgccgaagacccgcttttcatcctctacacgtccggctccaccggcaaacccaagggcgtgctgcacaccaccgccggctatctgttgtttgccagctacacccatgaagtggtgttcgacctgcgcgaggacgacatctactggtgcactgcggatgtgggttgggttaccggccacagctacatcgtctacggcccgcttgccaatggcgccaccgcggtgatgttcgaaggcgtacccaattacccgaacgtgtcgcgcttttgggaagtgatcgacaagcatcaggtcaccattttctacaccgcgcccaccgccattcgcgcgctgatgcgcgatggcgcggaaccggtcaagaagacctcgcgcaagagcctgcgcctgctcggcagcgtcggcgagccgatcaatccggaagcctggcgctggtattacgaagtggtcggcgacagccgctgcccgatcgttgacacctggtggcagaccgaaaccggcggcattctaatttcgccgctggctggcgcggtcgacctcaagccgggctcggccaccctgccgttctttggcgtgcagccggcgctggtggatgccgaaggcaagattctgcaaggcgccaccgaaggcaatctggtgttgctggattcgtggccgggccagatgcgtagcgtgtatggcgaccaccagcgtttcatcgacacctatttccgcacctatccgggtagctatttcaccggcgacggttgccggcgcgatgctgacggctattactggatcaccggccgcgtggacgatgtgatcaacgtctccggccaccgtatcggcaccgccgaagtggaaagcgcactggtctcgcaccccaaggttgccgaagcggccgtggtcggcttcccgcacgacgtcaagggccagggcatctatgcctatgtcaccctgatcgccggcgagactccgagcgacgaactgcataaggaactggtgagctgggtgcgcaaggagatcggcccgatcgcctcgccggatcacctgcagtgggcccccggcctgcccaagacccgctcgggcaagatcatgcgccgcatcctgcgcaagatcgccgagaacgccccggaccagctgggcgatacctcgaccctggctgatccgtcggtggtggattcgctggtcaatgagcgtctggcgcgctga

SEQ ID NO: 151749 - protein, 647 aa, Xanthomonas campestris pv. musacearum NCPPB4381
MADVYPVDPAFAADARVTREQYAALYRESIEHPEQFWGKAAQRLEWFKQPTQVKDVSYALDDFHIRWFGDGELNASVNCLDRQLATRGDKTALLFEPDSPGAASYPVTYRELYERVCKLGNALRNLGVKKGDRVTIYLPMIVDAAVAMLACARIGAVHSVVFGGFAANSIADRVIDCQSKLIITADEGLRGGKKIPLKANVDAALKIPGTDTVETVLVVRHTGGAVEIQAPRDRWFHDVVDGQPAECEPERMNAEDPLFILYTSGSTGKPKGVLHTTAGYLLFASYTHEVVFDLREDDIYWCTADVGWVTGHSYIVYGPLANGATAVMFEGVPNYPNVSRFWEVIDKHQVTIFYTAPTAIRALMRDGAEPVKKTSRKSLRLLGSVGEPINPEAWRWYYEVVGDSRCPIVDTWWQTETGGILISPLAGAVDLKPGSATLPFFGVQPALVDAEGKILQGATEGNLVLLDSWPGQMRSVYGDHQRFIDTYFRTYPGSYFTGDGCRRDADGYYWITGRVDDVINVSGHRIGTAEVESALVSHPKVAEAAVVGFPHDVKGQGIYAYVTLIAGETPSDELHKELVSWVRKEIGPIASPDHLQWAPGLPKTRSGKIMRRILRKIAENAPDQLGDTSTLADPSVVDSLVNERLAR

SEQ ID NO: 151750 - DNA, 1956 bp, Pseudomonas syringae pv. syringae FF5
  CDS (1)..(1956): transl_table=11
atgagtgcagcttctctgtaccccgtccgcccagaagtcgcagcgactacgctgacggatgaagcgacctacaaggccatgtaccagcagtcggtggtcaaccctgatggtttctggcgtgaacaggctcagcgcctcgactggatcaaacctttcaccgtggtcaaacagacctcgttcgatgatcaccgtgtcgatatcaaatggtttgccgacggcacgctgaacgttgcctacaactgcctggatcgccatctggaagaacgcggcgacagcatcgccatcatctgggagggcgatgacccttccgagcaccgggaaatcacctaccgcgaactgcacgccgaagtgtgcaagttcgccaacgcgctgcgtggccaggacgtgcaccgtggtgacgtcgtgaccatctacatgccgatgatccccgaggctgtggtcgccatgctggcgtgcgcgcggatcggtgcgattcactcggtggtgttcggcggcttttcgcccgaagcgctggctggccggattatcgattgcagttccaaagtggtcatcaccgctgacgaaggtctgcgtggcggcaagaagacggcgctcaaggccaacgtcgaccgcgccctgaccaacccggaaaccagcagcgtgcagaaggtcatcgtctgcaagcgcaccgggggcgagatcgaatggaaccgccaccgtgatatctggtaccactcgctcctggaagtggcgtccagcacctgtgcgccgaaagagatgggcgccgaagagtcgctgttcattctctatacctcaggctcgaccggcaaacccaagggtgtattgcacaccaccgcaggttacctgctgtatgccgcgctgacccacgaacgcgtgttcgactacaaaccaggtgaagtctattggtgcaccgccgacgtcggctgggtcaccgggcacagttatatcgtctacggccctctggccaatggtgcgaccacgctgctgttcgaaggcgtgccgaactatccggacatcacccgcgtgtcgaagatcatcgacaagcacaaggtcaatatcctctacaccgcgccgaccgcgattcgcgccatgatggctgaaggcaccaagtccgttgaaggcgccgacggttccagcctgcgcctgctgggttcggtgggcgagccaatcaacccggaagcctgggcctggtactacaacacggtcggcaagcagaactgcccgattgtcgatacctggtggcagaccgaaaccggcggcatcctgatcagcccgttgccaggcgcgaccgccctgaagccgggctcggcgacacgtcctttcttcggtgtgattccggcgctggtggacaacctgggcaatctcatcgagggcgctgccgagggcaatctggtgatcctcgattcgtggccgggccagtcgcgctcgctgtacggcgatcacgaccgtttcgtcgacacctacttcaagacgttccgtggcatgtacttcaccggcgacggcgcccgtcgtgacgaggacggttatttctggatcaccgggcgtgtggatgacgtgctcaacgtttccggccaccgcatgggcacggctgaaatcgaaagcgcaatggttgcgcacccgaaagtcgccgaggctgctgtggtcggtgtgccgcatgacctgaaagggcagggcatttacgtttatgtgaccctcaacggcggtgaagaaccgagcgacgcgctgcgcaccgaattgcgcaactgggtacgcaaggagatcggcccgattgcctcgcctgacttcattcagtgggcgcccggcctgccgaagacccgttcgggcaagatcatgcgccgtatcctgcgcaagattgcgactgccgagtacgatgcgctgggtgatatctccaccctggccgacccgggcgtggtgcagcatctgatcgacacgcacaaggccatgaacgctgcctga

SEQ ID NO: 151751 - protein, 651 aa, Pseudomonas syringae pv. syringae FF5
MSAASLYPVRPEVAATTLTDEATYKAMYQQSVVNPDGFWREQAQRLDWIKPFTVVKQTSFDDHRVDIKWFADGTLNVAYNCLDRHLEERGDSIAIIWEGDDPSEHREITYRELHAEVCKFANALRGQDVHRGDVVTIYMPMIPEAVVAMLACARIGAIHSVVFGGFSPEALAGRIIDCSSKVVITADEGLRGGKKTALKANVDRALTNPETSSVQKVIVCKRTGGEIEWNRHRDIWYHSLLEVASSTCAPKEMGAEESLFILYTSGSTGKPKGVLHTTAGYLLYAALTHERVFDYKPGEVYWCTADVGWVTGHSYIVYGPLANGATTLLFEGVPNYPDITRVSKIIDKHKVNILYTAPTAIRAMMAEGTKSVEGADGSSLRLLGSVGEPINPEAWAWYYNTVGKQNCPIVDTWWQTETGGILISPLPGATALKPGSATRPFFGVIPALVDNLGNLIEGAAEGNLVILDSWPGQSRSLYGDHDRFVDTYFKTFRGMYFTGDGARRDEDGYFWITGRVDDVLNVSGHRMGTAEIESAMVAHPKVAEAAVVGVPHDLKGQGIYVYVTLNGGEEPSDALRTELRNWVRKEIGPIASPDFIQWAPGLPKTRSGKIMRRILRKIATAEYDALGDISTLADPGVVQHLIDTHKAMNAA

SEQ ID NO: 151752 - DNA, 1959 bp, Klebsiella sp. 1_1_55
  CDS (1)..(1959): transl_table=11
atgagccaaatacacaaacaccctattcccgctaatatcgcggaacgttgcctgattaacccggaacagtacaaggcgcagtaccaacaatccataaccgaccctgatacattttggggcgagcagggcaagatccttgactggatacgcccctatacccgcgtgaagaacacctctttcgcgccgggtaatatttccatcaaatggtatgaagatggcaccctgaacctcgccgccaactgcctcgaccgccatctcgccgagcgcggcgatcaaaccgccatcatctgggaaggcgacgacgccagccagagcaagcacatcacctaccgtgaactgcatgcggacgtgtgccgcttcgccaatgtgctgctcgaccttgggattaaaaaaggcgatgtggtcgccatttatatgccgatggtgccggaagccgcggtggcgatgctggcctgcgcccgcatcggcgccatccactcagtgattttcggcggcttctcgccggaggcggtggccgggcgcattatcgactccagctcgcgcctggtgatcaccgctgacgaagggctgcgcgctggtcgcgccatcccgctgaagaaaaacgttgatgacgcgctgaaaaacccgaacgtcaacagtattgagcatgtcgtggtcctgaaacgtaccggcggcaaaatcgactggcaggaaggccgcgacctgtggtggagcgacctgatggcgaacgccagcgccgagcaccggcccgtcgagatgaacgccgaagatccgctgttcatcctctatacctccggctccaccggcaaaccgaaaggggtgctgcacaccaccggcggctatctggtctacgcggccaccacctttaaatacgttttcgactaccatccgggcgatatttactggtgcaccgccgatgtgggctgggtcaccggccacagctatctgctgtatggtccgctggcctgcggcgccaccaccctgatgttcgaaggggtaccgaactggccaaccccggcgcgtatgtgccaggtcgtcgataagcataaagtcagcattctctataccgccccgacggctatccgcgccctgatggcggaaggcgacaaagctatcgaaggcacagaccgttcctcgctgcgcattctcggctcggtcggcgaaccgattaacccggaagcctgggagtggtactggaagaagatcggtaacgagaagtgcccggtgatggacacctggtggcagaccgaaaccggcggctttatgatcactccgctgccgggcgcgatcgaactgaaggccggctccgcgacgcgtccgttcttcggcgtccagccggtgctggtggataacgaaggcctgccgctggatggcgccaccgagggcaatcttgccatcgccgactcctggcccggccaggcgcgtaccctgttcggtgaccatgagcgctttgagcaaacctacttctccaccttcaaaaatatgtactttagcggcgatggcgcgcgtcgcgatgaagatggttactactggatcactggccgcgtggatgacgtgctgaacgtctccggccaccgtctgggtaccgcggaaattgaatccgcgctggtgtcgcacccgaaaatcgctgaagcggcggtggtggggatcccgcacaacatcaaaggccaggccatctacgcctacgtgacgctcaatcacggcgaagaaccaacgccggagctgtatgccgaagtgcgtaactgggtgcgcaaagagatcggcccgctggcgacgccggatgtgctgcactggaccgattcgctaccgaaaacccgctcgggcaaaatcatgcgtcgcattctgcgtaagattgccgcgggcgacaccagcaacctcggcgatacctcgacgctcgccgatcctggcgtcgtggaaaaactgctcgaagagaagcaggccataacgatgccatcgtaa

SEQ ID NO: 151753 - protein, 652 aa, Klebsiella sp. 1_1_55
MSQIHKHPIPANIAERCLINPEQYKAQYQQSITDPDTFWGEQGKILDWIRPYTRVKNTSFAPGNISIKWYEDGTLNLAANCLDRHLAERGDQTAIIWEGDDASQSKHITYRELHADVCRFANVLLDLGIKKGDVVAIYMPMVPEAAVAMLACARIGAIHSVIFGGFSPEAVAGRIIDSSSRLVITADEGLRAGRAIPLKKNVDDALKNPNVNSIEHVVVLKRTGGKIDWQEGRDLWWSDLMANASAEHRPVEMNAEDPLFILYTSGSTGKPKGVLHTTGGYLVYAATTFKYVFDYHPGDIYWCTADVGWVTGHSYLLYGPLACGATTLMFEGVPNWPTPARMCQVVDKHKVSILYTAPTAIRALMAEGDKAIEGTDRSSLRILGSVGEPINPEAWEWYWKKIGNEKCPVMDTWWQTETGGFMITPLPGAIELKAGSATRPFFGVQPVLVDNEGLPLDGATEGNLAIADSWPGQARTLFGDHERFEQTYFSTFKNMYFSGDGARRDEDGYYWITGRVDDVLNVSGHRLGTAEIESALVSHPKIAEAAVVGIPHNIKGQAIYAYVTLNHGEEPTPELYAEVRNWVRKEIGPLATPDVLHWTDSLPKTRSGKIMRRILRKIAAGDTSNLGDTSTLADPGVVEKLLEEKQAITMPS

SEQ ID NO: 151754 - DNA, 1959 bp, Escherichia coli B185
  CDS (1)..(1959): transl_table=11
atgagtcaaattcacaaacacaccattcctgccaacatcgcagaccgttgcctgataaaccctcagcagtacgaggcgatgtatcaacaatctattaacgcacctgataccttctggggcgaacagggaaaaattctcgactggatcaaaccgtaccagaaggtgaaaaacacctcctttgcccccggtaatgtgtccattaaatggtacgaggacggcacgctgaatctggcggcaaactgccttgaccgccatctgcaagaaaacggcgatcgtaccgccatcatctgggaaggcgacgacgccagccagagcaaacatatcagctataaagagctgcaccgcgacgtctgccgcttcgctaataccctgctcgagctgggcattaaaaaaggtgatgtggtggcgatttatatgccgatggtgccggaagccgcggttgcgatgctggcctgcgcccgtattggcgcggtgcattcggtaattttcggtggcttctcgccggaagcggttgccgggcgcattatcgattctaactcacggttggtgatcacttccgacgaaggcgtgcgcgccgggcgtagtattccgctgaagaaaaacgttgatgacgcactaaaaaacccgaacgtcaccagcgtagagcatgtggtggtactgaagcgtactggcgggaaaattgactggcaggaagggcgcgacctgtggtggcacgaccaggttgagcaagccagcgatcagcaccaggcggaagagatgaacgccgaagatccgctgtttattctctatacctccggttctaccggaaaaccaaaaggcgtactgcacactaccggcggttatctggtgtacgcggcgctgacctttaaatatgtctttgattatcatccgggcgatatctactggtgcaccgccgatgtgggctgggtgaccggacacagttatttgctgtacggcccgctggcctgcggcgcgaccacgctgatgtttgaaggcgtaccgaactggccgacgcctgcccgtatggcacaggtggtggacaagcatcaggtcaatattctctataccgcgcccacggcgattcgcgcgctgatggcggaaggcgataaagcgatcgaaggcaccgaccgttcgtcgctgcgcattctcggttccgtgggcgagccaattaacccggaagcgtgggagtggtactggaaaaaaatcggcaacaagaaatgtccggtggtcgatacctggtggcagaccgaaaccggcggtttcatgatcaccccgctgcctggcgctaccgagctgaaagccggttcggcaacacgtccgttcttcggcgtgcaaccggcgctggtcgataacgaaggtaacccgctggaaggggccaccgaaggcagtctggtgatcaccgactcctggccgggtcaggcgcgtacgctgtttggcgatcacgaacgttttgagcagacctatttttccaccttcaaaaatatgtatttcagcggcgacggcgcgcgtcgcgatgaagatggctattactggataaccgggcgcgtggacgacgtgctgaacgtctccggtcaccgtctggggacggcggagattgagtcggcgctggtggcgcatccgaagattgccgaagcagccgtagtaggtattccgcacaatattaaaggtcaggcgatctacgcctacgtcacgcttaatcacggggaggaaccgtcaccagaactgtacgcagaagtccgcaactgggtgcgtaaagagattggcccgctggcgacgccagacgtgctgcactggaccgactccctgcctaaaacccgctccggcaaaattatgcgccgtattctgcgcaaaattgcggcgggcgataccagcaacctgggcgatacctcgacgcttgccgatcctggcgtagtcgagaagctgcttgaagagaagcaggctatcgcgatgccatcgtaa

SEQ ID NO: 151755 - protein, 652 aa, Escherichia coli B185
MSQIHKHTIPANIADRCLINPQQYEAMYQQSINAPDTFWGEQGKILDWIKPYQKVKNTSFAPGNVSIKWYEDGTLNLAANCLDRHLQENGDRTAIIWEGDDASQSKHISYKELHRDVCRFANTLLELGIKKGDVVAIYMPMVPEAAVAMLACARIGAVHSVIFGGFSPEAVAGRIIDSNSRLVITSDEGVRAGRSIPLKKNVDDALKNPNVTSVEHVVVLKRTGGKIDWQEGRDLWWHDQVEQASDQHQAEEMNAEDPLFILYTSGSTGKPKGVLHTTGGYLVYAALTFKYVFDYHPGDIYWCTADVGWVTGHSYLLYGPLACGATTLMFEGVPNWPTPARMAQVVDKHQVNILYTAPTAIRALMAEGDKAIEGTDRSSLRILGSVGEPINPEAWEWYWKKIGNKKCPVVDTWWQTETGGFMITPLPGATELKAGSATRPFFGVQPALVDNEGNPLEGATEGSLVITDSWPGQARTLFGDHERFEQTYFSTFKNMYFSGDGARRDEDGYYWITGRVDDVLNVSGHRLGTAEIESALVAHPKIAEAAVVGIPHNIKGQAIYAYVTLNHGEEPSPELYAEVRNWVRKEIGPLATPDVLHWTDSLPKTRSGKIMRRILRKIAAGDTSNLGDTSTLADPGVVEKLLEEKQAIAMPS

SEQ ID NO: 151756 - DNA, 1959 bp, Acinetobacter haemolyticus ATCC 19194
  CDS (1)..(1959): transl_table=11
atgaaagaaaactacccagtgcctgaaaaatttaaagaaacggcaaggatctcggaagcagactatttcaatcgttatcaatactctattgagcagcctgatgctttttgggcagaagaagcacaaaatattgattggattaaaccttttactcaagtcaaaaatactaattttgaccccgcgaattttaaaatcgaatggtttgccgatggtgaactaaacgtatcagcaaattgcttagaccgtcatttaaaagataatgctttaaagccagcgatcatttgggaaggtgaccatccttcacgccataagatcatctcgtttgctgagttgcatgatgaggtttgtcgttttgcaaatgtattaaagaaacagggtattagcaaaggcgaccgcgttgttttatatatgccaatggtccctgaagcagcaattgcgatgttggcttgtgcccgcattggtgctgtacattgtgtggtttttggcggattttcacctgattcactggcaagccgtattgaagacagtcaagcaaaattagtcattactgcagatgctggcatgcgtggtggtaagttaattccattgaaagaaaatgtggatgccgctttagaaattcagggtacggaaagtgtagaacatgtgattgtggttcaccgtacaggcaacccgatccaattcaatgaagcacgtgatttatggtatcacctcgaaatcatggaagttgacgagcattgtccacctgaaccaatgaaggcagaggatccgttatttattctctatacatctggttcaacaggtaagccgaagggtgtgttacatacaacgggtggttatctggtctatgtcaacaccacatttagagaggtttttgatctcaaagaagatgatgtgtattggtgtacagcagatgttggctggattacaggacacagctatttattgtatggtccactttgtaatgcaaccaccacggtcatgtttgaggggattcctcaatacccaacatgggcgcgtattggtcatgtgattgataagcataatgtcacgattttatatacagcaccaactgccatccgtgccatgatgcgtgagggcgatgcttatgttcgtgagagtgatcgtagtagcttacgtttactcggttcagtcggcgagccaattaaccctgaagcatggaactggtatcacgaagtggttggtgaaggacgctgcccgattgtcgatacatggtggcagacggaaacaggtggtattttgatttcaccgttaccgggtgcaaccgctttaaaaccgggttcggcaacacgtccaatgtttggtgtacaacctgcattggttgatggggaaggtaacccacttgaaggtgcgaatgaagggaacctcgtgatcaaggattcttggccgggtcaaatgcgtacgatttggggtgatccacagcgctttattgaagcttatttctcaactttcaagaactgctatttcactggcgatggtgcacgtcgtgatgaagacggatactattggatcacaggtcgtgttgatgatgtacttaatgtttctggacatcgtctagggactgctgaaattgaaagtgcattggttgcccatgaagcggttgcagaagctgctgttgttggtatgccacatgacattaaggggcagggaatttgtacctttgtaaccttacaagcagatgtgtcagagtctgaggagttgcgtaaggagttggtcaattgggtacgtaaagttcttggaccagtggcaacgccagatgccttgcattgggcacctgctttaccaaaaacacgctcaggtaaaatcatgcgccgtatcttgagaaagattgcagcaaatgaactggacagcttaggtgatacttcaacgcttgctgagccagccgtggtagatgcgttaatcgcaacggtttacccagaagtgagtagtgcagaaggttaa

SEQ ID NO: 151757 - protein, 652 aa, Acinetobacter haemolyticus ATCC 19194
MKENYPVPEKFKETARISEADYFNRYQYSIEQPDAFWAEEAQNIDWIKPFTQVKNTNFDPANFKIEWFADGELNVSANCLDRHLKDNALKPAIIWEGDHPSRHKIISFAELHDEVCRFANVLKKQGISKGDRVVLYMPMVPEAAIAMLACARIGAVHCVVFGGFSPDSLASRIEDSQAKLVITADAGMRGGKLIPLKENVDAALEIQGTESVEHVIVVHRTGNPIQFNEARDLWYHLEIMEVDEHCPPEPMKAEDPLFILYTSGSTGKPKGVLHTTGGYLVYVNTTFREVFDLKEDDVYWCTADVGWITGHSYLLYGPLCNATTTVMFEGIPQYPTWARIGHVIDKHNVTILYTAPTAIRAMMREGDAYVRESDRSSLRLLGSVGEPINPEAWNWYHEVVGEGRCPIVDTWWQTETGGILISPLPGATALKPGSATRPMFGVQPALVDGEGNPLEGANEGNLVIKDSWPGQMRTIWGDPQRFIEAYFSTFKNCYFTGDGARRDEDGYYWITGRVDDVLNVSGHRLGTAEIESALVAHEAVAEAAVVGMPHDIKGQGICTFVTLQADVSESEELRKELVNWVRKVLGPVATPDALHWAPALPKTRSGKIMRRILRKIAANELDSLGDTSTLAEPAVVDALIATVYPEVSSAEG

SEQ ID NO: 151758 - DNA, 2019 bp, Xanthomonas fuscans subsp. aurantifolii str. ICPB 10535
  CDS (1)..(2019): transl_table=11
atgcggcacactgattgtctaccgagggcagccgcaacgccctcttccgacaagttcatcgcaagtgagggtgccatggctgatgtttatcccgtcgatcccgcgttcgccgccgatgcgcgcgtgacgcgcgagcagtacgccgcgctgtaccgcgaatcgatcgaacaccccgagcagttctggggcaaggccgcgcagcggctcgagtggttcaagcaacccacccagatcaaggatgtcagctatgcgctggacgacttccatatccgctggttcggcgatggcgagctcaatgccagcgtcaactgcctggaccgccagctggccacgcgcggcgacaagaccgcgctgctgttcgaaccagacagcccggatgcgcagtcctacccggtcacctaccgcgagttgtacgagcgcgtctgcaagctgggcaatgcgctgcgcaacctgggcgtcaagaagggcgaccgtgtcaccatctatctgccgatgatcgtcgatgccgccgtggccatgctcgcctgcgcgcgcatcggtgcggtgcactcggtggtgttcggcggctttgccgccaactcgatcgccgaccgcgtgatcgattgccagagcaagctgatcatcaccgccgacgaaggcctgcgtggcggcaagaagattccgctcaaggccaacgtcgatgctgcgctgaagattcccggcaccaacacggtggaaaccgtgctggtggtgcgtcataccggcggcgcagtggagatgcaggcaccgcgcgatcgctggttccatgatgtggtcgacggccagccggccgcgtgcgaaccagagcgcatgaacgccgaagacccgcttttcatcctctacacctccggctccaccggcaaacccaagggcgtgctgcacaccaccgccggctacctgctgtttgccagctacacgcacgaagtggtgttcgacctgcgcgaggacgacatctactggtgcactgcggacgtgggctgggtcaccggccacagctacatcgtctacggcccgctcgccaatggcgccaccgcggtgatgttcgagggcgtgcccaattacccgaacgtgtcgcgcttctgggaagtgatcgacaagcatcaggtcaccatcttctacaccgcacctactgcgattcgcgcgttgatgcgcgacggcgaggcgccggtcaaaaagacctcgcgcaagagcctgcgcctgctcggcagcgtcggcgagccgatcaatccggaagcctggcgctggtattacgaggtggtcggcgacagccgttgcccgatcgtggatacgtggtggcagaccgaaaccggcggcatcctgatctcgccgctggccggcgcggtcgatctcaagccgggctcggccaccttgcccttcttcggcgtgcagccggcgctggtcgatgccgaaggcaagattctggaaggcgccaccgaaggcaacctggtgctgctcgattcctggccgggccagatgcgtagcgtgtatggcgaccaccagcgcttcatcgacacctacttccgcacctatccgggcagctacttcaccggcgacggctgccgccgcgatgccgacggttactactggatcaccggccgcgtggacgatgtgatcaacgtctccgggcaccgcatcggcaccgccgaagtggaaagcgcgctggtctcgcaccccaaggtcgccgaagcggccgtggtgggcttcccgcacgacgtcaagggccagggcatctatgcctacgtcaccctgatcgcgggcgagaccccgagcgaggacctgcacaaggaattggtcagctgggtgcgcaaggagatcggcccgatcgcctcacccgatcatctgcagtgggcccccgggctgcccaagacccgatcgggcaagatcatgcgccgcatcctgcgcaagatcgccgaaaacgcccctgaccagttgggcgatacctccacgctggcagatccgtcggtggtggattcgctggtcaatgagcgtctggcgcgctga

SEQ ID NO: 151759 - protein, 672 aa, Xanthomonas fuscans subsp. aurantifolii str. ICPB 10535
MRHTDCLPRAAATPSSDKFIASEGAMADVYPVDPAFAADARVTREQYAALYRESIEHPEQFWGKAAQRLEWFKQPTQIKDVSYALDDFHIRWFGDGELNASVNCLDRQLATRGDKTALLFEPDSPDAQSYPVTYRELYERVCKLGNALRNLGVKKGDRVTIYLPMIVDAAVAMLACARIGAVHSVVFGGFAANSIADRVIDCQSKLIITADEGLRGGKKIPLKANVDAALKIPGTNTVETVLVVRHTGGAVEMQAPRDRWFHDVVDGQPAACEPERMNAEDPLFILYTSGSTGKPKGVLHTTAGYLLFASYTHEVVFDLREDDIYWCTADVGWVTGHSYIVYGPLANGATAVMFEGVPNYPNVSRFWEVIDKHQVTIFYTAPTAIRALMRDGEAPVKKTSRKSLRLLGSVGEPINPEAWRWYYEVVGDSRCPIVDTWWQTETGGILISPLAGAVDLKPGSATLPFFGVQPALVDAEGKILEGATEGNLVLLDSWPGQMRSVYGDHQRFIDTYFRTYPGSYFTGDGCRRDADGYYWITGRVDDVINVSGHRIGTAEVESALVSHPKVAEAAVVGFPHDVKGQGIYAYVTLIAGETPSEDLHKELVSWVRKEIGPIASPDHLQWAPGLPKTRSGKIMRRILRKIAENAPDQLGDTSTLADPSVVDSLVNERLAR

SEQ ID NO: 151760 - DNA, 2001 bp, Brucella sp. NVSL 07-0026
  CDS (1)..(2001): transl_table=11
atgccggatggttctatttggctgcaaatgctgaaggaggaaatcatgtcggaaaagctttaccccgtgctgccggaggcaaagaaaaacacgctcatcgacaacgagacttatctcgaatggtatgaggagagcgtgagcgacccggatggcttctgggccaagcacggccggcgtatcgactggttcaagcctttcaccaaggtcaagaacaccgatttcaacggcgatgtaacgatcaagtggtatgaggatggcgtcaccaacgtctcatataattgcatcgaccgccatctgaagagccgcggcgacaaggtcgccatcatctgggaaggcgacaacccctatatcgacaagaagatcacctatcgcgagctttacgagaatgtctgccgcatggcgaatgtgctcaagaagcatggggtgaagaagggcgaccgcgtcacgatctatctgccgatgatcccggaagccgcctatgccatgctcgcctgcgcgcgcatcggcgccgtgcattcggtcgtctttgccggtttctcgccggaggcgctcgctggccgcatcgttgactgcgaatccactttcgtcatcaccgccgatgaaggtgtgcgcggcggcaagcctgttgcgctgaaggaaaacaccgataccgccatcgacatcgccgccaagcaatatgtgatggtcaacaaggtgctggtcgtgcgccgcaccggcggcaaggtaagctggggccgcggccgcgatctgtggtaccatcaggaagtcgcaagcgtcgaaccgcattgcgaaccggaaccgatgaatgcggaagacccgcttttcattctctacacatccggttccaccggcaagccgaagggtgtgctgcataccaccggcggctacctcgtctatgcctcgataacgcatcaatatgtcttcgattaccatgatggcgagatctactggtgcacggcggatgtgggttgggtaacgggccactcctatatcgtctacggaccgctggccaatggcgcgacaacgctgatgtttgaaggcgtgcccaacttccccgatcagggccgtttctgggaagtcgtcgacaagcaccatgtcaatatcttctacaccgcgccaaccgcgctgcgcgcgcttatgggcgcgggcgatgaattcgtaacccgctcatcgcgttcgacgctgcgcctgctgggctcggtcggcgagccgatcaatccagaggcctgggagtggtattacaatgtcgtgggcgaccagaaatgccccatcgtcgatacctggtggcagacggaaaatggcggcatcctcatcaccccacttcccggcgcgaccgatttgaaacccggttcggcaacacgcccgttcttcggcgtcaagccggtgctggtggacaatgaaggcaatgtgcaggagggcgtagccgacggcaacctgtgcatctccgactcctggccgggccagatgcgcaccgtctatggcgaccacaagcgtttcatcgaaacctacttctccacctataaggggatgtatttttcgggcgatggctgccgccgcgacgaggacggctattactggatcaccggccgcgtcgatgacgtgctgaatatttccggccatcgcctcggcacggcggaaatcgaatcggcacttgtctcgcatcactcggtttcggaagccgccgtggtcggctatccgcacccgatcaagggacagggcatctattgctatgtcacgctgatgaccggcgcagacgcgcaggacccggacgagttgcgcaaggaactggtccagcatgtgcgcaaggaaatcggccccatcgccacaccggacaagatccagtttgcgcccggactgccgaaaacccgttccggcaagatcatgcgccgcatcctgcgcaagatcgccgaagacgagttcggcgcattgggcgacacctcaacgctcgccgatccgggcgtggtggacgacctgatcgaaaatcgccagaacaagaaatga

SEQ ID NO: 151761 - protein, 666 aa, Brucella sp. NVSL 07-0026
MPDGSIWLQMLKEEIMSEKLYPVLPEAKKNTLIDNETYLEWYEESVSDPDGFWAKHGRRIDWFKPFTKVKNTDFNGDVTIKWYEDGVTNVSYNCIDRHLKSRGDKVAIIWEGDNPYIDKKITYRELYENVCRMANVLKKHGVKKGDRVTIYLPMIPEAAYAMLACARIGAVHSVVFAGFSPEALAGRIVDCESTFVITADEGVRGGKPVALKENTDTAIDIAAKQYVMVNKVLVVRRTGGKVSWGRGRDLWYHQEVASVEPHCEPEPMNAEDPLFILYTSGSTGKPKGVLHTTGGYLVYASITHQYVFDYHDGEIYWCTADVGWVTGHSYIVYGPLANGATTLMFEGVPNFPDQGRFWEVVDKHHVNIFYTAPTALRALMGAGDEFVTRSSRSTLRLLGSVGEPINPEAWEWYYNVVGDQKCPIVDTWWQTENGGILITPLPGATDLKPGSATRPFFGVKPVLVDNEGNVQEGVADGNLCISDSWPGQMRTVYGDHKRFIETYFSTYKGMYFSGDGCRRDEDGYYWITGRVDDVLNISGHRLGTAEIESALVSHHSVSEAAVVGYPHPIKGQGIYCYVTLMTGADAQDPDELRKELVQHVRKEIGPIATPDKIQFAPGLPKTRSGKIMRRILRKIAEDEFGALGDTSTLADPGVVDDLIENRQNKK

SEQ ID NO: 151762 - DNA, 1938 bp, Magnetospirillum gryphiswaldense; identical to SEQ ID NO: 126803
  CDS (1)..(1938): transl_table=11

SEQ ID NO: 151763 - protein, 645 aa, Magnetospirillum gryphiswaldense; identical to SEQ ID NO: 126804

SEQ ID NO: 151764 - DNA, 2142 bp, Saccharomyces cerevisiae (strain YJM789)
  CDS (1)..(2142)
atgtcgccctctgccgtacaatcatcaaaactagaagaacagtcaagtgaaattgacaagttgaaagcaaaaatgtcccagtctgcctccactgcgcagcagaagaaggaacatgagtatgaacatttgacctcggtcaagatcgtgccacaacggcccatctcagatagactgcagcccgcaattgctacccactattctccacacttggacgggttgcaggactatcagcgcttgcacaaggagtctattgaagaccctgctaagttcttcggttctaaagctacccaatttttaaactggtctaagccattcgataaggtgttcatcccagaccctaaaacgggcaggccctccttccagaacaatgcatggttcctcaacggccaattaaacgcctgttacaactgtgttgacagacatgccttgaagacccctaacaagaaagccattattttcgaaggtgacgagcctggccaaggctattccattacctacaaggaactacttgaagaagtttgtcaagtggcacaagtgctgacttactctatgggcgttcgcaagggcgatactgttgccgtgtacatgcctatggtcccagaagcaatcataaccttgttggccatttcccgtatcggcgccattcactccgtagtctttgccgggttttcttccaactccttgagagatcgtatcaacgatggggactctaaagttgtcatcactacagatgaatccaacagaggtggtaaagtcattgagactaaaagaattgttgatgacgcgctaagagagaccccaggcgtgagacacgtcttggtttatagaaagaccaacaatccatctgttgctttccatgcccccagagatttggattgggcaacagaaaagaagaaatacaagacctactatccatgcacacccgttgattctgaggatccattattcttgttgtatacgtctggttctactggtgcccccaagggtgttcaacattctaccgcaggttacttgctgggagctttgttgaccatgcgctacacttttgacactcaccaagaagacgttttcttcacagctggagacattggctggattacaggccacacttatgtggtttatggtcccttactatatggttgtgccactttggtctttgaagggactcctgcgtacccaaattactcccgttattgggatattattgatgaacacaaagtcacccaattttatgttgccccaactgctttgcgtttgttgaaaagagctggtgattcctacatcgaaaatcattccttaaaatctttgcgttgcttgggttcggtcggtgagccaattgctgctgaagtttgggagtggtactctgaaaaaataggtaaaaatgaaatccccattgtagacacctactggcaaacagaatctggttcgcatctggtcaccccgctggctggtggtgtcacaccaatgaaaccgggttctgcctcattcccattcttcggtattgatgcagttgttcttgaccctaacactggtgaagaacttaataccagccacgcagagggtgtccttgccgtcaaagctgcatggccatcatttgcaagaactatttggaaaaatcatgataggtatctagacacttatttgaacccttaccctggctactatttcactggtgatggtgctgcaaaggataaggatggttatatctggattttgggtcgtgtagacgatgtggtgaacgtctctggtcaccgtctgtctaccgctgaaattgaggctgctattatcgaagatccaattgtggccgagtgtgctgttgtcggattcaacgatgacttgactggtcaagcagttgctgcatttgtggtgttgaaaaacaaatctagttggtccaccgcaacagatgatgaattacaagatatcaagaagcatttggtctttactgttagaaaagacatcgggccatttgccgcaccaaaattgatcattttagtggatgacttgcccaagacaagatctggcaaaattatgagacgtattttaagaaaaatcctagcaggagaaagtgaccaactaggcgacgtttctacattgtcaaaccctggcattgttagacatctaattgattcggtcaagttgtaa

SEQ ID NO: 151765 - protein, 713 aa, Saccharomyces cerevisiae (strain YJM789)
MSPSAVQSSKLEEQSSEIDKLKAKMSQSASTAQQKKEHEYEHLTSVKIVPQRPISDRLQPAIATHYSPHLDGLQDYQRLHKESIEDPAKFFGSKATQFLNWSKPFDKVFIPDPKTGRPSFQNNAWFLNGQLNACYNCVDRHALKTPNKKAIIFEGDEPGQGYSITYKELLEEVCQVAQVLTYSMGVRKGDTVAVYMPMVPEAIITLLAISRIGAIHSVVFAGFSSNSLRDRINDGDSKVVITTDESNRGGKVIETKRIVDDALRETPGVRHVLVYRKTNNPSVAFHAPRDLDWATEKKKYKTYYPCTPVDSEDPLFLLYTSGSTGAPKGVQHSTAGYLLGALLTMRYTFDTHQEDVFFTAGDIGWITGHTYVVYGPLLYGCATLVFEGTPAYPNYSRYWDIIDEHKVTQFYVAPTALRLLKRAGDSYIENHSLKSLRCLGSVGEPIAAEVWEWYSEKIGKNEIPIVDTYWQTESGSHLVTPLAGGVTPMKPGSASFPFFGIDAVVLDPNTGEELNTSHAEGVLAVKAAWPSFARTIWKNHDRYLDTYLNPYPGYYFTGDGAAKDKDGYIWILGRVDDVVNVSGHRLSTAEIEAAIIEDPIVAECAVVGFNDDLTGQAVAAFVVLKNKSSWSTATDDELQDIKKHLVFTVRKDIGPFAAPKLIILVDDLPKTRSGKIMRRILRKILAGESDQLGDVSTLSNPGIVRHLIDSVKL

SEQ ID NO: 151766 - DNA, 2052 bp, Saccharomyces cerevisiae (strain YJM789)
  CDS (1)..(2052)
atgacaatcaaggaacataaagtagttcatgaagctcacaacgtaaaggctcttaaggctcctcaacatttttacaacagccaacccggcaagggttacgttactgatatgcaacattatcaagaaatgtatcaacaatctatcaatgagccagaaaaattctttgataagatggctaaggaatacttgcattgggatgctccatacaccaaagttcaatctggttcattgaacaatggtgatgttgcatggtttttgaacggtaaattgaatgcatcatacaattgtgttgacagacatgcctttgctaatcccgacaagccagctttgatctatgaagctgatgacgaatccgacaacaaaatcatcacatttggtgaattactcagaaaagtttcccaaatcgctggtgtcttaaaaagctggggcgttaagaaaggtgacacagtggctatctatttgccaatgattccagaagcggtcattgctatgttggctgtggctcgtattggtgctattcactctgttgtctttgctgggttctccgctggttcgttgaaagatcgtgtcgttgacgctaattctaaagtggtcatcacttgtgatgaaggtaaaagaggtggtaagaccatcaacactaaaaaaattgttgacgaaggtttgaacggagtcgatttggtttcccgtatcttggttttccaaagaactggtactgaaggtattccaatgaaggccggtagagattactggtggcatgaggaggccgctaagcagagaacttacctacctcctgtttcatgtgacgctgaagatcctctatttttattatacacttccggttccactggttctccaaagggtgtcgttcacactacaggtggttatttattaggtgccgctttaacaactagatacgtttttgacattcacccagaagatgttctcttcactgccggtgacgtcggctggatcacgggtcacacctatgctctatatggtccattaaccttgggtaccgcctcaataattttcgaatccactcctgcctacccagattatggtagatattggagaattatccaacgtcacaaggctacccatttctatgtggctccaactgctttaagattaatcaaacgtgtaggtgaagccgaaattgccaaatatgacacttcctcattacgtgtcttgggttccgtcggtgaaccaatctctccagacttatgggaatggtatcatgaaaaagtgggtaacaaaaactgtgtcatttgtgacactatgtggcaaacagagtctggttctcatttaattgctcctttggcaggtgctgtcccaacaaaacctggttctgctaccgtaccattctttggtattaacgcttgtatcattgaccctgttacaggtgtggaattagaaggtaatgatgtcgaaggtgtccttgccgttaaatcaccatggccatcaatggctagatctgtttggaaccaccacgaccgttacatggatacttacttgaaaccttatcctggtcactatttcacaggtgatggtgctggtagagatcatgatggttactactggatcaggggtagagttgacgacgttgtaaatgtttccggtcatagattatccacatcagaaattgaagcatccatctcaaatcacgaaaacgtctcggaagctgctgttgtcggtattccagatgaattgaccggtcaaaccgtcgttgcatatgtttccctaaaagatggttatctacaaaacaacgctactgaaggtgatgcagaacacatcacaccagataatttacgtagagaattgatcttacaagttaggggtgagattggtcctttcgcctcaccaaaaaccattattctagttagagatctaccaagaacaaggtcaggaaagattatgagaagagttctaagaaaggttgcttctaacgaagccgaacagctaggtgacctaactactttggccaacccagaagttgtacctgccatcatttctgctgtagagaaccaatttttctctcaaaaaaagaaataa

SEQ ID NO: 151767 - protein, 683 aa, Saccharomyces cerevisiae (strain YJM789)
MTIKEHKVVHEAHNVKALKAPQHFYNSQPGKGYVTDMQHYQEMYQQSINEPEKFFDKMAKEYLHWDAPYTKVQSGSLNNGDVAWFLNGKLNASYNCVDRHAFANPDKPALIYEADDESDNKIITFGELLRKVSQIAGVLKSWGVKKGDTVAIYLPMIPEAVIAMLAVARIGAIHSVVFAGFSAGSLKDRVVDANSKVVITCDEGKRGGKTINTKKIVDEGLNGVDLVSRILVFQRTGTEGIPMKAGRDYWWHEEAAKQRTYLPPVSCDAEDPLFLLYTSGSTGSPKGVVHTTGGYLLGAALTTRYVFDIHPEDVLFTAGDVGWITGHTYALYGPLTLGTASIIFESTPAYPDYGRYWRIIQRHKATHFYVAPTALRLIKRVGEAEIAKYDTSSLRVLGSVGEPISPDLWEWYHEKVGNKNCVICDTMWQTESGSHLIAPLAGAVPTKPGSATVPFFGINACIIDPVTGVELEGNDVEGVLAVKSPWPSMARSVWNHHDRYMDTYLKPYPGHYFTGDGAGRDHDGYYWIRGRVDDVVNVSGHRLSTSEIEASISNHENVSEAAVVGIPDELTGQTVVAYVSLKDGYLQNNATEGDAEHITPDNLRRELILQVRGEIGPFASPKTIILVRDLPRTRSGKIMRRVLRKVASNEAEQLGDLTTLANPEVVPAIISAVENQFFSQKKK

SEQ ID NO: 151768 - DNA, 2013 bp, Aspergillus fumigatus (strain CEA10 / CBS 144.89 / FGSC A1163)
  CDS (1)..(2013)
atgtctgacggcgacgttaagcccccaaagccggccgtggtgctcgaggcccacgatgtcgacactttccacgtccccaaagctttctatgagaagcacccttcgaagactcatctgaaagatttggacgagtataagaaactatacgacgagtctatccgtagccctgacacgttctgggcccgcatggcccgtgagctgctcactttcgacaaagacttccaaaccacgcacatcgggtcgctcgagaatggagacaatgcctggttcgtcgaaggtcgcttgaatgcctcgttcaactgcgtggatcgtcatgccatcaagaaccctaataaggtcgcgatcatctacgaggccgatgagcctaatgagggccgcatcattacctacggcgagctcctccgcgaagtctcccgcgttgcctgggtcctgaagcagcggggtgtcaagaagggtgacactgtcgcgatctaccttcccatgattcctgaagccgttgtggcttttctcgcctgtgcccgtatcggtgccattcactccgttgtcttcgctggtttctcctcggactccctgcgtgaccgtgtccttgatgctggatccaaggtcgttatcaccacggacgagggtaagcgtggtggcaaggtgattggcaccaagcgcattgtcgatgaggccctcaagcagtgccccgatgtgaccagtgtgctggtctacaagcgcactggtgccgaagtcccttggaccaatgggcgtgacatttggtggcatgaggaggtcgagaagtacccctgctatctcgctcctgagtcgatgagctccgaggaccccctcttcctcctctacacctctggttcgactggtaagcccaagggtgttatgcacactactgccggctacctccttggtgccgcgatgaccggcaagtacgtctttgacattcatgacgacgatcgcttcttctgcggtggtgacgttggctggatcaccggacacacctacgtcgtctatgcgcctcttcttcttggttgctctaccgtcgttttcgaaagcactcccgcctaccccaacttctcccgctactgggatgtcattgagaagcacaaggtcacccagttctatgtcgcccccacagctctgcgtctgctgaagcgtgccggtgatgagcacatccaccacaagatggagcacctgcgtatcctgggctccgtcggtgaaccaattgccgctgaggtctggaagtggtactttgagaaggtcggaaaggaggaagctcacatttgcgacacctactggcaaactgagaccggctcgcacgtcatcactcccctcggtggaattacttccaccaagccaggcagtgcatccttgcccttcttcggcattgaacccgctatcatcgaccccgtctccggcgaggagatctctggcaacgatgtcgagggtgttcttgctttcaagcagccttggcctagcatggcccggaccgtgtggggtgcccacaagcgctatatggacacatacctgaacgtctacaagggctactacttcactggagatggcgctggccgtgaccacgacggatattactggattcgcggtcgtgtcgacgacgtggtcaatgtctctggacaccgtttgtctactgctgagatcgaggccgctcttattgagcaccaccaggttgccgaagcggctgtcgtcggtattgccgatgaactcactggccaagctgtcaacgccttcgtttctctcaaggacggcaacgagaccaccgaacaagtccgcaaggatcttgtgatgcaagttcgcaagtcaatcggtccatttgccgcacccaaggcggttttcgtcgtagaagaccttcccaagacccgcagtggcaagattatgcgccgtatcctacggaagattctgagcggtgaagaagatagcttgggtgatacctcaaccttgtcggatccttccgtggtcaacaagatcattgagactgttcatgctgcccgagccaagtag

SEQ ID NO: 151769 - protein, 670 aa, Aspergillus fumigatus (strain CEA10 / CBS 144.89 / FGSC A1163)
MSDGDVKPPKPAVVLEAHDVDTFHVPKAFYEKHPSKTHLKDLDEYKKLYDESIRSPDTFWARMARELLTFDKDFQTTHIGSLENGDNAWFVEGRLNASFNCVDRHAIKNPNKVAIIYEADEPNEGRIITYGELLREVSRVAWVLKQRGVKKGDTVAIYLPMIPEAVVAFLACARIGAIHSVVFAGFSSDSLRDRVLDAGSKVVITTDEGKRGGKVIGTKRIVDEALKQCPDVTSVLVYKRTGAEVPWTNGRDIWWHEEVEKYPCYLAPESMSSEDPLFLLYTSGSTGKPKGVMHTTAGYLLGAAMTGKYVFDIHDDDRFFCGGDVGWITGHTYVVYAPLLLGCSTVVFESTPAYPNFSRYWDVIEKHKVTQFYVAPTALRLLKRAGDEHIHHKMEHLRILGSVGEPIAAEVWKWYFEKVGKEEAHICDTYWQTETGSHVITPLGGITSTKPGSASLPFFGIEPAIIDPVSGEEISGNDVEGVLAFKQPWPSMARTVWGAHKRYMDTYLNVYKGYYFTGDGAGRDHDGYYWIRGRVDDVVNVSGHRLSTAEIEAALIEHHQVAEAAVVGIADELTGQAVNAFVSLKDGNETTEQVRKDLVMQVRKSIGPFAAPKAVFVVEDLPKTRSGKIMRRILRKILSGEEDSLGDTSTLSDPSVVNKIIETVHAARAK

SEQ ID NO: 151770 - DNA, 2052 bp, Saccharomyces cerevisiae (strain RM11-1a)
  CDS (1)..(2052)
atgacaatcaaggaacataaagtagttcatgaagctcacaacgtaaaggctcttaaggctcctcaacatttttacaacagccaacccggcaagggttacgttactgatatgcaacattatcaagaaatgtatcaacaatctatcaatgagccagaaaaattctttgataagatggctaaggaatacttgcattgggatgctccatacaccaaagttcaatctggttcattgaacaatggtgatgttgcatggtttttgaacggtaaattgaatgcatcatacaattgtgttgacagacatgcctttgctaatcccgacaagccagctttgatctatgaagctgatgacgaatccgacaacaaaatcatcacatttggtgaattactcagaaaagtttcccaaatcgctggtgtcttaaaaagctggggcgttaagaaaggtgacacagtggctatctatttgccaatgattccagaagcggtcattgctatgttggctgtggctcgtattggtgctattcactctgttgtctttgctgggttctccgctggttcgttgaaagatcgtgtcgttgacgctaattctaaagtggtcatcacttgtgatgaaggtaaaagaggtggtaagaccatcaacactaaaaaaattgttgacgaaggtttgaacggagtcgatttggtttcccgtatcttggttttccaaagaactggtactgaaggtattccaatgaaggccggtagagattactggtggcatgaggaggccgctaagcagagaacttacctacctcctgtttcatgtgacgctgaagatcctctatttttattatacacttccggttccactggttctccaaagggtgtcgttcacactacaggtggttatttattaggtgccgctttaacaactagatacgtttttgatattcacccagaagatgttctcttcactgccggtgacgtcggctggatcacgggtcacacctatgctctatatggtccattaaccttgggtaccgcctcaataattttcgaatccactcctgcctacccagattatggtagatattggagaattatccaacgtcacaaggctacccatttctatgtggctccaactgctttaagattaatcaaacgtgtaggtgaagccgaaattgccaaatatgacacttcctcattacgtgtcttgggttccgtcggtgaaccaatctctccagacttatgggaatggtatcatgaaaaagtgggtaacaaaaactgtgtcatttgtgacactatgtggcaaacagagtctggttctcatttaattgctcctttggcaggtgctgtcccaacaaaacctggttctgctaccgtgccattctttggtattaacgtttgtatcattgaccctgttacaggtgtggaattagaaggtaatgatgtcgaaggtgtccttgccgttaaatcaccatggccatcaatggctagatctgtttggaaccaccacgaccgttacatggatacttacttgaaaccttatcctggtcactatttcacaggtgatggtgctggtagagatcatgatggttactactggatcaggggtagagttgacgacgttgtaaatgtttccggtcatagattatccacatcagaaattgaagcatccatctcaaatcacgaaaacgtctcggaagctgctgttgtcggtattccagatgaattgaccggtcaaaccgtcgttgcatatgtttccctaaaagatggttatctacaaaacaacgctactgaaggtgatgcagaacacatcacaccagataatttacgtagagaattgatcttacaagttaggggtgagattggtcctttcgcctcaccaaaaaccattattctagttagagatctaccaagaacaaggtcaggaaagattatgagaagagttctaagaaaggttgcttctaacgaagccgaacagctaggtgacctaactactttggccaacccagaagttgtacctgccatcatttctgctgtagagaaccaatttttctctcaaaaaaagaaataa

SEQ ID NO: 151771 - protein, 683 aa, Saccharomyces cerevisiae (strain RM11-1a)
MTIKEHKVVHEAHNVKALKAPQHFYNSQPGKGYVTDMQHYQEMYQQSINEPEKFFDKMAKEYLHWDAPYTKVQSGSLNNGDVAWFLNGKLNASYNCVDRHAFANPDKPALIYEADDESDNKIITFGELLRKVSQIAGVLKSWGVKKGDTVAIYLPMIPEAVIAMLAVARIGAIHSVVFAGFSAGSLKDRVVDANSKVVITCDEGKRGGKTINTKKIVDEGLNGVDLVSRILVFQRTGTEGIPMKAGRDYWWHEEAAKQRTYLPPVSCDAEDPLFLLYTSGSTGSPKGVVHTTGGYLLGAALTTRYVFDIHPEDVLFTAGDVGWITGHTYALYGPLTLGTASIIFESTPAYPDYGRYWRIIQRHKATHFYVAPTALRLIKRVGEAEIAKYDTSSLRVLGSVGEPISPDLWEWYHEKVGNKNCVICDTMWQTESGSHLIAPLAGAVPTKPGSATVPFFGINVCIIDPVTGVELEGNDVEGVLAVKSPWPSMARSVWNHHDRYMDTYLKPYPGHYFTGDGAGRDHDGYYWIRGRVDDVVNVSGHRLSTSEIEASISNHENVSEAAVVGIPDELTGQTVVAYVSLKDGYLQNNATEGDAEHITPDNLRRELILQVRGEIGPFASPKTIILVRDLPRTRSGKIMRRVLRKVASNEAEQLGDLTTLANPEVVPAIISAVENQFFSQKKK

SEQ ID NO: 151772 - DNA, 2142 bp, Saccharomyces cerevisiae (strain RM11-1a)
  CDS (1)..(2142)
atgtcgccctctgccgtacaatcatcaaaactagaagaacagtcaagtgaaattgacaagttgaaagcaaaaatgtcccagtctgcctccactgcgcagcagaagaaggaacatgagtatgaacatttgacctcggtcaagatcgtgccacaacggcccatctcagatagactgcagcccgcaattgctacccactattctccacacttggacgggttgcaggactatcagcgcttgcacaaggagtctattgaagaccctgctaagttcttcggttctaaagctacccaatttttaaactggtctaagccattcgataaggtgttcatcccagaccctaaaacgggtaggccctccttccagaacaatgcatggttcctcaacggccaattaaacgcctgttacaactgtgttgacagacatgccttgaagacccctaacaagaaagccattattttcgaaggtgacgagcctggccaaggctattccattacctacaaggaactacttgaagaagtttgtcaagtggcacaagtgctgacttactctatgggcgttcgcaagggcgatactgttgccgtgtacatgcctatggtcccagaagcaatcataaccttgttggccatttcccgtatcggcgccattcactccgtagtctttgccgggttttcttccaactccttgagagatcgtatcaacgatggggactctaaagttgtcatcactacagatgaatccaacagaggtggtaaagtcattgagactaaaagaattgttgatgacgcgctaagagagaccccaggcgtgagacacgtcttggtttatagaaagaccaacaatccatctgttgctttccatgcccccagagatttggattgggcaacagaaaagaagaaatacaagacctactatccatgcacacccgttgattctgaggatccattattcttgttgtatacgtctggttctactggtgcccccaagggtgttcaacattctaccgcaggttacttgctgggagctttgttgaccatgcgctacacttttgacactcaccaagaagacgttttcttcacagctggagacattggctggattacaggccacacttatgtggtttatggtcccttactatatggttgtgccactttggtctttgaagggactcctgcgtacccaaattactcccgttattgggatattattgatgaacacaaagtcacccaattttatgttgccccaactgctttgcgtttgttgaaaagagctggtgattcctacatcgaaaatcattccttaaaatctttgcgttgcttgggttcggtcggtgaaccaattgctgctgaagtttgggagtggtactctgaaaaaataggtaaaaatgaaatccccattgtagacacctactggcaaacagaatctggttcgcatctggtcaccccgctggctggtggtgtcacaccaatgaaaccgggttctgcctcattccccttcttcggtattgatgcagttgttcttgaccctaacactggtgaagaacttaataccagccacgcagagggtgtccttgccgtcaaagctgcatggccatcatttgcaagaactatttggaaaaatcatgataggtatctagacacttatttgaacccttaccctggctactatttcactggtgatggtgctgcaaaggataaggatggttatatctggattttgggtcgtgtagacgatgtggtgaacgtctctggtcaccgtctgtctaccgctgaaattgaggctgctattatcgaagatccaattgtggccgagtgtgctgttgtcggattcaacgatgacttgactggtcaagcagttgctgcatttgtggtgttgaaaaacaaatctaattggtccaccgcaacagatgatgaattacaagatatcaagaagcatttggtctttactgttagaaaagacatcgggccatttgccgcaccaaaattgatcattttagtggatgacttgcccaagacaagatctggcaaaattatgagacgtattttaagaaaaatcctagcaggagaaagtgaccaactaggcgacgtttctacattgtcaaaccctggcattgttagacatctaattgattcggtcaagttgtaa

SEQ ID NO: 151773 - protein, 713 aa, Saccharomyces cerevisiae (strain RM11-1a)
MSPSAVQSSKLEEQSSEIDKLKAKMSQSASTAQQKKEHEYEHLTSVKIVPQRPISDRLQPAIATHYSPHLDGLQDYQRLHKESIEDPAKFFGSKATQFLNWSKPFDKVFIPDPKTGRPSFQNNAWFLNGQLNACYNCVDRHALKTPNKKAIIFEGDEPGQGYSITYKELLEEVCQVAQVLTYSMGVRKGDTVAVYMPMVPEAIITLLAISRIGAIHSVVFAGFSSNSLRDRINDGDSKVVITTDESNRGGKVIETKRIVDDALRETPGVRHVLVYRKTNNPSVAFHAPRDLDWATEKKKYKTYYPCTPVDSEDPLFLLYTSGSTGAPKGVQHSTAGYLLGALLTMRYTFDTHQEDVFFTAGDIGWITGHTYVVYGPLLYGCATLVFEGTPAYPNYSRYWDIIDEHKVTQFYVAPTALRLLKRAGDSYIENHSLKSLRCLGSVGEPIAAEVWEWYSEKIGKNEIPIVDTYWQTESGSHLVTPLAGGVTPMKPGSASFPFFGIDAVVLDPNTGEELNTSHAEGVLAVKAAWPSFARTIWKNHDRYLDTYLNPYPGYYFTGDGAAKDKDGYIWILGRVDDVVNVSGHRLSTAEIEAAIIEDPIVAECAVVGFNDDLTGQAVAAFVVLKNKSNWSTATDDELQDIKKHLVFTVRKDIGPFAAPKLIILVDDLPKTRSGKIMRRILRKILAGESDQLGDVSTLSNPGIVRHLIDSVKL

SEQ ID NO: 151774 - DNA, 2118 bp, Oryza sativa subsp. indica
  CDS (1)..(2118)
atggggacggcgagcggggaccagccggcgggggcgtcgtcggacaagctgcggcacgtggagtccatgtcggagctgccctccggcgccggcaggatctccgggatcaacgccgtcgtcctcggcgagtcactcgccgccgaggagcacgacctcgtctacccctccgccgagttctccgccgacgccctcgtcccctcccccaagaagtaccaaaagatgtatgagaggtcaatcaacgacccggccgggttctggtcggagatcgccgacgccttctactggaaggagaagtggaaccccagtgaggtctgctccgagaacctcgacgtcaccaaggggcctgtccagatcagttggttcaaaggtggcaaaacaaacatatgttacaatgctgttgatcgcaacatcgaggctgggaacggagacaagatcgcgatgtattgggagggcaatgagcctggtcaggatgggaagctcacctattcagatctcttggacagggtttgccagcttgccaattacttgaagagtgttggtgtcggcaagggtgatgctgtgatcatctacttaccaatgttgctggagcttcccattgccatgcttgcttgtgcccgcattggtgctgttcactcggttgtatttgctggcttttctgcggattccctggcccaaaggatcgttgattgcaagcctaagcttgtgatcacttgcaatgcagtcaaaagaggggtgaagcccatccttctgaaagatatagtggatgctggtctggctgaaagtgagaaacaaggagtcgctgtaggtctatgtttgacatatgaaaatcagtcagcaatgaagagagaagacacaaaatggcaagcaggaagggatgtttggtggcaggatgttgtgaccagtttcccaaccaagtgcgatgtagaatgggtggatgcagaggacccattgttccttctgtacacaagtggcagtacaggaaagccaaagggtgtgttgcatactactgggggctacatggtttacagtgcaacaacatttaagtatgcatttgattacaagccgtcggacatatactggtgcactgcagactgtggctggattactggacacagctatgtgacgtatggtccactcctgaatggagcaacagttctcgtttttgaagggactccaaattaccctgattctggtcggtgctgggacattgtggacaagtacaaggtgacaatattttacactgcaccaacactcgttcgatcactcatgcgtgatggcaccgagtatgttacacggcactctcgaaaatctcttcgagtcttgggaagtgttggtgagccaattaatcctagcgcatggagatggttctacaatattgttggggactctcgatgccctatctccgacacctggtggcagactgaaactggtggcttcatgatcactcctttacctggcgcctggcctcaaaaaccaggttctgcaacctttcctttctttggtgttcagcctgtcattgttgatgagaaagggaaggagattgaaggagaatgcagtggatatctttgcataaagaaatcatggcctggggctttccggactctctatggagatcatgatagatatgagaccacttacttcaagccatttgctggctactattttactggggatggttgcagcagggacaaagacggttaccactggctgactggaagagtagatgatgtcatcaatgtcagtggacaccggattggtacagcagaggttgagtctgcgttggtttcacacccaaagtgtgcagaggctgctgttgttgctgttgagcatgaggtgaaaggtcaaggaatatatgcttttgtaactttggtggatggtgttccttatagtgaagaactacggaaaagcctcatattgacagtccgcaaccagattggggcatttgcagctcctgacaagatccactgggcaccaggacttcctaaaacgagaagcggtaagataatgcgcaggattctgcgcaaaattgcctcaaaacagctggatgaacttggtgacacaagcacccttgctgatcctggcgtcgttgaccagctgattgcgctcaaagattgctag

SEQ ID NO: 151775 - protein, 705 aa, Oryza sativa subsp. indica
MGTASGDQPAGASSDKLRHVESMSELPSGAGRISGINAVVLGESLAAEEHDLVYPSAEFSADALVPSPKKYQKMYERSINDPAGFWSEIADAFYWKEKWNPSEVCSENLDVTKGPVQISWFKGGKTNICYNAVDRNIEAGNGDKIAMYWEGNEPGQDGKLTYSDLLDRVCQLANYLKSVGVGKGDAVIIYLPMLLELPIAMLACARIGAVHSVVFAGFSADSLAQRIVDCKPKLVITCNAVKRGVKPILLKDIVDAGLAESEKQGVAVGLCLTYENQSAMKREDTKWQAGRDVWWQDVVTSFPTKCDVEWVDAEDPLFLLYTSGSTGKPKGVLHTTGGYMVYSATTFKYAFDYKPSDIYWCTADCGWITGHSYVTYGPLLNGATVLVFEGTPNYPDSGRCWDIVDKYKVTIFYTAPTLVRSLMRDGTEYVTRHSRKSLRVLGSVGEPINPSAWRWFYNIVGDSRCPISDTWWQTETGGFMITPLPGAWPQKPGSATFPFFGVQPVIVDEKGKEIEGECSGYLCIKKSWPGAFRTLYGDHDRYETTYFKPFAGYYFTGDGCSRDKDGYHWLTGRVDDVINVSGHRIGTAEVESALVSHPKCAEAAVVAVEHEVKGQGIYAFVTLVDGVPYSEELRKSLILTVRNQIGAFAAPDKIHWAPGLPKTRSGKIMRRILRKIASKQLDELGDTSTLADPGVVDQLIALKDC

SEQ ID NO: 151776 - DNA, 2094 bp, Oryza sativa subsp. japonica
  CDS (1)..(2094)
atgggcgcgagcgatcacgccgcggtggcggcggcggcgagcggtaacggcaagccgcgggcgaggaggccctccgccgccgcggcggccgtgctgggcgagccggtggcggcgtccgacgaccacggcctcgtccaccccagcacggacttcgcctcccaggccctcgtctcctccacgcagcagtaccaagaaatgtaccgacgttcgatcgacgatccggccgggttctggtcggagatcgcggagacgttctactggaagcacaagtggaaccctgacgaggtctgcaccgagaatctggatgtcaccaaggggccgatcaagatcgaatggttcaaagggggcaagaccaatatatgctacaatgcggtggaccgcaacgtggaggctggcgacggcgagaagatagcgatgtactgggaagggaacgagcccggccaggacgcgaagctcacctactccgagctcctgaacaaggtttgccagctggcaaattacctgaagagcgtcggcgtcgggaagggtgatgccgtggtgatctacctgccgatgctgatggagctgcccattgcgatgctcgcgtgtgctcggattggcgctgttcattcggttgtgtttgctggcttctctgctgacgcactagcacaaagaatcattgactgcaagcctaaggttgtgattacgtgcaacgcggtgaaaaggggaaagaaactcatagctctcaaagatatagtagatgtgtcgctggctgacagtgcgaagaatggagtcgatgtaggcatttctttgacatacgaaaatcagtcggcaatgaagagagaagacacaaaatggacgtcaggcagagacgtttggtggcaggatgttgtgcccaattttccaacaaaatgtgatgtggaatgggtagatgcagaggatccattgtttcttctatatacaagtggtagcacaggaaagccaaagggtgtattgcatacaacgggaggctatatggtgtactctgcaacaacatttaagcacgcatttgattacaagccatcagatatatactggtgcactgcagactgtgggtggattactgggcatagttatgtgacatatggtcctctcctgaatggagccacagttcttgtttacgaaggggctccaaactatcctgatcctagtcgttgttgggacgttgttgacaaatacggggtgacgatattttatactgcaccaacacttattcgtgcactcatgcgtgatggtaccgagtatgttactcggtattctcgtaaatctcttcgagttctaggaagcgtaggcgagccaatcaatcccactgcttggagatggttctatgatattattggtgatgcaagatgcccaatatcagacacttggtggcagactgaaactggtggttttatgatcactcctttacctggcgcttggcctctgaaacccggatctgcgacatttcctttcttcggtgtacagccagtaatagtagatgagaaagggaaggaaatggaaggagaatgcagcggatacctttgcataaagaagtcatggcctggggctttccggacactttatggagacaaggacagatatgaaaccacatacttcaagccatttgctggctattacttctccggtgatggttgcagcagggacaaagatggataccattttctgactggacgggttgacgatgttatcaatgtcagcggccaccggattgggacagcagaggttgagtctgctctggtttcacatccaaaatgcgccgaggccgctgttgttggaattgaccatgaggttaaaggccagggaatttacgctttcgtgacattggtggacggtgttccttacagcgatgagctacggaaaagcctcgttatgactgttcgcagccagattggggcgttcgcggcgccggacaagatccactgggcgccggggctcccgaagacgcggagcggcaagatcatgcggaggatcctgcggaagatcgcgtccaggcagctggacgagctcggcgacaccagcacgctcgccgaaccaggcgtcgtcgaccagctcatcgcgctcgccgatagctag

SEQ ID NO: 151777 - protein, 697 aa, Oryza sativa subsp. japonica
MGASDHAAVAAAASGNGKPRARRPSAAAAAVLGEPVAASDDHGLVHPSTDFASQALVSSTQQYQEMYRRSIDDPAGFWSEIAETFYWKHKWNPDEVCTENLDVTKGPIKIEWFKGGKTNICYNAVDRNVEAGDGEKIAMYWEGNEPGQDAKLTYSELLNKVCQLANYLKSVGVGKGDAVVIYLPMLMELPIAMLACARIGAVHSVVFAGFSADALAQRIIDCKPKVVITCNAVKRGKKLIALKDIVDVSLADSAKNGVDVGISLTYENQSAMKREDTKWTSGRDVWWQDVVPNFPTKCDVEWVDAEDPLFLLYTSGSTGKPKGVLHTTGGYMVYSATTFKHAFDYKPSDIYWCTADCGWITGHSYVTYGPLLNGATVLVYEGAPNYPDPSRCWDVVDKYGVTIFYTAPTLIRALMRDGTEYVTRYSRKSLRVLGSVGEPINPTAWRWFYDIIGDARCPISDTWWQTETGGFMITPLPGAWPLKPGSATFPFFGVQPVIVDEKGKEMEGECSGYLCIKKSWPGAFRTLYGDKDRYETTYFKPFAGYYFSGDGCSRDKDGYHFLTGRVDDVINVSGHRIGTAEVESALVSHPKCAEAAVVGIDHEVKGQGIYAFVTLVDGVPYSDELRKSLVMTVRSQIGAFAAPDKIHWAPGLPKTRSGKIMRRILRKIASRQLDELGDTSTLAEPGVVDQLIALADS

SEQ ID NO: 151778 - DNA, 2010 bp, Ajellomyces capsulata
  strain ATCC 26029 / G186AR / H82 / RMSCC 2432
  CDS (1)..(2010)
atgtctgacggtccagtcacgcctcccaaggcgccagtagttgttgaagcccacgaggtggacacttttcacgtgcccaaggctttcgttgagaagcatactacaagaacccatatagcaaacctggatgagtatcagaagctctatgaagaatccatccgtgatcccgataccttttggtcacggctggcccgtgaactcatcacattcgaaaaggatttcgacaccacccgctacgggtcttttgctggaggagacgttgcgtggttccttggtggacgtttgaacgcatcgtacaactgcgtcgatcgtcatgctctgaaggatccaaataaggtggctgtaatctacgaggctgatgaacccaatgaaggccgcactattacatatggcgagcttctgaaggaggtttctcgcctggcctgggtgctgaagcaggccggtgtccggaagggggataccgtggctatttacctgccaatgatccccgaagctataattgcgttcctggcatgcgttcgtattggtgcagtccactctgtcgttttcgctgggttttcatcagattccctccgcgaccgcgtcttggatgccaagtcaagaatcgtcattaccacggacgaggggaaacgaggtggaaaattaatcggaaccaagaaaattgttgatgaagcccttagacaatgccctgacgtcacgaattgcattgtttacaagaggacaggcgctgatgtgccatggacaaagggcagagatttgtggtggcatgaagaggttgagaagtatcccaactacattgctcctgagtcaatggactctgaggatcctctcttcctactgtacacatccgggtcgactggaaagccaaagggtctgatgcacacgacagccggttatttggtcggtgcagccgctactggcaaatatgtgtttgatattcacgactcggaccgcttcttctgtggcggtgatgttggttggattaccggacacacctatgtcgtgtatgctcctctgcttcttggatgtgcaactgtggttttcgagagcacaccggcctatcctaacttctcccgttactgggatgttattgataaacacgaagtgacccagttctatgttgcgccaacagctttaaggcttctgaagcgtgctggaaatgactacatccaccacaagctcaagagccttcgtattttgggatctgttggcgagccaattgcagcggaggtgtggaaatggtatttcgagatcgttgggaaggaggaatgccatcttgttgacacctactggcaaactgagactggttctcacgttatcacccctttgggcggcattacaccaacaaagcccggcagtgcttcgcttcccttcttcggcattgagcctgccatcattgacccggtatctggagaggagatcaaaggcaatgacgttgaaggcgttctagcgattaaacaaccatggccaagcatggcgcgcacagtctggggtgcccacaagagatatatggacacttatttcaacatctacaaagacttttactttactggcgatggtgctggacgtgaccatgacggatactactggatccgaggtcgtgttgacgacgttgtcaacgtttccggccaccgtctgtcaactgcagaaattgaagctgctcttattgaacactctgctgtggctgaagccgctgtcgttggtattgccgacgaactcaccggacaggcggtcaatgcgtttgtcgccttgaagaccacgagtgacaatatcgaacaactccgcaaggatctcatcatgcaggttcgcaagtcaattgggccgtttgccgctcccaaggctgtattcatcgtcgatgacctgcccaagactcgcagtggtaaaatcatgcgaagaatcttgagaaagattcttagcggcgaggaggatagcttgggtgatatctcgactctctctgatccgagtgttgttgcgaaaatcatcgaagtttaccacgcttcaaagaagtag

SEQ ID NO: 151779 - protein, 669 aa, Ajellomyces capsulata
  strain ATCC 26029 / G186AR / H82 / RMSCC 2432
MSDGPVTPPKAPVVVEAHEVDTFHVPKAFVEKHTTRTHIANLDEYQKLYEESIRDPDTFWSRLARELITFEKDFDTTRYGSFAGGDVAWFLGGRLNASYNCVDRHALKDPNKVAVIYEADEPNEGRTITYGELLKEVSRLAWVLKQAGVRKGDTVAIYLPMIPEAIIAFLACVRIGAVHSVVFAGFSSDSLRDRVLDAKSRIVITTDEGKRGGKLIGTKKIVDEALRQCPDVTNCIVYKRTGADVPWTKGRDLWWHEEVEKYPNYIAPESMDSEDPLFLLYTSGSTGKPKGLMHTTAGYLVGAAATGKYVFDIHDSDRFFCGGDVGWITGHTYVVYAPLLLGCATVVFESTPAYPNFSRYWDVIDKHEVTQFYVAPTALRLLKRAGNDYIHHKLKSLRILGSVGEPIAAEVWKWYFEIVGKEECHLVDTYWQTETGSHVITPLGGITPTKPGSASLPFFGIEPAIIDPVSGEEIKGNDVEGVLAIKQPWPSMARTVWGAHKRYMDTYFNIYKDFYFTGDGAGRDHDGYYWIRGRVDDVVNVSGHRLSTAEIEAALIEHSAVAEAAVVGIADELTGQAVNAFVALKTTSDNIEQLRKDLIMQVRKSIGPFAAPKAVFIVDDLPKTRSGKIMRRILRKILSGEEDSLGDISTLSDPSVVAKIIEVYHASKK

SEQ ID NO: 151780 - DNA, 2010 bp, Paracoccidioides brasiliensis (strain Pb03)
  CDS (1)..(2010)
atgtctgatggtgcggtttcacccctcaaagggccagtggtcatcgaagcccacgaagtcgacaccttccatgtcccgcaagcctttctggacaagcatcccaccagaacccacctaaaagatcttgacgagtacaagaaactctacgaagaatcgatccgggatccagataccttttggtcaaggctggcccgcgagctcctggcgtgggagcgtgattttgacaccgcccgttatggaacttttgaaatgggcaatattgcctggtttctcggtgggcgcttgaacgcttcgtataattgcgttgatcgtcatgcgatcaaggacccaaataagctggcgctcatttatgaggcggatgatcccggcgaaggccgcaacattacatacggggagctcctgaaggaggtttcgcggttagcttgggtattgaagcaggctggcgttaagaagggggacactgttgcaatctacctgcccatgattccagaggctgttattgcgttcctggcgtgtgttcgcattggtgcggttcactctgtcgttttcgctggattctcctctgattcgctccgggaccgcgttttggacgcccgctccagggtcgttattaccacggatgagggcaagcgcggtgggaagctcattgggacgaagaagatcgtggacgaggcccttaggcaatgccctgacgtgaatcactgtatagtgtacaagagatcgggtgccgatgtgccctggactaagggtcgggacatgtggtggcatgaggaggtcgagaagtaccctaactacatcgttccggagccgatggattcagaggaccctcttttccttctgtacacgtcagggtcaactggaaaaccaaagggcctgatgcacacgactggcggctatttggttggcgcagctgcaactggcaaatatgtattcgacatccatcctaccgaccgcttcttctgcggtggggatgtaggctggattacaggacacacctatgtcgtctatgctcctctgcttctcggatgcgcaagtgtgattttcgagagtactccagcatatcccaacttctcccggtactgggatgttattgagaagcatgaagtgacccagttctacgttgccccaacggcgctgaggctcttgaagcgcgctggaaatcaatacatccaccacaaacttgagactcttcgcatcttgggatccgtcggtgaaccaattgccgcagaggtgtggaagtggtatttcgaggtggtcggaaaggaagaatgccatctggtcgacacatactggcaaaccgagactggctctcatgttattactccactgggtggcatcacgccaaccaaacccggcagtgcctcccttcccttctttggcattgaacccgccattattgatccagcatcaggagaggaaatcaaaggcaatgatgttgaaggtgttttggccattaagcatccatggcccagcatggcccgcacagtctggggtgctcacaagagatatatggacacctatttcaatgtttataagggactctatttcactggcgatggtgctggtcgagatatggacggatactattggattcggggccgtgtcgatgatgttgtcaacgtttctggccatcgtttatcaacagcagaaattgaagctgctctcattgaacatcatgctgttgctgaggctgctgtcgttggtattgccgatgaactcaccggacaggctgttaatgcatttgtttcgctgaaaaatggggatgatggcgaatcactccgcaaagacctcgttttgcaagttcgcaagtcaattggtccatttgctgcacccaaggctgtgttcgtcgtcgaagacctgcccaagactcgaagcggtaagattatgcgacgaattttgagaaagattctcagcggcgaggaggacagcctgggtgacatctcaactctatccgatccaagcgtcgttgccaagatcattgacgtctaccaagcgacaaagagcaagtga

SEQ ID NO: 151781 - protein, 669 aa, Paracoccidioides brasiliensis (strain Pb03)
MSDGAVSPLKGPVVIEAHEVDTFHVPQAFLDKHPTRTHLKDLDEYKKLYEESIRDPDTFWSRLARELLAWERDFDTARYGTFEMGNIAWFLGGRLNASYNCVDRHAIKDPNKLALIYEADDPGEGRNITYGELLKEVSRLAWVLKQAGVKKGDTVAIYLPMIPEAVIAFLACVRIGAVHSVVFAGFSSDSLRDRVLDARSRVVITTDEGKRGGKLIGTKKIVDEALRQCPDVNHCIVYKRSGADVPWTKGRDMWWHEEVEKYPNYIVPEPMDSEDPLFLLYTSGSTGKPKGLMHTTGGYLVGAAATGKYVFDIHPTDRFFCGGDVGWITGHTYVVYAPLLLGCASVIFESTPAYPNFSRYWDVIEKHEVTQFYVAPTALRLLKRAGNQYIHHKLETLRILGSVGEPIAAEVWKWYFEVVGKEECHLVDTYWQTETGSHVITPLGGITPTKPGSASLPFFGIEPAIIDPASGEEIKGNDVEGVLAIKHPWPSMARTVWGAHKRYMDTYFNVYKGLYFTGDGAGRDMDGYYWIRGRVDDVVNVSGHRLSTAEIEAALIEHHAVAEAAVVGIADELTGQAVNAFVSLKNGDDGESLRKDLVLQVRKSIGPFAAPKAVFVVEDLPKTRSGKIMRRILRKILSGEEDSLGDISTLSDPSVVAKIIDVYQATKSK

SEQ ID NO: 151782 - DNA, 2010 bp, Paracoccidioides brasiliensis (strain Pb18)
  CDS (1)..(2010)
atgtctgatggtgcggttacacccctcaaagggccagtggtcatcgaagcccacgaagtcgacaccttccatgtcccgcaagcctttctggacaagcatcccaccagaacccacctaaaagatcttgacgagtacaagaaactctacgaagaatcgatccgggatccagataccttttggtctaggctggcccgcgagctcctgacgtgggagcgtgattttgacaccgcccgttatggaacttttgaaatgggcaatattgcctggtttctcggtgggcgcttgaacgcttcgtataattgcgttgatcgtcatgcgatcaaggacccaaataagctggcgctcatttatgaggcggatgatcccggcgaaggccgcaacattacatacggggagctcctgaaggaggtttcgcggttagcttgggtattgaagcaggctggcgttaagaagggggacactgttgcaatctacctgcccatgattccagaggctgttattgcgttcctggcgtgtgttcgcattggtgcggttcactctgtcgttttcgctggattctcctctgattcgctccgggaccgcgttttggacgcccgctccagggtcgttattaccacggatgagggcaagcgcggtgggaagctcattgggacgaagaagatcgtggacgaggcccttaagcaatgccctgacgtgaatcactgtatagtgtacaagagaacgggtgccgatgtgccctggactaagggtcgggacatgtggtggcatgaggaggtcgagaagtaccctaactacatcgttccggagccgatggattcagaggaccctcttttccttctgtacacgtcagggtcaactggaaaaccaaagggcctgatgcacacgactggcggctatttggttggcgcagctgcaactggcaaatatgtattcgacatccatcctaccgaccgcttcttctgcggtggggatgtaggctggattacaggacacacctatgtcgtctatgctcctttgcttctcggatgcgcaagtgtgattttcgagagtactccagcatatcccaacttctcccggtactgggatgttattgagaagcatgaagtgacccagttctacgttgccccaacggcgctgaggctcttgaagcgcgctggaaatcaatacatccaccacaaacttgagactcttcgcatcttgggatccgtcggtgaaccaattgccgcagaggtgtggaagtggtatttcgaggtggtcggaaaggaagaatgccatctggtcgacacatactggcaaaccgagactggctctcatgttattactccactgggtggcatcacgccaaccaaacccggcagtgcctcccttcccttctttggcattgaacccgccattattgatccagcatcaggagaggaaatcaaaggcaatgatgttgaaggtgttttggccattaagcatccatggcccagcatggcccgcacagtctggggtgctcacaagagatatatggacacctatttcaatgtttataagggactctatttcactggcgatggtgctggtcgagatatggacggatactattggattcggggccgtgtcgatgatgttgtcaacgtttctggccatcgtttatcaacagcagaaattgaagctgctctcattgaacatcatgctgttgctgaggctgctgtcgttggtattgccgatgaactcaccggacaggctgttaatgcatttgtttcgctgaaaaatggggatgatggcgaatcactccgcaaagacctcgttttgcaagttcgcaagtcaattggtccatttgctgcacccaaggctgtgttcgtcgtcgaagacctgcccaagactcgaagcggtaagattatgcgacgaattttgagaaagattctcagcggcgaggaggacagcctgggtgacatctcaactctatccgatccaagcgtcgttgccaagatcattgacgtctaccaagcgacaaagagcaagtga

SEQ ID NO: 151783 - protein, 669 aa, Paracoccidioides brasiliensis (strain Pb18)
MSDGAVTPLKGPVVIEAHEVDTFHVPQAFLDKHPTRTHLKDLDEYKKLYEESIRDPDTFWSRLARELLTWERDFDTARYGTFEMGNIAWFLGGRLNASYNCVDRHAIKDPNKLALIYEADDPGEGRNITYGELLKEVSRLAWVLKQAGVKKGDTVAIYLPMIPEAVIAFLACVRIGAVHSVVFAGFSSDSLRDRVLDARSRVVITTDEGKRGGKLIGTKKIVDEALKQCPDVNHCIVYKRTGADVPWTKGRDMWWHEEVEKYPNYIVPEPMDSEDPLFLLYTSGSTGKPKGLMHTTGGYLVGAAATGKYVFDIHPTDRFFCGGDVGWITGHTYVVYAPLLLGCASVIFESTPAYPNFSRYWDVIEKHEVTQFYVAPTALRLLKRAGNQYIHHKLETLRILGSVGEPIAAEVWKWYFEVVGKEECHLVDTYWQTETGSHVITPLGGITPTKPGSASLPFFGIEPAIIDPASGEEIKGNDVEGVLAIKHPWPSMARTVWGAHKRYMDTYFNVYKGLYFTGDGAGRDMDGYYWIRGRVDDVVNVSGHRLSTAEIEAALIEHHAVAEAAVVGIADELTGQAVNAFVSLKNGDDGESLRKDLVLQVRKSIGPFAAPKAVFVVEDLPKTRSGKIMRRILRKILSGEEDSLGDISTLSDPSVVAKIIDVYQATKSK

SEQ ID NO: 151784 - DNA, 2067 bp, Ajellomyces dermatitidis (strain ER-3)
  CDS (1)..(2067)
atgtctgatggtcccattacgccgcctaaggcgccagtagttgttgaagcccacgaggttgacactttccatgtcccccaagcttttgtcgagaaccatcctacgagaacccatctaaaggacctggacgagtataagaagctctatgaagaatcgatccgtgacccgcatactttttgggcacggctggcccgtgagctcattacattcgaaaaggatttcgacaccacccgcaacggctcctttgaaggcggagacgttgcgtggttccttggtgggcgtttgaacgcgtcgtacaattgcgtcgaccgccatgctatcaaggatcccaacaaggtggctatcatttacgaggcggatgaacccaatgaaggtcgcactattacatatggcgagctcctgaaggaagtttcccggatggcctgggtgctgaagcaggctggtgttagaaagggggataccgtggccatttacttgcctatgattcccgaggccgtgattgcgttcatggcgtgtattcgtattggtgcggttcactccgtcgtttttgctgggttctcctcggattctctccgcgaccgcgtcttggatgccaagtcgaaagttgtcattaccacagacgaggggaagcgtggtgggaagctgattgggaccaagaagattgttgacgaggccctcagtcaatgcccggatgtcacaaactgcattgtgtacaagaggacgggcgctgatgtgccgtggacgaagggccgagatttgtggtggcatgaggaggtcgagaagtatcccaactacattccccctgagtcaatgaactcggaggatcctctcttcctcctgtacacatccggttcgactgggaagcccaagggtctgatgcacacgacagctggttatttggttggcgcggccgcaactggcaaatatgtgtttgatattcatgactcagaccgcttcttctgcggtggtgatgttggttggattacggggcacacctatgtcgtatatgctcctctgcttcttggatgtgcaactctggtgtttgagagcacgccggcatatcctaacttctcccgttattgggatgttattgagaagcacaaggtgacccagttctatgttgccccaactgctctgagacttctgaagcgtgctggaaatgactacatccaccacaagctcaagagtctccgtattttgggttctgttggcgaaccaattgcggccgaggtgtggaaatggtatttcgaggtcgttggaagggaagagtgtcatcttattgacacatactggcaaactgagaccggctcccacgttattacacccctgggtggcatcacgccaacgaaacctggcagtgcttcgctccccttcttcggcattgaacctgccatcattgacccggtatcgggagaggaaatcaaaggtaacgacgttgaaggtgtcctagccattaaacagccatggcccagtatggcccgcacagtctggggtggccacaagagatatatggacacgtatttcaatgtctacaagggcttttacttcactggcgatggtgctggacgtgatcttgacggatactactggatccgaggccgtgttgacgacgttgtcaacgtttctggccaccgtctgtcaactgcagagattgaagctgctcttattgaacactctgctgtggctgaagcggctgtcgtcggtattgcggatgaactcaccggacaagccgtcaacgcctttgtcgccctgaaggccagcagcgacaatgtcgaacaactccacaaggatcttatcatgcaagttcgcaaatcgattgggccatttgctgctcccaaggctgtattcatcgttgatgacctgccgaagactcgaagtggtaagatcatgcgacgaatcttgagaaagattcttagcggtgaggaggatagcttgggtgatatctcgactctatccgacccaagtgttgttgcgaaaatcatcgatacttaccatgcttcaaagaagaagaagggtatttcttttgttttccaaaatcatgaaaataaaaataaaatgaatgaataa

SEQ ID NO: 151785 - protein, 688 aa, Ajellomyces dermatitidis (strain ER-3)
MSDGPITPPKAPVVVEAHEVDTFHVPQAFVENHPTRTHLKDLDEYKKLYEESIRDPHTFWARLARELITFEKDFDTTRNGSFEGGDVAWFLGGRLNASYNCVDRHAIKDPNKVAIIYEADEPNEGRTITYGELLKEVSRMAWVLKQAGVRKGDTVAIYLPMIPEAVIAFMACIRIGAVHSVVFAGFSSDSLRDRVLDAKSKVVITTDEGKRGGKLIGTKKIVDEALSQCPDVTNCIVYKRTGADVPWTKGRDLWWHEEVEKYPNYIPPESMNSEDPLFLLYTSGSTGKPKGLMHTTAGYLVGAAATGKYVFDIHDSDRFFCGGDVGWITGHTYVVYAPLLLGCATLVFESTPAYPNFSRYWDVIEKHKVTQFYVAPTALRLLKRAGNDYIHHKLKSLRILGSVGEPIAAEVWKWYFEVVGREECHLIDTYWQTETGSHVITPLGGITPTKPGSASLPFFGIEPAIIDPVSGEEIKGNDVEGVLAIKQPWPSMARTVWGGHKRYMDTYFNVYKGFYFTGDGAGRDLDGYYWIRGRVDDVVNVSGHRLSTAEIEAALIEHSAVAEAAVVGIADELTGQAVNAFVALKASSDNVEQLHKDLIMQVRKSIGPFAAPKAVFIVDDLPKTRSGKIMRRILRKILSGEEDSLGDISTLSDPSVVAKIIDTYHASKKKKGISFVFQNHENKNKMNE

SEQ ID NO: 151786 - DNA, 2076 bp, Coccidioides posadasii (strain C735)
  CDS (1)..(2076)
atgtctgagacgcctgctgaaccaaaacccccagtggtcgtggaggcccaccaggtcgataccttcgacgttccaggagtcttctatgagaaccacccccatgaaccacacctgagtggcatgaatgaatataaccagctctaccaacaatctatcaatgatcctgacaccttctgggcgcgcatggcgcgcgatcttattactttcgaaaaggatttcgacaagactcacattgggaccctcgaaggcggggataatgcctggtttgtcggtggtcgattaaatgcgtccttcaactgcgttgatcgccatgcaatgcgtgacccgaacaaggttgcaatcatctatgaagccgatgagcctggccacggccgcagtattacctatgcagaattgttgaaggaagtctccagactggcctgggtgatgaagagccaaggtgttaggagaggcgataccgtcgcgatttatcttcctatgatccctgaggccatcttcgcgcttcttgcctgtgcgcgtattggcgccattcattctgtggtctttgcgggtttctcttccgattccctgcgtgatcgtaccctggatgcccggtcaaaattcattatcaccaccgatgagggaaagcgtggtggaaaagtcattgggactaagaaaattgttgatgaagctttaaaacaatgcccagatgttaccagttgccttgttttcaagagaactggggccgacgtgccttggaccaaaggccgtgacctgtggtggcatgaagaggttgaaaaatatccaaattatctgcctgctgagtcaatggactctgaagacccgcttttccttctctacacatctggctccaccgggaaaccaaagggtgttatgcacacaactgctggctaccttgttggagcagctgcaactggaaaatatgtctttgatattcacccagctgaccgtttcttttgcggtggtgatgttggatggattactggacatacttatgttgtctatgctccattgcttttggggtgcactactgtggtgtttgaaagcacaccagcgtatcccaatttctcgcgatactgggatgttattgagaagcacaaggtcacccagttttatgtagcacctacggctttgcgccttttgaaacgtgcaggtgaccaccacataaaccatgaaatgaaggatttacgtattctgggctctgttggtgaaccaatcgctgcagaggtttggaagtggtaccatgaggttgttgggaaaagacaagcccatattgttgatacatactggcaaaccgagaccggctcccatgttatcacccccttgggtggtattactccaactaaaccagggagtgcttcgcttccattctttggtattgaccctgtcattctggatccagttacaggtgcagagattccgggaaatgatgtggagggaatccttgctttcagaaagccatggccaagcatggctcgcactgtatggggcgatcataaacgatacatggacacctatctcaatgtttataaaggcttttatttcactggtgatggtgctggacgtgatcatgaaggctattactggattagaggtcgtgtggatgacgttgtgaacgtctctggccaccgcctctcaactgcagagatcgaagcagcacttatcgaacaccactgtgttgcggaagccgcggttgttggagttcctgatccgctaactggacaagccgtgcatgcatttgtggccctgaagagtggaaatgacaatagagaacagctccgaaaggagttgattatgcaagtccgcaaatcgattggaccatttgctgccccgaaggttgtgtttgtgatcgatgaccttccgaaaacacgtagcgggaagatcatgagacgcatcttgcgaaagattctgagcggtgaggaggacagtcttggtgacatttcaacgctctcggatcctagcgtcgtgaataaaatcatcgacactttccacgaatggaaaagagctatggcagctgccgccgccgccgctgctgctgtctcagcaaccgcgccaccaaacagcacaaccggttaa

SEQ ID NO: 151787 - protein, 691 aa, Coccidioides posadasii (strain C735)
MSETPAEPKPPVVVEAHQVDTFDVPGVFYENHPHEPHLSGMNEYNQLYQQSINDPDTFWARMARDLITFEKDFDKTHIGTLEGGDNAWFVGGRLNASFNCVDRHAMRDPNKVAIIYEADEPGHGRSITYAELLKEVSRLAWVMKSQGVRRGDTVAIYLPMIPEAIFALLACARIGAIHSVVFAGFSSDSLRDRTLDARSKFIITTDEGKRGGKVIGTKKIVDEALKQCPDVTSCLVFKRTGADVPWTKGRDLWWHEEVEKYPNYLPAESMDSEDPLFLLYTSGSTGKPKGVMHTTAGYLVGAAATGKYVFDIHPADRFFCGGDVGWITGHTYVVYAPLLLGCTTVVFESTPAYPNFSRYWDVIEKHKVTQFYVAPTALRLLKRAGDHHINHEMKDLRILGSVGEPIAAEVWKWYHEVVGKRQAHIVDTYWQTETGSHVITPLGGITPTKPGSASLPFFGIDPVILDPVTGAEIPGNDVEGILAFRKPWPSMARTVWGDHKRYMDTYLNVYKGFYFTGDGAGRDHEGYYWIRGRVDDVVNVSGHRLSTAEIEAALIEHHCVAEAAVVGVPDPLTGQAVHAFVALKSGNDNREQLRKELIMQVRKSIGPFAAPKVVFVIDDLPKTRSGKIMRRILRKILSGEEDSLGDISTLSDPSVVNKIIDTFHEWKRAMAAAAAAAAAVSATAPPNSTTG

SEQ ID NO: 151788 - DNA, 2031 bp, Nectria haematococca (strain 77-13-4 / FGSC 9596 / MPVI)
  CDS (1)..(2031)
atggcaaccgtcgagaacccccaagtccccgttgagccggctgtggctcccgagaagactcaagagaccaaggcccccgtggttgctgaggcccaccttgtcgacacctaccagcacccccacaggccccaccttgccaacctcgaggagtacaagcgactctacaaggagtccatcacccagcccaacaagttctgggctgagcgcgcccgtgagctcatctcgtgggaccgcgacttccagaccacccgcagcggtagcctccagaacgccgacgtctcgtggttcaacgagggtcgcctcaacgcctcttacaactgtgtcgaccgccacgcctttgctgatcctgaccgtgttgccatcatctacgaggccgacgaccctagcgaaggccgcaatgtcacctacagcgagctcctccgcgaggtttcccgcaccgcctgggtcctcaagcaaatgggtgtccgcaagggcgacactgttgccatctacctgcccatgattcccgaggccattgtcgcccttatggcctgtgtccgtatcggtgctgtccactccgtcatctttgccggtttctctgccgactctctccgcgaccgtgttgtcgatgctggctccaaggttgtcatcaccaccgacgagggcaagcgaggtggcaagttgattggcaccaagaagattgtcgacgatgctcttaagcagtgccccgacgtcgagcacgtcctcgtctacaagcgcactggctctgagatcccctggaccaccggccgtgacttctggtggcacgaggaggttgagaagtggcccaactacttccctcctgagcccatggcttctgaggaccctctcttcctcctgtacacctctggttctaccggcaagcccaagggtgttttgcacaccactgccggttaccttctcggcgctgccatgaccggcaagtacgtcttcgatatccacgagggcgaccgatacttctgcggtggtgatgtcggttggattactggccacacctatgtcgtctacgcccctctgatgctcggtgtctctaccgtcgtctttgagggtactcccgccttccccaacttctcccgatactgggatatcatcgagcgccacaacgtcacccagttctacgtcgcccctactgccctgcgactgctcaagcgtgccggtgacgagcatgttcgaggcaagttcgctcacctccgggtcctgggctctgtcggtgagcctattgctgctgagatctggaagtggtactttgagattatcggaaaggaggagtgccacattgtcgacacctactggcagactgagtccggttctcacacccttacccctcttgctggtatcactcccaccaagcccggcagttgctctctgcccttcttcggcatcgagcccgccctcatcgaccccgtgtcgggtgaggagatccacggcaacgatgttgagggtgtcctggccttcaagcagccctggcccagcatggcccgcaccgtctggggagcccacaagcgatacaaggagacctacctcgatgtctacaagggctactacttcaccggtgatggtgctgcccgtgaccacgagggcttctactggatccgaggacgtgtcgatgatgtcgttaacgtcagcggtcaccgtctgtcgactgccgagatcgaggctgccctcctcgagcaccacgccgttgccgatgccgccgtcgttggtattgccgacgagctcaccggccaggctgtcaacgcctttgttgatctcaaggagaacgttgagtcgactgacgctcttcgcaaggagctcgtcatccaggtgcgaaagagcatcggaccgtttgccgcccccaaggcggtgtacattgtccccgacatgcccaagacacgaagtggcaagattatgcgccgtgtgttgagaaagattgtcgcgggtgaggaggatcagcttggtgatatcactactctatctgatccctctgtcgtggaaaagattatcaagagcgtgcatgaggccaagcgcaagtag

SEQ ID NO: 151789 - protein, 676 aa, Nectria haematococca (strain 77-13-4 / FGSC 9596 / MPVI)
MATVENPQVPVEPAVAPEKTQETKAPVVAEAHLVDTYQHPHRPHLANLEEYKRLYKESITQPNKFWAERARELISWDRDFQTTRSGSLQNADVSWFNEGRLNASYNCVDRHAFADPDRVAIIYEADDPSEGRNVTYSELLREVSRTAWVLKQMGVRKGDTVAIYLPMIPEAIVALMACVRIGAVHSVIFAGFSADSLRDRVVDAGSKVVITTDEGKRGGKLIGTKKIVDDALKQCPDVEHVLVYKRTGSEIPWTTGRDFWWHEEVEKWPNYFPPEPMASEDPLFLLYTSGSTGKPKGVLHTTAGYLLGAAMTGKYVFDIHEGDRYFCGGDVGWITGHTYVVYAPLMLGVSTVVFEGTPAFPNFSRYWDIIERHNVTQFYVAPTALRLLKRAGDEHVRGKFAHLRVLGSVGEPIAAEIWKWYFEIIGKEECHIVDTYWQTESGSHTLTPLAGITPTKPGSCSLPFFGIEPALIDPVSGEEIHGNDVEGVLAFKQPWPSMARTVWGAHKRYKETYLDVYKGYYFTGDGAARDHEGFYWIRGRVDDVVNVSGHRLSTAEIEAALLEHHAVADAAVVGIADELTGQAVNAFVDLKENVESTDALRKELVIQVRKSIGPFAAPKAVYIVPDMPKTRSGKIMRRVLRKIVAGEEDQLGDITTLSDPSVVEKIIKSVHEAKRK

SEQ ID NO: 151790 - DNA, 1998 bp, Nectria haematococca (strain 77-13-4 / FGSC 9596 / MPVI)
  CDS (1)..(1998)
atgggtgaggtattggaaactcagacggcgcctgttggcggtagtgaggccgaggaatggtatcttcctgataagatgcttgccagacaccctggcaggcctcacattgctggcctcgatgagtatcgtcagatgcaccagctctccatccaggatcctgataccttttggggacaacaggctcgagatcttctctcctgggagactgactttcacaccgtccagcatggatccttgtccgagggcaacgttggctggttccttggaggcaagctgaacgcatccttcaactgcgtggatcgacacgccctcaaggaccccaataaggttgctataattcacgaaactgatgatggacatggcggccactcggtgacttatggagagctgctgaagcaggtgagcaaggtttcttgggttcttaaggatctgggtgtgcgaaagggcgataccgtcgctatctacatgcctatggttcctgaggccttggttgccattcttgcctgtgctcgcattggcgcagttcactccgtcgtcttcgctggcttttctgccggatctcttcgagatcgcatcaccgacgccaagagcaaggtcgtcatcacagccgacgaaagtcagcgaggcggcaagactatcggcatcaagaagattgtcgatgaggccctaagcccccttgagggtgtccagactttggtcttcaagcggactggtgccgaggttggctgggtttccgaccgagaccactggtggcatgaagaggtcaagaagtggcctagttatatccctcccgtttccatggacgcagaggatccccttttccttctgtatacgtctggatccacgggcaagccaaagggtatcttgcatactaccggcggctatctcgtaggagctgcggccactggcaagtatgtgttcgacattcacggagatgaccgctatttctgtgctggcgatgtcggatggattactggccacacctatgttgtttatgcccctctgctcctgggcgtgtccaccgtcgttttcgagggcacacccacatacccttccatcaaccgctactgggacattatcgccaaccacaagattacgcacttctacgttgcgcccactgctcttcgacttctgaagagagctggatcggatcctgttgaccacgacaccagcagcctccgcgtccttggttcagtcggagagcctatcgctcctgagatttggaagtggtatttcgataccattggcaagggtgaatgtcacgttgttgatacgtactggcaaactgagactggatctcatgctgttacgcccctcgctggtgtgacgcctaccaagcccggatctgcttgtttgcccttctttggtatcgatactgtcttgatcgaccccgtttctggtgaggaaattcatggaaatggagtcgagggtgtgcttgctttcaagtcttcttggcctagcatggctcgaacagtgtacggtgatcaccaaagattccaggagacatatctggacgtttacaaggggtactatttcaccggtgatggtgctagccgtgatcaggatggcttttactggattcgcggccgcgttgacgatgtcatcaacgtcagcggccatcgattatccactgctgagatcgaagctgccatggtcgagcactccgcggtcgctgagtctgccgttgtcggtatcgccgacgagctcactggtcagtccgtggtggcttttgtctgcctcaaggaggccttcagggccaatgaggaagccattcatcttgaactcaggctgcaagttcgaaagaacattggtcctttcgcggcccctaagaacatctttgtggttactgatctccccaagactcgatctggaaagatcatgcgtcgtgttctgcgcaaggttgtcatgggcgagcaggatcagcttggagatgtaactaccctgtcggatccctccgttgttggaaagatcatcgacgttgtgcacaagggggagtag

SEQ ID NO: 151791 - protein, 665 aa, Nectria haematococca (strain 77-13-4 / FGSC 9596 / MPVI)
MGEVLETQTAPVGGSEAEEWYLPDKMLARHPGRPHIAGLDEYRQMHQLSIQDPDTFWGQQARDLLSWETDFHTVQHGSLSEGNVGWFLGGKLNASFNCVDRHALKDPNKVAIIHETDDGHGGHSVTYGELLKQVSKVSWVLKDLGVRKGDTVAIYMPMVPEALVAILACARIGAVHSVVFAGFSAGSLRDRITDAKSKVVITADESQRGGKTIGIKKIVDEALSPLEGVQTLVFKRTGAEVGWVSDRDHWWHEEVKKWPSYIPPVSMDAEDPLFLLYTSGSTGKPKGILHTTGGYLVGAAATGKYVFDIHGDDRYFCAGDVGWITGHTYVVYAPLLLGVSTVVFEGTPTYPSINRYWDIIANHKITHFYVAPTALRLLKRAGSDPVDHDTSSLRVLGSVGEPIAPEIWKWYFDTIGKGECHVVDTYWQTETGSHAVTPLAGVTPTKPGSACLPFFGIDTVLIDPVSGEEIHGNGVEGVLAFKSSWPSMARTVYGDHQRFQETYLDVYKGYYFTGDGASRDQDGFYWIRGRVDDVINVSGHRLSTAEIEAAMVEHSAVAESAVVGIADELTGQSVVAFVCLKEAFRANEEAIHLELRLQVRKNIGPFAAPKNIFVVTDLPKTRSGKIMRRVLRKVVMGEQDQLGDVTTLSDPSVVGKIIDVVHKGE

SEQ ID NO: 151792 - DNA, 1911 bp, Verticillium albo-atrum (strain VaMs.102)
  CDS (1)..(1911)
atggagacctcatgcctccccgaagtcgcgtgcgccgataccgctatcgtccatcgtccagctctgtcctgctgcgaccgcaatgtggtccacaagggcaaggctgggagcaccccagcaaaccccacattgccagagtaccagaagctgtacaaggagtccatcacggatcccacaaagttctggggcgaaaaggcgcgcgagctcctgtcctggtacaccgacttccaaaccgttcgcagcggctccttcgagggcggcgacacagcctggttcgtcgagggcaccctcaacgcctgctacaacctcgtcgaccgtcatgcctacaaggatcccaaccgcgttgccatcatctacgaggccgacgagcccgatggcggccgcaaggtcacctaccagcagcttctgcgtgacgtctcgcaggtcgcctgggtcctgcgcgagatgggcgtccgcaagggcgataccgtcgccatctacctgcccatgattcccgaggccctcgtcgccattctcgcctgcatccgtctcggtgccgtccactcggtcgtctttgccggcttctccgccgactcgctgcgcgaccgtcgtggcggcaagctcatcggcaccaagaagattgtcgacgacgccctgaagcagtgccccgacgtctcccacgtcctcgtctacaagcgcaccggcgccgacgtgcccttcaccgagggccgcgactggaccccctgttcctcctctacacctccggtttcaccggcaagcccaagggcgtcatgcacacgacggccggctatctcctcggcgccgccttgcacgggcaaatacgtctttgacattcacgacggcgaccgctacttctgcggcggcgacgtcggctggatcacgggccacacctacgtcgtctacgcgccgctgctgctcggcgtgacgacggtcgtcttcgagggcacacccgcctaccccaacttttcgcgctactgggacatcatcgccaagcacgaggtgacgcagttctacgtcgcgccgacggcgctgcgcctgctcaagcgcgccggcgacgagcacgtcaaggccgacatgaagcacctgcgcgtgctcggctccgtcggcgagcccatcgccgccgagatctggaagtggtactttgagaccgtcggcaaggaggaggcgcacgtcgtcgacacgtactggcagaccgagacgggctccaacgtcatcacgccgctggcgggcgtcacgccgaccaagcccggcagcgcctcgctgccctttttcggcatcgagcccgccattatcgaccccgtgtccggcgacgagatccacggcaacgacgtcgagggcgtcctcgccttcaagcagccctggcccagcatggcccgcaccgtctacggcgcccacaagcgctacatggacacgtacctcaacgtctacaagggctactacttcaccggcgacggcgccggccgcgaccacgagggcttctactggatccgcggccgcgttgacgacgtcgtcaacgtctcgggccatcgcctctctacggccgagatcgaggccgccctgctcgagcaccactccatcgccgaggccgccgtcgtcggcgtcgccgacgagctcaccggccaggccgtcaacgcctttgtcgccctcaaggacgccaccggcgccggcgatgccctgcgcaaggagttcatcatgcaggtccgcaagagcatcggcccctttgccgcccccaaggccgtcttcatcgtccccgacctgcccaagacgcgctccggcaagatcatgcgccgcattctgaggaagattctcgccggcgaggaggaccagctcggcgatatcacaacgttgtcggacccctccatcgtggaaaagattatcaaccttgtgcacgaggccaagggaaagaaatga

SEQ ID NO: 151793 - protein, 636 aa, Verticillium albo-atrum (strain VaMs.102)
METSCLPEVACADTAIVHRPALSCCDRNVVHKGKAGSTPANPTLPEYQKLYKESITDPTKFWGEKARELLSWYTDFQTVRSGSFEGGDTAWFVEGTLNACYNLVDRHAYKDPNRVAIIYEADEPDGGRKVTYQQLLRDVSQVAWVLREMGVRKGDTVAIYLPMIPEALVAILACIRLGAVHSVVFAGFSADSLRDRRGGKLIGTKKIVDDALKQCPDVSHVLVYKRTGADVPFTEGRDWTPCSSSTPPVSPASPRASCTRRPAISSAPPCTGKYVFDIHDGDRYFCGGDVGWITGHTYVVYAPLLLGVTTVVFEGTPAYPNFSRYWDIIAKHEVTQFYVAPTALRLLKRAGDEHVKADMKHLRVLGSVGEPIAAEIWKWYFETVGKEEAHVVDTYWQTETGSNVITPLAGVTPTKPGSASLPFFGIEPAIIDPVSGDEIHGNDVEGVLAFKQPWPSMARTVYGAHKRYMDTYLNVYKGYYFTGDGAGRDHEGFYWIRGRVDDVVNVSGHRLSTAEIEAALLEHHSIAEAAVVGVADELTGQAVNAFVALKDATGAGDALRKEFIMQVRKSIGPFAAPKAVFIVPDLPKTRSGKIMRRILRKILAGEEDQLGDITTLSDPSIVEKIINLVHEAKGKK

SEQ ID NO: 151794 - DNA, 1977 bp, Sordaria macrospora
  CDS (1)..(1977)
atgtctggcagccccgattcttccgcggcagtagtgcccgaggctcacgttgttgagacctaccaaccccctaaggagatgcttgagaacttcgaggagtaccagaagttgtacaagcagtccatcaccgagcccaatgtgttctgggctgagcgcgcccgcgagctcctcacgtggagcaaggatttccagactgtccacagcggttccctcgtcaacggcgacaacgcttggttcgtagagggcgagctcaacgcctcgtacaactgcgtcgacagacacgcccacaaggaccccaacagagtcgccattatctacgaggccgacgagcccggtgagggaaggaatgtcacctatggcgagctcctcagggaggtctccaagctcgctcatgtcctcaccaacttgggcgtcaagaagggagacaccgtcgccatctacctccccatgattcccgaggccatcgttgcccttcttgcttgcagcagaatcggcgccatccactcggtcattttcgccggtttctcctccgactccctccgcgatcgtgtcgtcgatgcccagtccaaggtcgtcatcaccaccgatgagggcaagcgcggtggcaagctgattggcaccaagaagatcgttgatgaggctctccagcagtgccccgatgttcgcaacgttctcgtctacaagcgcaccggcgctgacatcaacatgacccccggccgtgatctctggtggcacgaggaggttgaaaagtaccctgcttactacacccccgtacccatggcctctgaggatcctctcttcctcctctacacctctggttccaccggcaagcccaagggtgttgctcactccaccgctggttacctgcttggtgctgccatgaccggcaagtacgttttcgacatccacgacggtgaccggtacttctgcggtggtgacgtcggctggattaccggtcactcctatgtcgtctatgccccgctcctgctcggtgtctcgaccgtcgttttcgagggtacccccgcctaccccaacttctcccgctactgggacatcattgagaagcacaaggtcacccagttttacgttgctcccactgccctacgcctgctgaagcgcgccggtgaccaccacgtccgcaacgagatgaagcacctccgtgttctcggctccgtcggtgagcccatcgccgccgaggtctggaagtggtactacgatgttgtcggcaagggccgtgcccagatttgcgacacctactggcagaccgagactggctccaacgtcatcactccccttgctggcgttacccccaccaagcccggttccgcctctctccccttcttcggtatcgagcccgcgcttgtcgaccccgttaccggcgaggagatccacggcaacaacgtcgagggtgtcctggccttcaagcaggcctggcccagcatggctcgcaccgtctggggtgctcacaagcgctatatggagacctatcttcatgtgtacaagggctactacttcacgggcgacggtgctgcccgcgaccacgagggcttctactggattcgcggccgtgtcgacgatgtcgtcaacgtcagtggccaccgtctcagcactgccgagattgaggctgctctgattgagcatcactctattaccgaggctgctgtcgtcggtgtcgccgacgagctcaccggccaggccgtcaacgccttcgttggcgtcaaggagggtaccgagatcaacgacgctctccgtaaggagttcgtccttcaggtccgccgcagcatcggtcccttcgctgctcccaaggccatctacgtcgtccctgatcttcccaagactcgctctggcaagatcatgcgccgtattctgaggaagatcgttgccggcgaggaggatcagctcggtgatatcaccactctctccgaccccagcgtcgttgccaagatcatcgagaccgtccacgagcagcgcaagtaa

SEQ ID NO: 151795 - protein, 658 aa, Sordaria macrospora
MSGSPDSSAAVVPEAHVVETYQPPKEMLENFEEYQKLYKQSITEPNVFWAERARELLTWSKDFQTVHSGSLVNGDNAWFVEGELNASYNCVDRHAHKDPNRVAIIYEADEPGEGRNVTYGELLREVSKLAHVLTNLGVKKGDTVAIYLPMIPEAIVALLACSRIGAIHSVIFAGFSSDSLRDRVVDAQSKVVITTDEGKRGGKLIGTKKIVDEALQQCPDVRNVLVYKRTGADINMTPGRDLWWHEEVEKYPAYYTPVPMASEDPLFLLYTSGSTGKPKGVAHSTAGYLLGAAMTGKYVFDIHDGDRYFCGGDVGWITGHSYVVYAPLLLGVSTVVFEGTPAYPNFSRYWDIIEKHKVTQFYVAPTALRLLKRAGDHHVRNEMKHLRVLGSVGEPIAAEVWKWYYDVVGKGRAQICDTYWQTETGSNVITPLAGVTPTKPGSASLPFFGIEPALVDPVTGEEIHGNNVEGVLAFKQAWPSMARTVWGAHKRYMETYLHVYKGYYFTGDGAARDHEGFYWIRGRVDDVVNVSGHRLSTAEIEAALIEHHSITEAAVVGVADELTGQAVNAFVGVKEGTEINDALRKEFVLQVRRSIGPFAAPKAIYVVPDLPKTRSGKIMRRILRKIVAGEEDQLGDITTLSDPSVVAKIIETVHEQRK

SEQ ID NO: 151796 - DNA, 1989 bp, Arsenophonus nasoniae (son-killer infecting Nasonia vitripennis)
  CDS (1)..(1989): transl_table=11
atgattaacacaactgaggagaagaaaaatatgatatcaacattcaagtaccccatacctactgaaattgccgcacataccttagttaataaaaagcaatatctaaaagattatcaattatcccttaaagatcctgacgcattttggcgagaaaaaggtcaaattgttgactggataaaaccttataccaaagtaaaaaattcttcatttgatccagggcacattaatatccaatggtttgaagacggtaccttaaatttaagtactaactgcctagatcgccatttacaattacgcggtgatcaaactgcaatcatttgggaaggcgatgatccatcacagtcttatcatataacttatcgtcaacttcatcatgatgtttgcctattcgccaatgcattgaaaaaactaggcatcaaaaaaggtgatgttgttgctatttatatgtccatggtacctgaatctgctatcgctatgttagcatgcacacgcatcggtgctattcactctgttatctttgctggtttttcaccagaagccattgcaggacgcattattgacagtaaagctaaacttatcattacagcagatgaagggataagagcaaatcgtactataccattgaaaaaaaatgttgatgaagcgttaaaaaaccaggctgtcgaaacgattaataatgttattgtttttagacgaaccggtaatcaaatcgattggcaagaaaaacgtgatcattggtggcatgaaattattaaagggcttaacgctgattgtcctgcagaagaaatgaatgcagaagatcctttattcattctttatacgtcgggttcaacaggcaaaccaaaaggcgtcttacacaccactggtggttatttagtttatgtttctatcactttcaaatacgcatttgactaccaagcaaaagaaatttattggtgtactgctgacataggctgggtaacaggccatagttacttaatttatggtccactatctaatggcgccactaccttaatgtttgaaggtgtgcctaattatccaagtataaatcgcatgagccaaataattgataagcataaagtaaatattctatataccgcaccaacggcaattcgtgctttgatggccgaaggtgataaagctattgaaggaactcaacgtaattctttaagaattttaggctctgttggtgaacctattaacccggaagcttgggaatggtactacaaaaaaataggtaatagccattgccctattattgatacatggtggcaaactgaaaccggcggttttatgcttttacccttaccgggagcaactgaacttaaaccaggctcagccacgttaccgttttttggtattaagcccgagcttattgataatttaggtaatttacttgaaggtattgctgaaggcaatcttgttatcatggattcatggccaggacaagctagaacaatttatggtgaccatgaacgctttgaacaaacttatttttcactatttaaaggtatgtatttcagtggagacggtgctcgccgcgatgaagacggttattattggataaccggtcgtgttgacgacgttttaaatatttctggtcatcgtttaggtacagccgaaatcgaatctgcacttgtagccttccctaaaattgctgaggctgccgtcgttggtgtcccgcataatataaaaggtcaagctatttatgcctatattacattaaatcaaggagaagaaccttcaacagaactttataatgaggtacgcaattgggtgcgtaaagaaattgggccaatagccacaccagatattcttcattggactgatgcattaccaaaaactcgctcaggtaagattatgcgacgtattctaaggaaaattgctactggcgatataaataatctaggtgatacatcgactttagccgatcctagtgttgttgtagaattactagaagaaaagggctcaatcaatatttctagttaa

SEQ ID NO: 151797 - protein, 662 aa, Arsenophonus nasoniae (son-killer infecting Nasonia vitripennis)
MINTTEEKKNMISTFKYPIPTEIAAHTLVNKKQYLKDYQLSLKDPDAFWREKGQIVDWIKPYTKVKNSSFDPGHINIQWFEDGTLNLSTNCLDRHLQLRGDQTAIIWEGDDPSQSYHITYRQLHHDVCLFANALKKLGIKKGDVVAIYMSMVPESAIAMLACTRIGAIHSVIFAGFSPEAIAGRIIDSKAKLIITADEGIRANRTIPLKKNVDEALKNQAVETINNVIVFRRTGNQIDWQEKRDHWWHEIIKGLNADCPAEEMNAEDPLFILYTSGSTGKPKGVLHTTGGYLVYVSITFKYAFDYQAKEIYWCTADIGWVTGHSYLIYGPLSNGATTLMFEGVPNYPSINRMSQIIDKHKVNILYTAPTAIRALMAEGDKAIEGTQRNSLRILGSVGEPINPEAWEWYYKKIGNSHCPIIDTWWQTETGGFMLLPLPGATELKPGSATLPFFGIKPELIDNLGNLLEGIAEGNLVIMDSWPGQARTIYGDHERFEQTYFSLFKGMYFSGDGARRDEDGYYWITGRVDDVLNISGHRLGTAEIESALVAFPKIAEAAVVGVPHNIKGQAIYAYITLNQGEEPSTELYNEVRNWVRKEIGPIATPDILHWTDALPKTRSGKIMRRILRKIATGDINNLGDTSTLADPSVVVELLEEKGSINISS

SEQ ID NO: 151798 - DNA, 2004 bp, Arthroderma benhamiae (strain CBS 112371)
  CDS (1)..(2004)
atggcagaggtagacgccgctaaggccccggtggtcgtggaagcccaccaggtcgagaccgttggtgtacctgcggagtaccaccagcactccaccaaaacgcacttgaagagctttgaggaatacaagactctttatgaggagtctatcgcgagtccagataccttctgggcgcggctggcgcgggaattagtgacctttgacaaagacttcaacacgacgcacatcggctccttaaagggaggtgataatgcttggtttgttggtgggagactgaatgcttcttacaactgtgtcgaccgccatgcgctcaagaatccggataaggttgctatcatctacgaggccgatgaacctggcgaagggcgcagcatcacttacggcgagctgctcaagcaagtctcgagcttcgcatggactttgaagcagcagggggtgaagaagggtgatacggtggctatctatttgcctatgattccagaggctctggttgctttccttgcttgttctcgcattggtgctgtgcactctgtcgtctttgcgggcttctcgtccgactcgctgcgtgatcgtatcaatgacgccaactccaaggttgtcattacctctgacgagggcaagcgaggcggaaaactcattggaaccaagaagattgtcgacgaggctttgaagcagtgtcctggagtgactagctgcatcgtgttcaagaggactggagcagaggttccatggactcaaggacgcgatctctggtggcacgaggaggttgagaagtaccccagctacattgctcctgagtccatggattcggaagatcctctgttcctcttgtatacttcaggctcaaccggaaagcccaagggactgatgcacaccactgctggttacctggttggcgccgctgcaactggtaaatacgtctttgatatccacgaggaagaccgattcttctgcggtggcgacgttggttggattaccggacatacctatgttgtctatgctccactacttctcggtgcgaccacagtcgttttcgagagtactcctgcctatccgaacttctcgagatactgggacgtcattgaaaagaacaaggtcacgcagttctacgttgcaccaaccgcactcagacttctcaagcgtgccggtgaccagcatatccaccacgagatgaaggatctccgagtgttgggaagtgttggtgagccaatcgcagctgagatctggaaatggtactatgaagttgttggcaagaagaaggcccaagttgtcgacacatactggcaaaccgagactggctctcacgtcattactcccctgggtggaatcactcctaccaaaccgggaagtgcttctctgccattcttcggcattgagcctgccatcgtcgacccagttaccggtgaagaactgaagggtaacgatgtagagggtgtgttggcatttaaacagccgtggccaagcatggctcgcacagtatggggtgcccacaagcgatacatggacacctacttcaatgtctacccaggattctacttcactggagacggtgctggccgagaccatgacggatactactggatcagaggaagagttgacgacgttgtgaacgtctccggtcatcgtctttctactgccgaaatagaagctgctctcatcacacactcttccgttgccgaggctgccgtcgtcggtgtacacgatgagctcaccggccaggcagtcaacgccttcgttgccctcaagacaggcaacgaaatcggtgaggagatccgcaaggagttagtaatgcaggttcgaaaatctatcggaccctttgcggctcctaaggcggtctacgtcgttgaagacctgcccaagactcgcagcggaaagatcatgcgacgtattctcaggaagatcttgagcggcgaagccgacagcttgggtgatatctcgacgctttcggatccaaccgtggttcccaagattatcgagatgtatgaggcaacaaagaaaaaatga

SEQ ID NO: 151799 - protein, 667 aa, Arthroderma benhamiae (strain CBS 112371)
MAEVDAAKAPVVVEAHQVETVGVPAEYHQHSTKTHLKSFEEYKTLYEESIASPDTFWARLARELVTFDKDFNTTHIGSLKGGDNAWFVGGRLNASYNCVDRHALKNPDKVAIIYEADEPGEGRSITYGELLKQVSSFAWTLKQQGVKKGDTVAIYLPMIPEALVAFLACSRIGAVHSVVFAGFSSDSLRDRINDANSKVVITSDEGKRGGKLIGTKKIVDEALKQCPGVTSCIVFKRTGAEVPWTQGRDLWWHEEVEKYPSYIAPESMDSEDPLFLLYTSGSTGKPKGLMHTTAGYLVGAAATGKYVFDIHEEDRFFCGGDVGWITGHTYVVYAPLLLGATTVVFESTPAYPNFSRYWDVIEKNKVTQFYVAPTALRLLKRAGDQHIHHEMKDLRVLGSVGEPIAAEIWKWYYEVVGKKKAQVVDTYWQTETGSHVITPLGGITPTKPGSASLPFFGIEPAIVDPVTGEELKGNDVEGVLAFKQPWPSMARTVWGAHKRYMDTYFNVYPGFYFTGDGAGRDHDGYYWIRGRVDDVVNVSGHRLSTAEIEAALITHSSVAEAAVVGVHDELTGQAVNAFVALKTGNEIGEEIRKELVMQVRKSIGPFAAPKAVYVVEDLPKTRSGKIMRRILRKILSGEADSLGDISTLSDPTVVPKIIEMYEATKKK

SEQ ID NO: 151800 - DNA, 2034 bp, Trichophyton verrucosum (strain HKI 0517)
  CDS (1)..(2034)
atggcagaggtagacgctgctaaggccccggtggtcgtggaagcccaccaggtcgagaccgttggtgtgcctgcggagtaccaccagcactccaccaaaacgcacctgaagagctttgaggaatacaagactctttatgaggagtctatctcgagtccggataccttctgggcgcggctggcgcgggaattagtgacctttgataaagacttcaacacgacgcacatcggctccttaaagggaggtgataatgcttggtttgttggtggaaggctgaatgcttcttacaactgtgtcgaccgtcatgcgctcaagaatccggacaaggtttctatcatctacgaggccgatgaacctggcgaagggcgcagcatcacttacggcgagctgcttaagcaagtctcgagctttgcctggactttgaagcagcagggggtaaagaagggagatacggtggccatctatttgcctatgattccagaggctctggttgctttccttgcttgttctcgcattggtgctgtgcactctgtcgtctttgcaggcttctcgtccgactcgctgcgtgaccgtatcaatgacgccaactccaaggttgtcattacctctgacgagggcaagcgaggcggaaaactcatcggaaccaagaagattgtcgacgaggctttgaagcagtgtcctggagtgactagctgcatcgtgttcaagaggactggagcagaggttccatggactcaaggacgcgatctctggtggcacgaggaggttgagaagtatcctagctatattgctcctgagtccatggattcggaagaccctcttttcctcttgtacacttcaggctcaaccggcaagcccaagggattgatgcacaccactgctggttatctggttggcgccgccgcaactggtaaatacgtctttgacattcatgaggaagaccgattcttctgcggtggagacgttggttggattaccggacatacctatgttgtctacgctccactgcttctcggtgcgaccacagttgttttcgagagtactcctgcctatccgaacttctcgagatactgggatgtcattgaaaagaataaggtcacgcagttctacgttgcaccaaccgcactcagacttctcaagcgtgctggtgaccagcatatccaccatgatatgaaggacctccgagtattgggaagtgttggtgagccaattgcagctgagatctggaaatggtactatgaagttgttggcaagaaaaaggcccaagttgtcgacacatactggcaaaccgagactggctctcacgtcattactccccttggtggaatcactcctaccaaaccgggaagcgcctctctgccattcttcggcattgagcctgccatcgtcgacccagttaccggcgaagaactgaagggtaacgatgtagagggtgtattggcattcaagcaaccgtggccaagcatggctcgcacagtttggggtgcccacaagcgatacatggacacttatttcaatgtctacccaggattctatttcactggagacggcgccggccgagaccatgacggatactactggatcagaggaagagttgacgacgtcgtgaacgtctccggccatcgactttctaccgctgaaatagaagctgctctcatcacacactgtaaggctgccatttctgtggaggatggagcttccgttgccgaggctgccgtcgttggtgtacacgatgagctcaccggccaggcagtcaacgccttcgttgccctcaagacaggcaacgaaatcggcgaggagatccgcaaggagttagtaatgcaggttcgaaaatctatcggaccctttgcagctcctaaggcggtctatgtcgttgaagacctgcccaagactcgcagtggaaagatcatgcgacgtattctcaggaagatcttgagcggcgaagctgacagcttaggcgatatctcgactctttcggatccaacggtggttcccaagattatcgagatgtatgaggcaacaaagaagaaatga

SEQ ID NO: 151801 - protein, 677 aa, Trichophyton verrucosum (strain HKI 0517)
MAEVDAAKAPVVVEAHQVETVGVPAEYHQHSTKTHLKSFEEYKTLYEESISSPDTFWARLARELVTFDKDFNTTHIGSLKGGDNAWFVGGRLNASYNCVDRHALKNPDKVSIIYEADEPGEGRSITYGELLKQVSSFAWTLKQQGVKKGDTVAIYLPMIPEALVAFLACSRIGAVHSVVFAGFSSDSLRDRINDANSKVVITSDEGKRGGKLIGTKKIVDEALKQCPGVTSCIVFKRTGAEVPWTQGRDLWWHEEVEKYPSYIAPESMDSEDPLFLLYTSGSTGKPKGLMHTTAGYLVGAAATGKYVFDIHEEDRFFCGGDVGWITGHTYVVYAPLLLGATTVVFESTPAYPNFSRYWDVIEKNKVTQFYVAPTALRLLKRAGDQHIHHDMKDLRVLGSVGEPIAAEIWKWYYEVVGKKKAQVVDTYWQTETGSHVITPLGGITPTKPGSASLPFFGIEPAIVDPVTGEELKGNDVEGVLAFKQPWPSMARTVWGAHKRYMDTYFNVYPGFYFTGDGAGRDHDGYYWIRGRVDDVVNVSGHRLSTAEIEAALITHCKAAISVEDGASVAEAAVVGVHDELTGQAVNAFVALKTGNEIGEEIRKELVMQVRKSIGPFAAPKAVYVVEDLPKTRSGKIMRRILRKILSGEADSLGDISTLSDPTVVPKIIEMYEATKKK

SEQ ID NO: 151802 - DNA, 1932 bp, Roseomonas cervicalis ATCC 49957
  CDS (1)..(1932): transl_table=11
atgccggatgacgcgctgatcgcggtgaagcccgagctggcggagggcgcccgggtggatgccgcccgccaccgcagcatgaccgccgaggcgctgcgcgaccccgacgccttctggcgcgaggaggcgaagcgcatcgcctggatgaccccgccgaccaggatcaagaacaccagcttcgagggcgacgtctcgatcaagtggttcgaggacggcgtgctgaacgcctccgtctcctgcctcgaccgccacctggccgagcgcggcgagcagaccgccatcatctgggagggcgacgacccgaacagcgacgccaaggtcacctatcgcgacctgcatgagcgggtctgccgcctggccaacgccatgaaggcgctgggggtgaagaagggcgaccgcgtcagcctctacctgccgatgatcgtcgaggcggcggtggcgatgctggcctgcgcccgcatcggcgcggtgcattccatcgtcttcggcggcttcagcccggacagcctggccagccgcgtgcaggattgcgacagcgtgctgctgatcaccgccgatgagggccgccgcggcggccgcaaggtgccgctgaagaccaatgcggacgaggcgctgaagacctgcccgacggtgcggcacgtcatcgtcgtgaagaacaccggcggcgacgtgccgatgcaggaaggccgcgaccactggtaccacgagctcaccgaggccgccgcgcccgactgcgcgccggagccgatgaacgccgaggacccgctcttcatcctctacacctcgggctcgacgggcaagcccaagggcgtgctgcacaccaccggcggctacatggtctgggccagcttcacgcatgagctggtcttcgactaccgcccgggcgagatctattggtgcaccgccgatgtcggctgggtcaccggccacacctatatcgtctatggcccgctggcgaatggcgcgaccacgctgatgttcgagggcgtgccgaactggcccggcatcgaccgctgctggcaggtggtggacaagcaccaggtcaacatcttctacaccgcgccgaccgccatccgctcgctgatgcgggagggcgaggcgccggtgaagaaatggtcgcgccagtcgctgcgcgtgctcggcagcgtcggcgagccgatcaacccggaagcctggatgtggtactaccgcgtcgtcggcgatgagcgctgcccggtggtcgacacctggtggcagaccgagaccggcggcatcctgatctcgccgctgcccggcgccgtggcgcagaagcccggctccgccaccctgccgctgcccggcgtgcagccggcgctggtcgacaatgaggggcagatcctggagggcgcgaccgagggcaacctggtcatcctggattcctggccgggccagatgcgcaccgtctacaaggaccatgagcgtttcatccagacctatttctcgacgtttccgggcaagtacttttccggcgacggcgcccggcgggacgaggatggctattactggatcaccggccgggtcgatgacgtgctgaacgtctccggccaccgcatgggcacggcggagatcgagagcgccctcgtcgcccaccccaaggtggccgaggccgccgtggtcggcatgccgcatgagctgaagggccagggcatctactgctacgtcaccctcaagaccggcgaggagccgaccgacgcgctgaaaaaagaactggtggcctgggtgcgcaaggagatcggcccgatcgcctcgccggacgccatccagtgggcgcccggcctgcccaagacccgctcgggcaagatcatgcgccgcatcctgcgcaagatcgccgccaacgagaccgacagcctgggcgacacctcgaccctggccgaccccaccgtcgtccaggacctcatcaccaaccgcgtataa

SEQ ID NO: 151803 - protein, 643 aa, Roseomonas cervicalis ATCC 49957
MPDDALIAVKPELAEGARVDAARHRSMTAEALRDPDAFWREEAKRIAWMTPPTRIKNTSFEGDVSIKWFEDGVLNASVSCLDRHLAERGEQTAIIWEGDDPNSDAKVTYRDLHERVCRLANAMKALGVKKGDRVSLYLPMIVEAAVAMLACARIGAVHSIVFGGFSPDSLASRVQDCDSVLLITADEGRRGGRKVPLKTNADEALKTCPTVRHVIVVKNTGGDVPMQEGRDHWYHELTEAAAPDCAPEPMNAEDPLFILYTSGSTGKPKGVLHTTGGYMVWASFTHELVFDYRPGEIYWCTADVGWVTGHTYIVYGPLANGATTLMFEGVPNWPGIDRCWQVVDKHQVNIFYTAPTAIRSLMREGEAPVKKWSRQSLRVLGSVGEPINPEAWMWYYRVVGDERCPVVDTWWQTETGGILISPLPGAVAQKPGSATLPLPGVQPALVDNEGQILEGATEGNLVILDSWPGQMRTVYKDHERFIQTYFSTFPGKYFSGDGARRDEDGYYWITGRVDDVLNVSGHRMGTAEIESALVAHPKVAEAAVVGMPHELKGQGIYCYVTLKTGEEPTDALKKELVAWVRKEIGPIASPDAIQWAPGLPKTRSGKIMRRILRKIAANETDSLGDTSTLADPTVVQDLITNRV

SEQ ID NO: 151804 - DNA, 2082 bp, Arabidopsis thaliana
  CDS (1)..(2082)
  misc_feature (379)..(379): n is a, g, c or t
atgtcgtctaattccctgaggcatgtcgagtccatgtcccagctaccctcaggtgccggaaagatctctcaattaaacgccgtcgtgttaggagaatcccttgcatcggaggagaatgatctcgtctttcccagcaaggaattctccggccaggctcttgtttcctcccctcaacagtacatggaaatgcataagaggtcgatggatgaccctgctgctttttggtctgatattgcgtctgagttttactggaagcagaaatggggtgaccaagtgttttccgagaatctcgatgtcaggaagggtcctattagcatcgagtggtttaaagggggaatcaccaatatttgctacaactgtttggacaaaaacgttgaanctggtttgggcgataagacagccatacactgggaaggaaatgaacttggggtagatgcttccttaacttattctgagttgctccaacgagtttgccagcttgctaattacttgaaagataatggagtgaagaagggtgatgctgttgtaatttatttacctatgttgatggaacttcccatcgctatgcttgcatgtgcaaggatcggagctgttcattcggtcgtatttgctggattttctgcggactctcttgcccaaagaatcgttgattgcaagccaaatgtaatactgacttgcaatgctgttaaaagaggccctaagaccataaaccttaaagctattgttgatgctgcacttgaccaatcttctaaagatggagtctctgtaggcatatgcttgacctatgacaactcattagcgacaacaagggaaaacactaaatggcagaatggaagagatgtgtggtggcaggatgttatttctcaatatccaacatcgtgtgaggtggaatgggttgatgcagaagatcccctgtttttgctctacaccagtggaagtactgggaagccaaagggtgtcctacacacaactggagggtatatgatctacactgctacaacgttcaaatatgcatttgactacaaatcaacagatgtatactggtgtacagcagattgtggttggataactggccatagctatgttacttatggaccaatgcttaatggagccactgttgttgtccttgagggggctccaaactaccctgaccctggacgctgtcgggatattgttgacaaatacaaggtttcaatattttatactgccccaacattggtgaggtctctcatgcgcgatgacgataagtttgtaacacgtcactcgcgcaaatcgctgcgggtccttggaagtgttggtgagcccatcaatcctagtgcctggagatggttcttcaatgtagtcggtgattcaaggtgtcccatttcagatacgtggtggcaaactgaaactggtggcttcatgataaccccattgccaggtgcttggccccagaaacctggttcagccactttccctttctttggtgttcagcctgtcatagttgatgaaaagggcaatgaaatcgaaggcgagtgtagtggttatctttgtgtcaaaggttcatggcccggggcgtttcgaactctgtttggggatcatgaaagatacgaaaccacatactttaaaccttttgccggatattatttcagtggtgatggttgcagcagagacaaggatggttactactggcttacagggagggttgatgatgttatcaacgtcagtggccatcgaatcggaactgctgaagtagaatctgctctggttttacaccctcaatgtgcagaagcagctgttgtaggcatagaacatgaggtaaaaggtcagggaatttatgcgtttgtcactcttctggaaggtgttccttacagcgaggagcttcgtaaaagcctagtactaatggtccgaaatcagattggggcttttgcagcaccggacagaatacattgggcaccagggttgccaaagacgagaagcggaaagataatgaggagaatcttgagaaagattgcttcgaggcaattagaagaactcggagatactagcacactcgcggatcctagtgtagttgatcagcttattgcacttgccgatgtgtga

SEQ ID NO: 151805 - protein, 693 aa, Arabidopsis thaliana; identical to SEQ ID NO: 122115
  misc_feature (127)..(127): The Xaa at location 127 stands for Ala, Pro, Ser, or Thr.

SEQ ID NO: 151806 - DNA, 2235 bp, Ostreococcus tauri; identical to SEQ ID NO: 126807
  CDS (1)..(2235)

SEQ ID NO: 151807 - protein, 744 aa, Ostreococcus tauri; identical to SEQ ID NO: 126808

SEQ ID NO: 151808 - DNA, 2244 bp, Oryza sativa; identical to SEQ ID NO: 122116
  CDS (1)..(2244)

SEQ ID NO: 151809 - protein, 747 aa, Oryza sativa; identical to SEQ ID NO: 122117

SEQ ID NO: 151810 - DNA, 1845 bp, Phanerochaete chrysosporium
  CDS (1)..(1845)
atgcaccagcagacggtgggccatgagtccgacaagtggtgggccaagatggcgcgcgataccctgcacagggatcgccccttccacaccgttcgcgcaggcggcttcgagacaggcgacatcgtttggttcccagaaggcggcctgaacgcatcgttcaactgcgttgacagatgggcgttcaagcaccctgataagacggccatcatctacgaggccgacgagccgaacgagggctgcgagatcacgtatgcgcagctgccgcgaggtctgcagagagtcgcgaacgtgctcaagtcgctcggcgtcaagaagggcgacaccgtgtcggcgtacctgcccatgacatggcaggccgtcgccgcgttcctcgcatgcgcgcgcatcggcgtgcactctgtcgtcttcgcgggcttctctgccgagtccctgcgcgaccgtatgaacgactgcaagtcccgcgtgctcatcaccctcgacgaggcgcgcggcggcaagacgatcgcgaccaaggtcatcgccgacgccgcgatcaagcagtgccccggcgtcgagcacgtccttgtcctccgccgcaccggcaacgaggtgccctggaccgagggtcgcgacaagtggtggcacgaggagaccgccaaggtccccaactactgcccgccggaggtcatgtctgcagaggacccgctgttcatcctgtatacgtctggctcgactggcaagcccaagggtgtcgtccataccaccggtggatactcctttggcgctgcgctcaccgtcaagtacgtcttcgacgtgcaccccgacgacaagtttgcctgcatggctgacattggttggatcaccggccacacttacatcgtgtatggcccgctgtgcaacggtgtgtcgacgcctgtatacccgacgccctcgcgctactggcagaccgtcgagaagcacaagctcacgcagttttactctgcacccaccgcgatccggctgctccgccgcctcacggggacccacgtccaggaccacgacctcagctcgctccgcgtcctcggctctgtcggtgaaccgattaacccggaggcgtggcactggtacaacgaccacgtcggcaagccccagtgcgccatcgtcgacacgttctggcagaccgagaccggctcgatcgtcgtcactcccttccccggtgcgattgagaccaagcccggctccgcgaccgtcccgttctttggcattgagcctgccatccttgaccccgtctcaggcgaggagctcaagggtgataacgtcgagggtgtcctcgtcctcaagaccccatggccatcaatggcccgcacggtctaccaggaccacaaccggtacctggagacatacatgaagccctaccctggctacttctacactggtgacggccacgggcgcgacgagcacggctacatctggatcaagggccgtgttgatgacgttatcaacgtctccggcgacctgtcgacggcggagatcgagtcgtcgctcatccttcacaaggcggtcgcggagacggcggtcgtgggcacggcggacgagctcacgggccaggcggtgtcgttcgtgacgctcaagcccgagttcaagtgcaccccgcgggaggccgggctcgtgaaggagctcgtgctgcaggtgcgcaaggtcatcgggccgttcgcgccgaagaagatcttcatcgtgcccgacctgcccaagacgcgctcgggcaagatcatgcgtcgcatcatgcgcaagatcgtcgccggcgagggcgacagccttggcgacctcagcacgctcgccgagcccggcgtcgtcgacgtcatcaagactaaggtcgcgtcgtcctga

SEQ ID NO: 151811 - protein, 614 aa, Phanerochaete chrysosporium
MHQQTVGHESDKWWAKMARDTLHRDRPFHTVRAGGFETGDIVWFPEGGLNASFNCVDRWAFKHPDKTAIIYEADEPNEGCEITYAQLPRGLQRVANVLKSLGVKKGDTVSAYLPMTWQAVAAFLACARIGVHSVVFAGFSAESLRDRMNDCKSRVLITLDEARGGKTIATKVIADAAIKQCPGVEHVLVLRRTGNEVPWTEGRDKWWHEETAKVPNYCPPEVMSAEDPLFILYTSGSTGKPKGVVHTTGGYSFGAALTVKYVFDVHPDDKFACMADIGWITGHTYIVYGPLCNGVSTPVYPTPSRYWQTVEKHKLTQFYSAPTAIRLLRRLTGTHVQDHDLSSLRVLGSVGEPINPEAWHWYNDHVGKPQCAIVDTFWQTETGSIVVTPFPGAIETKPGSATVPFFGIEPAILDPVSGEELKGDNVEGVLVLKTPWPSMARTVYQDHNRYLETYMKPYPGYFYTGDGHGRDEHGYIWIKGRVDDVINVSGDLSTAEIESSLILHKAVAETAVVGTADELTGQAVSFVTLKPEFKCTPREAGLVKELVLQVRKVIGPFAPKKIFIVPDLPKTRSGKIMRRIMRKIVAGEGDSLGDLSTLAEPGVVDVIKTKVASS

SEQ ID NO: 151812 - DNA, 1956 bp, Nocardia farcinica
  CDS (1)..(1956): transl_table=11
ttgaccagcaccaccgaccacgacatccccaccctcgacagttacccgccgtcgccggagtttgttgccggggccaatgctgatgggtcgttgtatgagcgggcgcaggctgatcggttggggttctgggccgagcaggcccgccgcttgtactggcacacccccttcaccgaggtgctggactggtcccaggcgccggtggcgcgctggttcgccgacggccgactcaacgtcgcctacaactgcctggaccgccacgtcctcgacggccacggcgaccaaccggccatcctgtgggaaggcgaacccggcgacacccgcaccctgacctacgcccaactactcaccgaggtctccaaaaccgccaactacctcaccgaactgggcctgaacaccggcgaccgcgtcgcgatctacctgccgatgatccccgaagccatcatcgccatgctcgcctgcgcccgcctgggcctgccccactcggtcgtcttcgccggcttctcccccgccgccctgcgccaacgcgtcgacgacgccgccgcccgcctgatcatcaccagcgacggccaataccgccgcggcacccccaccccgctcaaaaccgccgtcgacgaagccctcaccgaacccggccacaccgtcgaacacgtcctgatcgtcaaccgctgcaacctcgacatccccctcacccccggccgcgacctgtggtggcacgacaccatcgcccacgcccccacccaacacaccgcccaacccctacccgccgaacaccccctgttcatcctctacacctccggcaccaccggaaaacccaaaggcatcctgcacaccagcggcggctacctcacccaagccgcctacacccaccactacgtcttcgaccacaaacccggccacgacatctactggtgcaccgccgacatcggctgggtcaccggccactcctacatcgtctacggccccctggccaaccgcgccacccaaatcctctacgaaggcacccccaacacccccgacgaacaccgccacttccacatcatcgaaaaatacggcgtcaccatctactacaccgcccccaccctcatccgcaccttcatgaaatggggccgccacatccccgacgcccacaacctgaccagcctgcgcctactcggctcggtcggcgaacccatcaaccccgaagcctggcgctggtaccgccacgtcatcggccgcgacaccacccccatcgtcgacacctggtggcaaaccgaaaccggcgccatcatgatctcccccctccccggcatcacccacaccaaacccggcgccgccatgacccccctacccggcatcagcgcccaagtcgtcgacgacgacgccaaccccgtcaccccaggcgaaaccgaagccaacggctacctcgtcctcgaccaaccctggcccgccatgctccgcggcatctggggcgaccccgaccgctaccgcgacacctactggaaccgctaccacacccacggctggtacttcgccggcgacggcgccaaaatcgacaccgacggcgccctctgggtcctcggccgcgtcgacgacgtcatgaacgtctccggccaccgcatctccaccgccgaagtcgaatccgccctcgtcgcccaccccgccgtcgccgaagccgccgtcgtcggcgccaccgaccccaccaccggccaaggcatcgtcgccttcgtcatcaccaacaccaccaccaacccccacaccacccccgaccaactcatcaccgacctcaaaacccaagtcgcccacgaaatcagccccatcgcccgcccccgcgacatccacatcgtccccgaactccccaaaacccgcagcggcaaaatcatgcgccgactcctccgcgacatcgccgaaggccgccccctcggcgacaccagcaccctcgtcgaccccaccgtcttcgaagcgatcgccaagcgctga

SEQ ID NO: 151813 - protein, 651 aa, Nocardia farcinica
MTSTTDHDIPTLDSYPPSPEFVAGANADGSLYERAQADRLGFWAEQARRLYWHTPFTEVLDWSQAPVARWFADGRLNVAYNCLDRHVLDGHGDQPAILWEGEPGDTRTLTYAQLLTEVSKTANYLTELGLNTGDRVAIYLPMIPEAIIAMLACARLGLPHSVVFAGFSPAALRQRVDDAAARLIITSDGQYRRGTPTPLKTAVDEALTEPGHTVEHVLIVNRCNLDIPLTPGRDLWWHDTIAHAPTQHTAQPLPAEHPLFILYTSGTTGKPKGILHTSGGYLTQAAYTHHYVFDHKPGHDIYWCTADIGWVTGHSYIVYGPLANRATQILYEGTPNTPDEHRHFHIIEKYGVTIYYTAPTLIRTFMKWGRHIPDAHNLTSLRLLGSVGEPINPEAWRWYRHVIGRDTTPIVDTWWQTETGAIMISPLPGITHTKPGAAMTPLPGISAQVVDDDANPVTPGETEANGYLVLDQPWPAMLRGIWGDPDRYRDTYWNRYHTHGWYFAGDGAKIDTDGALWVLGRVDDVMNVSGHRISTAEVESALVAHPAVAEAAVVGATDPTTGQGIVAFVITNTTTNPHTTPDQLITDLKTQVAHEISPIARPRDIHIVPELPKTRSGKIMRRLLRDIAEGRPLGDTSTLVDPTVFEAIAKR

SEQ ID NO: 151814 - DNA, 2001 bp, Nocardia farcinica
  CDS (1)..(2001): transl_table=11
ttgaacgcgaagcacgagtaccgaccggtctatcagaccagcttggtcgaccccgccgagttctggaccaccgcggccgaggccatcgactgggacgtcccgcccacccagatcgtcgatcccgcggccaagcccgcggcccgctggttccccgacgcccagctcaacacctcggtcaacgccctcgaccgtcacctccccgagcgcgccgatcaacccgccctgatctacgactccgccatgaccggcgccaagggcgtctacacctatgcccagctgctcgacgaggtcgccaccttcgcgggcgccatgcagcggctcggggtggcacgcggcgaccgggtggtgatctacctgccgatgatccccgaggcggtgatcgccatgctggcctgcgcccgcatcggcgcggtgcattcggtggtgttcggcggcttcgccgcgcccgagctcgcggcccgcatcgacgacgccgaaccggtgctgatcgtcaccgccgcgggcggcctggaacccaaccgcaagatcgagtacccgccgatcgtggcgcgcgcgctcgggctcgcgcagaccgccgcgccgcgccacgtcatcgtcaagcagcgcccggtccacttctcccccgacttcccgcccgccgagaccgcggcgcagtggctggactgggacgacgccgtgcgcgacgcgccgaaggccgagccggtgccggtggcggcgaccgatccgctctacatcctctacacctccggcaccaccgggaagccgaagggcgtggtccgcgacaacggcgggcacgcggtggcgctggcctggtcgatgcgcaacatctacgacgtgggcccgggccaggtgatgtgggccgcctccgacgtcggctgggtcgtcgggcactcctacatcgtctacgcgccactgctggtcggcgcgaccacgctgctctacgagggcaagccggtgggcaccccggacgcgggcgcgttctggcggatcgtcgccgagtaccgggtgcgggtgctgttcaccgcgccgaccgcgctgcgcgccatccgcaaggccgacggcgaggccaagctggcccgcaaccacgacctgtcctcgctgcgcgcgctgttctgcgcgggcgaacgcctcgacccggccacctacgagtgggcgcgcggcacgctgctggccgagcggccggactgccccgtggtggaccactggtggcagaccgagaccggctggccgatctgcgcgaatctgctcgggttgcaggaactgccggtcaagccggggtccgcgtcggtgccggtgccgggctaccgcctgcgcgtcctcgacgccgagggcaatccggtgcccgcgggcaccgagggcaacatcgtcatcggactgccgatgccaccgggcaccctcaccgggctctggcacgacgacacccggttcgcccgctcctacatgtcggccttccctgggcactacgccaccggtgactccggctatttcgacgaggacggctacctgttcgtgctcggccgcagtgacgacgtgatcaacatggccgggcaccggctctcggcgggcagcatcgaggccgcgatctccgggcacgcggcggtggccgaatgcgcggtgatcggcctgcccgacgagctgaaggggcagaagcccatcgcctacgtggtgctcaaggaaggtgtggaggtcgatccggccaccctgcgcgacgagttgatcgcgcgggtgcgcgatcaggtcggcgcgatcgccgccctgcacgacgcggtgatcgtggccgggctgcccaagacccgctcgggcaagatcctgcgcaagacgatccggcagatcagcgcgggcgagcaggtggaggtgccctcgaccatcgaggacccggcggtgctcgcggcgctggaggaccagatcctcaccaccagggccgatgccgccgaggcggcgggcgaggcgcccgacaccgacggcgcgctcggcgcgtccgacccggcggcccggccctga

SEQ ID NO: 151815 - protein, 666 aa, Nocardia farcinica
MNAKHEYRPVYQTSLVDPAEFWTTAAEAIDWDVPPTQIVDPAAKPAARWFPDAQLNTSVNALDRHLPERADQPALIYDSAMTGAKGVYTYAQLLDEVATFAGAMQRLGVARGDRVVIYLPMIPEAVIAMLACARIGAVHSVVFGGFAAPELAARIDDAEPVLIVTAAGGLEPNRKIEYPPIVARALGLAQTAAPRHVIVKQRPVHFSPDFPPAETAAQWLDWDDAVRDAPKAEPVPVAATDPLYILYTSGTTGKPKGVVRDNGGHAVALAWSMRNIYDVGPGQVMWAASDVGWVVGHSYIVYAPLLVGATTLLYEGKPVGTPDAGAFWRIVAEYRVRVLFTAPTALRAIRKADGEAKLARNHDLSSLRALFCAGERLDPATYEWARGTLLAERPDCPVVDHWWQTETGWPICANLLGLQELPVKPGSASVPVPGYRLRVLDAEGNPVPAGTEGNIVIGLPMPPGTLTGLWHDDTRFARSYMSAFPGHYATGDSGYFDEDGYLFVLGRSDDVINMAGHRLSAGSIEAAISGHAAVAECAVIGLPDELKGQKPIAYVVLKEGVEVDPATLRDELIARVRDQVGAIAALHDAVIVAGLPKTRSGKILRKTIRQISAGEQVEVPSTIEDPAVLAALEDQILTTRADAAEAAGEAPDTDGALGASDPAARP

SEQ ID NO: 151816 - DNA, 1953 bp, Nocardia farcinica
  CDS (1)..(1953): transl_table=11
atgaccgaaaccaccgctgatcatcgagagtcgtacccgccgtcgccggagtttgttgccggggccaatgctgatgggtcgttgtatgagcgggcgcaggctgatcggttggggttctgggccgagcaggcccgccgcttgtactggcacacccccttcaccgaggtgctggactggtcccaggcgccggtggcgcgctggttcgccgacggccgactcaacgtcgcctacaactgcctggaccgccacgtcctcgacggccacggcgaccaaccggccatcctgtgggaaggcgaacccggcgacacccgcaccctgacctacgcccaactgctcaccgaggtctccaaaaccgccaactacctcaccgaactgggcctgaacaccggcgaccgcgtcgcgatctacctgccgatgatccccgaagccatcatcgccatgctcgcctgcgcccgcctgggcctgccccactcggtcgtcttcgccggcttctcccccgccgccctgcgccaacgcgtcgacgacgccgccgcccgcctgatcatcaccagcgacggccaataccgccgcggcacccccaccccgctcaaaaccgccgtcgacgaagccctcaccgaacccggccacaccgtcgaacacgtcctgatcgtcaaccgctgcaacctcgacatccccctcacccccggccgcgacctgtggtggcacgacaccatcgcccacgcccccacccaacacaccgcccaacccctacccgccgaacaccccctgttcatcctctacacctccggcaccaccggaaaacccaaaggcatcctgcacaccagcggcggctacctcacccaagccgcctacacccaccactacgtcttcgaccacaaacccggccacgacatctactggtgcaccgccgacatcggctgggtcaccggccactcctacatcgtctacggccccctggccaaccgcgccacccaaatcctctacgaaggcacccccaacacccccgacgaacaccgccacttccacatcatcgaaaaatacggcgtcaccatctactacaccgcccccaccctcatccgcaccttcatgaaatggggccgccacatccccgacgcccacaacctgaccagcctgcgcctactcggctcggtcggcgaacccatcaaccccgaagcctggcgctggtaccgccacgtcatcggccgcgacaccacccccatcgtcgacacctggtggcaaaccgaaaccggcgccatcatgatctcccccctccccggcatcacccacaccaaacccggcgccgccatgacccccctacccggcatcagcgcccaagtcgtcgacgacgacgccaaccccgtcaccccaggcgaaaccgaagccaacggctacctcgtcctcgaccaaccctggcccgccatgctccgcggcatctggggcgaccccgaccgctaccgcgacacctactggaaccgctaccacacccacggctggtacttcgccggcgacggcgccaaaatcgacaccgacggcgccctctgggtcctcggccgcgtcgacgacgtcatgaacgtctccggccaccgcatctccaccgccgaagtcgaatccgccctcgtcgcccaccccgccgtcgccgaagccgccgtcgtcggcgccaccgaccccaccaccggccaaggcatcgtcgccttcgtcatcaccaacaccaccaccaacccccacaccacccccgaccaactcatcaccgacctcaaaacccaagtcgcccaagaaatcagccccatcgcccgcccccgcgacatccacatcgtccccgaactccccaaaacccgcagcggcaaaatcatgcgccgactcctccgcgacatcgccgaaggccgccccctcggcgacaccagcaccctcgtcgaccccaccgtcttcgaagcgatccgcgccgagaaggcataa

SEQ ID NO: 151817 - protein, 650 aa, Nocardia farcinica
MTETTADHRESYPPSPEFVAGANADGSLYERAQADRLGFWAEQARRLYWHTPFTEVLDWSQAPVARWFADGRLNVAYNCLDRHVLDGHGDQPAILWEGEPGDTRTLTYAQLLTEVSKTANYLTELGLNTGDRVAIYLPMIPEAIIAMLACARLGLPHSVVFAGFSPAALRQRVDDAAARLIITSDGQYRRGTPTPLKTAVDEALTEPGHTVEHVLIVNRCNLDIPLTPGRDLWWHDTIAHAPTQHTAQPLPAEHPLFILYTSGTTGKPKGILHTSGGYLTQAAYTHHYVFDHKPGHDIYWCTADIGWVTGHSYIVYGPLANRATQILYEGTPNTPDEHRHFHIIEKYGVTIYYTAPTLIRTFMKWGRHIPDAHNLTSLRLLGSVGEPINPEAWRWYRHVIGRDTTPIVDTWWQTETGAIMISPLPGITHTKPGAAMTPLPGISAQVVDDDANPVTPGETEANGYLVLDQPWPAMLRGIWGDPDRYRDTYWNRYHTHGWYFAGDGAKIDTDGALWVLGRVDDVMNVSGHRISTAEVESALVAHPAVAEAAVVGATDPTTGQGIVAFVITNTTTNPHTTPDQLITDLKTQVAQEISPIARPRDIHIVPELPKTRSGKIMRRLLRDIAEGRPLGDTSTLVDPTVFEAIRAEKA

SEQ ID NO: 151818 - DNA, 1962 bp, Pseudomonas putida; identical to SEQ ID NO: 122122
  CDS (1)..(1962): transl_table=11

SEQ ID NO: 151819 - protein, 653 aa, Pseudomonas putida; identical to SEQ ID NO: 122123

SEQ ID NO: 151820 - DNA, 1938 bp, uncultured marine bacterium 311; identical to SEQ ID NO: 126829
  CDS (1)..(1938): transl_table=11

SEQ ID NO: 151821 - protein, 645 aa, uncultured marine bacterium 311; identical to SEQ ID NO: 126830

SEQ ID NO: 151822 - DNA, 1899 bp, Oryza sativa subsp. japonica; identical to SEQ ID NO: 122124
  CDS (1)..(1899)

SEQ ID NO: 151823 - protein, 632 aa, Oryza sativa subsp. japonica; identical to SEQ ID NO: 122125

SEQ ID NO: 151824 - DNA, 1896 bp, Solanum tuberosum
  CDS (1)..(1896)
atgtatcaaaggtcggtccacgatccctcaggattctggtctgacattgcatcagaattttactggagagagaaatggggccagcaggtttaccatgagaattttgatgttcgaaaggggaaaatcaagatcgagtggttcaagggtggaatgacaaatatctgctacaactgcttggatagaaacatcgagtctggaaagggtgacaaaacagcaatttactgggaaggaaatgaacctggtcttgatagttctatgacgtacaatcaactcttggctagagtttgccagctagcaaattatttgaaagatgttggagtccacaagggtgatgcagttgtcatctacttacccatgcttatggagctaccaattgcaatgcttgcttgtgctcgtattggtgccattcactcggttgtgtttgctggtttctcagctgaatctcttgctcaaaggatcatagattgcagaccgaaggttgtcataacatgcaatgctgttaggagggggtccaagattatttatctcaaagaaattgttgatagtgcccttctagaatctgctcagaagggcatcgttacagatgtgtgtttgacatatgaaaatgattcagcaatgaaaaaggaaatgactaaatggaccaaggggagagacatttggtggcaggatgttattctgaaatatccagtaacatgtgatgtggagtgggttgatgcagaagatccccttttcctgctttacactagtgggagtaccggaaagcctaagggtgtcttgcatacaacgggaggatatatggtgtacactgctactacattcaagtatgcatttgactacaagccgacagacatatattggtgtacagctgactgtggttggattactgggcatagttatgtaacctatggacctttgctaaatggagcaactgttgtggtttttgaaggggccccaaattatcccgatgtcgggcgttgttgggatattgttgataagtataaggtttcaatattttatacagctccaacactggtgagatctctgatgcgtgagggagacgagcatgtctctcgatattcacgcaaatctttacgggtgcttggaagtgtgggtgagcctatcaatccaagtgcatggaggtggtttttcaatgtgataggtgatgcaaggtgccccatatctgatacatggtggcaaacagaaaccggtggcttcatgattactcctttaccaggagcgtggccgcagaaacctggttctgctacttttcctttctttggagtccagccagtaatagtggatgagaaaggtgttgagattgaaggtgagtgcagtgggtatctgtgcgtgaaaagctcgtggcctggggcattccgaacacttcatggggatcatgagagatatgaaaccacatattttagtgccttcccgggctattatttcagtggtgatggctgcagcagggacaaagatggttactactggctcaccggaagagtagatgatgtgattaatgtgagtggacatcgtattggcacagctgaagtggaatctgctctagtttcacatcctcagtgtgctgaagcagctgtggttggtgtggagcatgaggttaaaggacaggggatatatgcatttgttactctagtcgaaggtgttccatacagcgatgacctgcgaaaaagtcttgtgatggttgttaggaatcagattggggcttttgcagcgccagacaagatacattgggcaccaggtcttccaaagacgagaagtgggaaaataatgagaagaattctgaggaaaatcgcttccaggcagttagatgagcttggggacactagtacccttgcagacccaactgtggttgatcagcttattgcacttgctgattgctaa

SEQ ID NO: 151825 - protein, 631 aa, Solanum tuberosum; identical to SEQ ID NO: 122129

SEQ ID NO: 151826 - DNA, 2028 bp, Candida albicans; identical to SEQ ID NO: 28600
  CDS (1)..(2028): transl_table=12

SEQ ID NO: 151827 - protein, 675 aa, Candida albicans [sequence omitted]

SEQ ID NO: 151828 - DNA, 2028 bp, Zygosaccharomyces bailii; identical to SEQ ID NO: 28612
  CDS (1)..(2028)

SEQ ID NO: 151829 - protein, 675 aa, Zygosaccharomyces bailii; identical to SEQ ID NO: 28613

SEQ ID NO: 151830 - DNA, 1947 bp, Bradyrhizobium japonicum; identical to SEQ ID NO: 122164
  CDS (1)..(1947): transl_table=11

SEQ ID NO: 151831 - protein, 648 aa, Bradyrhizobium japonicum [sequence omitted]

SEQ ID NO: 151832 - DNA, 1986 bp, Coprinopsis cinerea; identical to SEQ ID NO: 28614
  CDS (1)..(1986)

SEQ ID NO: 151833 - protein, 661 aa, Coprinopsis cinerea [sequence omitted]

SEQ ID NO: 151834 - DNA, 2013 bp, Drosophila melanogaster; identical to SEQ ID NO: 122174
  CDS (1)..(2013)

SEQ ID NO: 151835 - protein, 670 aa, Drosophila melanogaster [sequence omitted]

SEQ ID NO: 151836 - DNA, 2019 bp, Phycomyces blakesleeanus; identical to SEQ ID NO: 28620
  CDS (1)..(2019)

SEQ ID NO: 151837 - protein, 672 aa, Phycomyces blakesleeanus [sequence omitted]

SEQ ID NO: 151838 - DNA, 1926 bp, Gamma-proteobacterium EBAC31A08
  CDS (1)..(1926)
atgcctcgaaagctttatagcccaaaacattcaagtaatccttatataaaagactttgatgaatacaaagaactttacaagcaatccatagaagatccttctaaattttttaaaaatctagcaaacgaaaacataagctggatggaagacttcaaaacaacattcaataatcaatttaataatgcgaagtggtttgagggtggtaaaacaaatattagcttaaactgcatcgataggcatttagaaaatgatccaaacaaaatagcattaatatgggaaggagatgaccctgctgattctaaagaattgacctacaaagagctccatgacgaagtatgtaagttcgctaatgttttaaaagacctgggtgttcaaaagggctcgagagtttgtatttatatgcctatgatcattgagactgcgttcgcaatgcttgcttgcacgcgaataggtgccgtgcactctgttgtctttggtggcttttctccagaatcactcaaagatagaattcttgatgctgattgtaaaattgttataactgctgatgaaggtttaaggggcggcaaaaaagtgccacttaaatctaatgtagatgaggctcttctgggctgtccagatgttaaaaatacactggttataaaaagaactggtggcgaaattaattgggatgataaaaaagatgtttggtatgaagatcttgttaaagatgtttctaataagtgtgctccagagcctatggattccgaagaccctcttttcattctctatacatcaggctctacaggcaagccaaagggtgttctacatactactgcaggttatctattaggcgctcatattagtttcaaatatctttttggaataaggccagaggacaaatactggtgtactgcagatgtgggatggataacaggacatacttatatcttgtacggacctctttcaaatggagcaacaacacttatgtttgaaggagtgccaacctacccttcagcatcaaggtgttgggagatatgcgataagcatgacattagtattttttatacagctccaactgccattagagctctgatggcccaaggcgatgatcctgttaaaaagacaaaaagagatagcctaagaattttaggtacagttggagagccaattaatccagaggcgtgggattggtactacagtgttgtcggtaaatctaattgcgaggttattgatacttggtggcaaaccgaaactggttctgtacttatctctccaatagcgggtattactccaacaaaacctgggtcagcaactctgcccttcttcggagttaagccatctctctatgacgagcatggaaatacgctagaaggctctaatgcaggtaatttagttattgagcaatcttggcctagtcaaattagaagtatttatggtgatcaccaaagaatgatcgacacctattttggtatgtataaagatatttactttactggtgatggagccaggcgagacgaggatggatacttctggataaccggaagagttgatgatgttcttaatgtttctggccacagactaggtacagctgaaattgaaagtgctcttgtgctccaccctaaaattgctgaagcagctgttgttggttttgatcatccaattaaggggcaaggaatatatgcttttgttactttaatgataaatgaatcatttgatgacaactttagttatgaattgaaacaatttgttgctaaagaaattggagctattgcaaaaccagatttaattcaaaatgctccaggcttgcctaaaacaagatcgggaaaaattatgcgcagaattcttagaaagattgctgagaatgatctatctaatttaggagacacgacaacccttgccgatccttcggttgttgagtctcttatagaaaacaaacaaagtttatga

SEQ ID NO: 151839 - protein, 641 aa, Gamma-proteobacterium EBAC31A08 [sequence omitted]

SEQ ID NO: 151840 - DNA, 1959 bp, Streptomyces avermitilis
  CDS (1)..(1959): transl_table=11
atgagcaacgaaagcctggccaacctgctgaaggaagagcgcaggttcgcgccgcccgccgacctggcggcgaacgccaatgtcaccgcggaggcgtatgagcaggccaaggctgacaggctcggcttctgggccgagcaggcccgccggctgacctgggccaccgagccgaccgaaacgctggactggtcgaacccgccgttcgccaagtggttcaaggacggcaagctcaatgtcgcgtacaactgcgtcgaccgccacgtcgaggcgggccacggcgaccgcgtcgcgatccacttcgagggcgaacccggcgacagccgtgccatcacctacgccgagctcaaggacgaggtctccaaggccgccaacgccctgaccgagctgggagttcagaagggcgaccgggtcgccgtctacctcccgatgatccccgaggcggtcgtcgcgatgctcgcgtgcgcccgcatcggcgccgcgcactccgtcgtcttcggcggattctcggccgacgcgatcgcggcccgtatcaaggacgccgacgccaagctggtcatcaccgccgacggtggctaccggcgcggcaagccctccgcgctcaagcccgccgtcgacgacgccgtcagccgcggggacggggtcgagaaggtgctcgtcgtgcggcgtacgggccaggaagtcgcctggaccgagggccgcgacgtctggtggcacgagatcacggccaagcagtccgccgaacacacgcccgaggccttcgacgccgagcaccccctgttcatcctctacacgtccgggaccacgggtaagccgaagggcatcctgcacacctccggcggctacctcacccagacgtcgtacacccaccacgccgtcttcgacctcaagccggagaccgacgtctactggtgcacggccgacatcggctgggtgaccggccactcgtacatcacgtacgggccgctctcgaacggcgcgacgcaggtcatgtacgagggcacgcccgacaccccgcaccagggccgcttctgggagatcgtccagaagtacggcgtcaccatcctctacaccgcgcccaccgcgatccgtacgttcatgaagtggggcgacgacatccccgcgaagttcgatctgtcctccctccgggttctggggtccgtcggcgagcccatcaaccccgaggcgtggatctggtatcgcaagcacatcggcggcgaccgcacgccgatcgtggacacctggtggcagaccgagaccggcgcgatgatgatctcgccgctgccgggcgtcaccgagaccaagccgggctccgcccagcgcccgctgccgggcatctcggcgacggtggtggacgacgaggcccgggaagtacccaacgggggcggtggctatctcgtcctcaccgaaccgtggccgtcgatgctgcgcaccatctggggcgacgaccagcggttcctcgacacgtactggtcgcgcttcgagggcaagtacttcgccggtgacggcgcgaagaaggacgaggacggcgacatctggctgctcggccgcgtcgacgacgtcatgctcgtgtccgggcacaacatctcgacgaccgaggtcgagtcggcgctcgtctcccacccgtcggtcgccgaggcggccgtggtcggtgccgccgacgagacgaccgggcaggccatcgtcgccttcgtgatcctgcgcgggacggcgaacgccgaggacgacaacctggtcgccgacctgcgcaaccacgtcggcaccacgctcggcccgatcgccaagcccaagcggatcctcccggtggccgagctgccgaagacccgctccggcaagatcatgcggcgcctgctgcgcgacgtcgccgagaaccgggccctcggagacgtcaccaccctgaccgattcctcggtgatggatctgatccagtccaagctcccggcggcgccgagcgaggactga

SEQ ID NO: 151841 - protein, 652 aa, Streptomyces avermitilis [sequence omitted]

SEQ ID NO: 151842 - DNA, 2259 bp, Glycine max
  CDS (1)..(2259)
atgattcctctgtcccataacccagtctctgttcacctgggtggaacaccctgtgactctcttcacccaattacgttccatccaattctgaataagcctcgttcttctgcctctctgttttggaactgcaaaaggagaaggaagaggaaaagctccattactatggcttctaatctcagaaccaacaatttcctgcgccatgtggaatcaatgaagcttcttccatcaggtgcgggtcacatttcacacttgaatgctgtgatacttggtgaatctctcgccactgaagaggatgatttcgttcttccaagtgaggactttgctagccaagccaatgttcagtccccagaacagtatctgaagatgtataatagatccattgaggatcctgctggattctggtctgagattgcctcagagttctattggaaacagagatggggtgataaagtgtgtgatgaaaattttgatgtgaggaaagggaatataaagattgagtggttcaagggtggcatcaccaacatctgttataattgcttggatagaaatgttgaagctggacttggtgacaaggttgccatttactgggaaggcaatgagcctggtttggatggtactttgacatacactgaacttctacaacaagtttgccagcttgcaaactaccttaaagatattggtgtgaagaagggagatgccgtaattatttatttgcccatgcttatggagcttcccatcgcaatgcttgcttgcgcccggattggtgctgttcattcggttgtatttgctggtttttctgcagaagctctttcccagagaatcattgattgtaaaccaaaagttgttattacttgcaatgctgttaaaaggggccctaagcctatctatctaaaagatattgttgatgctgcaatcaatgattcagcccaaaatggggtctctatagataaatgcctagtttatgaaaacccattggcaatgaagagggtagataccaaatggaaggaagggcgtgatatatggtggcaggatgtcattcctcaatatccaactacttgtccgttggagtgggttgatgcagaggatccactttttctactctatacaagtgggagcacaggaaaacctaagggtgtcctccatacaactggtggttacatggtgtacactgcaacaacatttaagtatgcatttgactacaagccgtctgacatctactggtgtacagctgattgtggttggattactgggcacagctatgtcacttatggacccatgctcaatggtgcatctgttattgtgtatgaaggggctcctaattatcctgatgctgggagatgttgggacattgttgacaaatataaggtgacaatattctacactgctccgatattggtgcggtctctcatgcgtgatggtgatgcgtttgttactcgctactcaaggaaatctttacgagtcctaggaagtgtaggtgagcccataaatccaagtgcatggaggtggttttacaatgtagttggagattcaaggtgccctatctctgacacttggtggcaaacagaaacaggtggcttcatgataactccactaccaggtgcttggccccagaaacctggttctgcaactttccctttctttggagttcagcctgtcatactggatgagaaaggtgttgaaatagaaggggagtgcaatggatatttgtgtgtgaagaaatcatggcctggggcattcagaactctgtatggtgatcatgaaagatatgaaacaacatatttcaagccatttgccggatactatttcagtggtgatggttgcagcagggataaagatggataccattggctcattggaagagttgacgatgtcatcaatgttagtgggcatcgaattggcacggcagaagtggaatcagctttagtttcacatccgcaatgtgcagaggctgctgtggttggtgtggagcatgaggtcaaaggacagggcatctatgcatttgttacagttgtggatggtgttccttacagtgaagaactgcggaaggaccttgtactcatagttcgaaagcagataggagcctttgcagcacctgataaaattcattgggcacctggccttccaaaaacaaggagtggaaagataatgcgaagaattctgagaaaaattgcgtctcggcagctggatgaacttggagatacaagtacccttgcagatccaaatgtggtcaatcaacttatagaacttgcagattcttga

SEQ ID NO: 151843 - protein, 752 aa, Glycine max
MIPLSHNPVSVHLGGTPCDSLHPITFHPILNKPRSSASLFWNCKRRRKRKSSITMASNLRTNNFLRHVESMKLLPSGAGHISHLNAVILGESLATEEDDFVLPSEDFASQANVQSPEQYLKMYNRSIEDPAGFWSEIASEFYWKQRWGDKVCDENFDVRKGNIKIEWFKGGITNICYNCLDRNVEAGLGDKVAIYWEGNEPGLDGTLTYTELLQQVCQLANYLKDIGVKKGDAVIIYLPMLMELPIAMLACARIGAVHSVVFAGFSAEALSQRIIDCKPKVVITCNAVKRGPKPIYLKDIVDAAINDSAQNGVSIDKCLVYENPLAMKRVDTKWKEGRDIWWQDVIPQYPTTCPLEWVDAEDPLFLLYTSGSTGKPKGVLHTTGGYMVYTATTFKYAFDYKPSDIYWCTADCGWITGHSYVTYGPMLNGASVIVYEGAPNYPDAGRCWDIVDKYKVTIFYTAPILVRSLMRDGDAFVTRYSRKSLRVLGSVGEPINPSAWRWFYNVVGDSRCPISDTWWQTETGGFMITPLPGAWPQKPGSATFPFFGVQPVILDEKGVEIEGECNGYLCVKKSWPGAFRTLYGDHERYETTYFKPFAGYYFSGDGCSRDKDGYHWLIGRVDDVINVSGHRIGTAEVESALVSHPQCAEAAVVGVEHEVKGQGIYAFVTVVDGVPYSEELRKDLVLIVRKQIGAFAAPDKIHWAPGLPKTRSGKIMRRILRKIASRQLDELGDTSTLADPNVVNQLIELADS

SEQ ID NO: 151844 - DNA, 2121 bp, Zea mays; identical to SEQ ID NO: 122206
  CDS (1)..(2121)

SEQ ID NO: 151845 - protein, 706 aa, Zea mays; identical to SEQ ID NO: 122207

SEQ ID NO: 151846 - DNA, 2259 bp, Glycine max; identical to SEQ ID NO: 122210
  CDS (1)..(2259)

SEQ ID NO: 151847 - protein, 752 aa, Glycine max; identical to SEQ ID NO: 122211

SEQ ID NO: 151848 - DNA, 26 bp, Artificial sequence
  primer
atgacaatcaaggaacataaagtagt

SEQ ID NO: 151849 - DNA, 28 bp, Artificial sequence
  primer
ttatttctttttttgagagaaaaattgg
